United States Patent Application Publication US 2011/0183924 A1 - sequence listing, part 168

SEQ ID NO: 426940 - DNA, 3565 bp, Homo sapiens
aactaaggctaggtacgaggctgggttgtgcgggccggccgacatggcggcagcggtggcggctgcgctggcgcggcttttggcggcctttctgctcctcgcggcccaggtggcctgtgagtacggcatggtgcacgtggtctcccaggccgggggccccgaaggcaaagactactgcatcctctacaacccgcagtgggcccatcttccgcacgacctcagcaaggcatctttcctgcagctgcgcaactggacggcctccctgctctgctccgcagccgacctccccgcccgtggcttcagcaaccagatcccgctggtggcgcgggggaactgcaccttctatgagaaagtgaggctggcccagggcagcggagcacgcgggctgctcatcgtcagcagggagaggctggtccccccggggggtaataagacgcagtatgatgagattggcattcccgtggccctgctcagctacaaagacatgctggacatcttcacgcgtttcggccgcacggtgagggcggcgctgtatgcgcctaaggagccggtgctggactacaacatggtcatcatcttcatcatggctgtgggcaccgtcgccatcggcggctactgggccgggagtcgggacgtgaagaaaaggtacatgaagcacaagcgcgacgatgggcccgagaagcaggaggacgaggcggtggacgtgacgccggtgatgacctgcgtgtttgtggtgatgtgctgctccatgctggtgctgctctactatttctacgacctcctcgtgtacgtggtcatcgggatcttctgcctggcctccgccaccggcctctacagctgcctggcgccctgtgtgcggcggctgcccttcggcaagtgcaggatccccaacaacagcctgccctacttccacaagcgcccgcaggcccgtatgctgctcctggcgctcttctgcgtggccgtcagcgtggtgtggggcgtcttccgcaacgaggaccagtgggcctgggtcctccaggatgccctgggcatcgccttctgcctctacatgctgaagaccatccgtctgcccaccttcaaggcctgcacgctgctgctgctggtgctgttcctctacgacatcttcttcgtgttcatcacgcccttcctgaccaagagtgggagcagcatcatggtggaggtggccactgggccctcggactcagccacccgtgagaagctgcccatggtcctgaaggtgcccaggctgaactcctcacctctggccctgtgtgaccggcccttctccctcctgggtttcggagacattttggtgccagggctgctggtggcctactgccacaggtttgacatccaggtacagtcctccagggtatacttcgtggcctgcaccatcgcctatggcgttggcctccttgtgacattcgtggcactggccctgatgcagcgtggccagcccgctctcctctacctggtgccctgcacgctggtgacgagctgcgctgtggcgctctggcgccgggagctgggcgtgttctggacgggcagcggctttgcgaaagtcctacctccatctccgtgggccccagcaccagccgacggcccgcagcctcccaaagactctgccacgccactctccccgcagccgcccagcgaagaaccagccacatccccctggcctgctgagcagtccccaaaatcacgcacgtccgaggagatgggggctggagcccccatgcgggagcctgggagcccagctgaatccgagggccgggaccaggcccagccgtccccggtaacccagcctggcgcctcggcctaggggaggggtgagacgctcgctgccgtgcccgccacaccaagatgttggggctgcctggcgcccactggagacagacagacagacgcctgtcccccgggaccgaggcctgtgccgtccccacccgccccaacatggtgctcatccttgccgagacccctgcggtctgtgcccgcgcccagcccagctgccccggctgcacgcctgctgctcccagctcgcccggctgccacaagctctctgcgggtccatcctccccaccggggtccgtcctcgcaggccctgcccggcctctctgcagaccctcaagcgtcgtctgcatgagtgagcaggcgtgggtggactctggccgcggccacacttggtgctcaccagctgcttcggccttcaggtgacctccctccccacggcatcctgctctccgggtggaagagcagctttctgtctcccagaaggcatcgcttttccctcttgagcagatcggagcccctgggaggtttggaagctgcctccaagcctaggacacggaccggtggccggggcggcctctggcccctgacgctggctgagacaggcccgtggggcggggttttggggcgtgaacaaggctggcagtaagtggacaagctgctcccctggctaaggccctgccctgccctcagccagaggtgcctggccatgcctgcacactcctccccattttaataaatggtcgcaacttctagaagtcctgctggtgccacctggtggggtggacgtctctcagactgcccttctgacaagcaggggtgggcgccaggcaggctgggtcaggccctcaggggtccctggagccctgggagggagggactgggtcgtgggaggtcctggtagctcccggcacccaacctcgcttcccgtgtgggccccgtgttgcttttctgctgagaggggcttgggcctcggttctccctgtggcagcggcattggtgcctgggttcttaaccctctggacccagcagctaggagcttctggaacccacgaggacatctgccactggcatggtctactcactgatggggtcctcctgactccagggcagagacgtccgtgcgggaactgaccgaggcgtggccccaggccccggcatcctcccctcgctgcacgtggtcacttccgaagcagcgctccctgtggccgcagagacagagcccgcaccctggctgtctgtggtgcctgggccccagctcccgcccgccacccgccctgttgagtgcggcctccagactcgagtccagaatctgtttctgtcaagtcagtcgtccccagctgcacacggggactgctgagcgctgcgctctcacgggtctgttccggacagagggtggcaggggtgagccctgatcccttacaaaaaataccagcttcccagggagtaatggcgccttcactgaagccattttgtacatggggacggggtggggacgtctcttttttggtgttggacgtttgaccagtggggaggggttcagaggcggcggtcctgtccttggctccgtctgtccgtgtggccttgctgccattccgtctgatcattaaacacagcttttgattaaaaaaaaaggggggcgctaaaaacctgagggcagtacgtccacatttggaaaggcaagagaggaaaaaagggggcgggaaacgcgcggacggacgggctggaagaaccctggggggggaccaaaacggaaaagtgggacctcgcagggtaa

SEQ ID NO: 426941 - DNA, 3637 bp, Homo sapiens
cggggcgttgctgggaaacatctgccgttggttgcggcgggcaccggccgacatggcggcagcggtggcggctgcgctggcgcggcttttggcggcctttctgctcctcgcggcccaggtggcctgtgagtacggcatggtgcacgtggtctcccaggccgggggccccgaaggcaaagactactgcatcctctacaacccgcagtgggcccatcttccgcacgacctcagcaaggcatctttcctgcagctgcgcaactggacggcctccctgctctgctccgcagccgacctccccgcccgtggcttcagcaaccagatcccgctggtggcgcgggggaactgcaccttctatgagaaagtgaggctggcccagggcagcggagcacgcgggctgctcatcgtcagcagggagaggctggtccccccggggggtaataagacgcagtatgatgagattggcattcccgtggccctgctcagctacaaagacatgctggacatcttcacgcgtttcggccgcacggtgagggcggcgctgtatgcgcctaaggagccggtgctggactacaacatggtcatcatcttcatcatggctgtgggcaccgtcgccatcggcggctactgggccgggagtcgggacgtgaagaaaaggtacatgaagcacaagcgcgacgatgggcccgagaagcaggaggacgaggcggtggacgtgacgccggtgatgacctgcgtgtttgtggtgatgtgctgctccatgctggtgctgctctactatttctacgacctcctcgtgtacgtggtcatcgggatcttctgcctggcctccgccaccggcctctacagctgcctggcgccctgtgtgcggcggctgcccttcggcaagtgcaggatccccaacaacagcctgccctacttccacaagcgcccgcaggcccgtatgctgctcctggcgctcttctgcgtggccgtcagcgtggtgtggggcgtcttccgcaacgaggaccagtgggcctgggtcctccaggatgccctgggcatcgccttctgcctctacatgctgaagaccatccgtctgcccaccttcaaggcctgcacgctgctgctgctggtgctgttcctctacgacatcttcttcgtgttcatcacgcccttcctgaccaagagtgggagcagcatcatggtggaggtggccactgggccctcggactcagccacccgtgagaagctgcccatggtcctgaaggtgcccaggctgaactcctcacctctggccctgtgtgaccggcccttctccctcctgggtttcggagacattttggtgccagggctgctggtggcctactgccacaggtttgacatccaggtacagtcctccagggtatacttcgtggcctgcaccatcgcctatggcgttggcctccttgtgacattcgtggcactggccctgatgcagcgtggccagcccgctctcctctacctggtgccctgcacgctggtgacgagctgcgctgtggcgctctggcgccgggagctgggcgtgttctggacgggcagcggctttgcggtgaataccagtttgctctgactgtgagaaatactcgcctagtgagccctaactagagttaaaaaagtcctacctccatctccgtgggccccagcaccagccgacggcccgcagcctcccaaagactctgccacgccactctccccgcagccgcccagcgaagaaccagccacatccccctggcctgctgagcagtccccaaaatcacgcacgtccgaggagatgggggctggagcccccatgcgggagcctgggagcccagctgaatccgagggccgggaccaggcccagccgtccccggtaacccagcctggcgcctcggcctaggggaggggtgagacgctcgctgccgtgcccgccacaccaagatgttggggctgcctggcgcccactggagacagacagacagacgcctgtcccccgggaccgaggcctgtgccgtccccacccgccccaacatggtgctcatccttgccgagacccctgcggtctgtgcccgcgcccagcccagctgccccggctgcacgcctgctgctcccagctcgcccggctgccacaagctctctgcgggtccatcctccccaccggggtccgtcctcgcaggccctgcccggcctctctgcagaccctcaagcgtcgtctgcatgagtgagcaggcgtgggtggactctggccgcggccacacttggtgctcaccagctgcttcggccttcaggtgacctccctccccacggcatcctgctctccgggtggaagagcagctttctgtctcccagaaggcatcgcttttccctcttgagcagatcggagcccctgggaggtttggaagctgcctccaagcctaggacacggaccggtggccggggcggcctctggcccctgacgctggctgagacaggcccgtggggcggggttttggggcgtgaacaaggctggcagtaagtggacaagctgctcccctggctaaggccctgccctgccctcagccagaggtgcctggccatgcctgcacactcctccccattttaataaatggtcgcaacttctagaagtcctgctggtgccacctggtggggtggacgtctctcagactgcccttctgacaagcaggggtgggcgccaggcaggctgggtcaggccctcaggggtccctggagccctgggagggagggactgggtcgtgggaggtcctggtagctcccggcacccaacctcgcttcccgtgtgggccccgtgttgcttttctgctgagaggggcttgggcctcggttctccctgtggcagcggcattggtgcctgggttcttaaccctctggacccagcagctaggagcttctggaacccacgaggacatctgccactggcatggtctactcactgatggggtcctcctgactccagggcagagacgtccgtgcgggaactgaccgaggcgtggccccaggccccggcatcctcccctcgctgcacgtggtcacttccgaagcagcgctccctgtggccgcagagacagagcccgcaccctggctgtctgtggtgcctgggccccagctcccgcccgccacccgccctgttgagtgcggcctccagactcgagtccagaatctgtttctgtcaagtcagtcgtccccagctgcacacggggactgctgagcgctgcgctctcacgggtctgttccggacagagggtggcaggggtgagccctgatcccttacaaaaaataccagcttcccagggagtaatggcgccttcactgaagccattttgtacatggggacggggtggggacgtctcttttttggtgttggacgtttgaccagtggggaggggttcagaggcggcggtcctgtccttggctccgtctgtccgtgtggccttgctgccattccgtctgatcattaaacacagcttttgattaaaaaaaaaggggggcgctaaaaacctgagggcagtacgtccacatttggaaaggcaagagaggaaaaaagggggcgggaaacgcgcggacggacgggctggaagaaccctggggggggaccaaaacggaaaagtgggacctcgcagggtaa

SEQ ID NO: 426942 - DNA, 4073 bp, Homo sapiens
agctgctggctggggctgtggaactttggccgtggtcttgttgggtgcctgtcctagagcagcccccaggggtgacggagaccacaccctctgtggggatgggattggggtggcttctgaggagcaggtggcctggccctgagctggtcctttctgggtaccctggtgcccttgccctctagccggtggggccgtgctcgcctgtgtggtcctagccaggtggcctgaagcctggccccttttccatcttctgtgaaatggggctgtggttgagagctgggggcctggcagggctggtcacagcacagggacatgccgactgctgggctgggcagggtgcgtggccgcccctgaagtgtagttttggagtaagaaggaatggagttcaggaattccctcacagctctgcctgtggctctgggctgcccccgccagtgttgcaccctgagcctggcaatccacggaggcctggtgcaggggctcagggccgagggcagagcaggccgggcagagccgagagtgccatccctgtccgcacacgctgccgtcgtagttgagagaggccctcagtgggtgcggggctcaaggcggcttagtgggcaggcatgggctgtgacaagtatcactcaggacttgtatgtgcggttcgggagtcccacggccgagggagggattagtggcgcttttaggcctggggccctgttgtcaggtgaagaaggcttgatgcccttcggcctccctgttcttgggtcctcctggggggccggaggctgtcagctgcagagggggagccagcaggcgcccccagcctgacccgagcctcgagtgagggtcccaggagaggaggcgaatgggcacagagctgggggcccacccactgctgcgggtgatgcctgccgctccctcctctgggcccccaggtccccccggggggtaataagacgcagtatgatgagattggcattcccgtggccctgctcagctacaaagacatgctggacatcttcacgcgtttcggccgcacggtgagggcggcgctgtatgcgcctaaggagccggtgctggactacaacatggtcatcatcttcatcatggctgtgggcaccgtcgccatcggcggctactgggccgggagtcgggacgtgaagaaaaggtacatgaagcacaagcgcgacgatgggcccgagaagcaggaggacgaggcggtggacgtgacgccggtgatgacctgcgtgtttgtggtgatgtgctgctccatgctggtgctgctctactatttctacgacctcctcgtgtacgtggtcatcgggatcttctgcctggcctccgccaccggcctctacagctgcctggcgccctgtgtgcggcggctgcccttcggcaagtgcaggatccccaacaacagcctgccctacttccacaagcgcccgcaggcccgtatgctgctcctggcgctcttctgcgtggccgtcagcgtggtgtggggcgtcttccgcaacgaggaccagtgggcctgggtcctccaggatgccctgggcatcgccttctgcctctacatgctgaagaccatccgtctgcccaccttcaaggcctgcacgctgctgctgctggtgctgttcctctacgacatcttcttcgtgttcatcacgcccttcctgaccaagagtgggagcagcatcatggtggaggtggccactgggccctcggactcagccacccgtgagaagctgcccatggtcctgaaggtgcccaggctgaactcctcacctctggccctgtgtgaccggcccttctccctcctgggtttcggagacattttggtgccagggctgctggtggcctactgccacaggtttgacatccaggtacagtcctccagggtatacttcgtggcctgcaccatcgcctatggcgttggcctccttgtgacattcgtggcactggccctgatgcagcgtggccagcccgctctcctctacctggtgccctgcacgctggtgacgagctgcgctgtggcgctctggcgccgggagctgggcgtgttctggacgggcagcggctttgcgaaagtcctacctccatctccgtgggccccagcaccagccgacggcccgcagcctcccaaagactctgccacgccactctccccgcagccgcccagcgaagaaccagccacatccccctggcctgctgagcagtccccaaaatcacgcacgtccgaggagatgggggctggagcccccatgcgggagcctgggagcccagctgaatccgagggccgggaccaggcccagccgtccccggtaacccagcctggcgcctcggcctaggggaggggtgagacgctcgctgccgtgcccgccacaccaagatgttggggctgcctggcgcccactggagacagacagacagacgcctgtcccccgggaccgaggcctgtgccgtccccacccgccccaacatggtgctcatccttgccgagacccctgcggtctgtgcccgcgcccagcccagctgccccggctgcacgcctgctgctcccagctcgcccggctgccacaagctctctgcgggtccatcctccccaccggggtccgtcctcgcaggccctgcccggcctctctgcagaccctcaagcgtcgtctgcatgagtgagcaggcgtgggtggactctggccgcggccacacttggtgctcaccagctgcttcggccttcaggtgacctccctccccacggcatcctgctctccgggtggaagagcagctttctgtctcccagaaggcatcgcttttccctcttgagcagatcggagcccctgggaggtttggaagctgcctccaagcctaggacacggaccggtggccggggcggcctctggcccctgacgctggctgagacaggcccgtggggcggggttttggggcgtgaacaaggctggcagtaagtggacaagctgctcccctggctaaggccctgccctgccctcagccagaggtgcctggccatgcctgcacactcctccccattttaataaatggtcgcaacttctagaagtcctgctggtgccacctggtggggtggacgtctctcagactgcccttctgacaagcaggggtgggcgccaggcaggctgggtcaggccctcaggggtccctggagccctgggagggagggactgggtcgtgggaggtcctggtagctcccggcacccaacctcgcttcccgtgtgggccccgtgttgcttttctgctgagaggggcttgggcctcggttctccctgtggcagcggcattggtgcctgggttcttaaccctctggacccagcagctaggagcttctggaacccacgaggacatctgccactggcatggtctactcactgatggggtcctcctgactccagggcagagacgtccgtgcgggaactgaccgaggcgtggccccaggccccggcatcctcccctcgctgcacgtggtcacttccgaagcagcgctccctgtggccgcagagacagagcccgcaccctggctgtctgtggtgcctgggccccagctcccgcccgccacccgccctgttgagtgcggcctccagactcgagtccagaatctgtttctgtcaagtcagtcgtccccagctgcacacggggactgctgagcgctgcgctctcacgggtctgttccggacagagggtggcaggggtgagccctgatcccttacaaaaaataccagcttcccagggagtaatggcgccttcactgaagccattttgtacatggggacggggtggggacgtctcttttttggtgttggacgtttgaccagtggggaggggttcagaggcggcggtcctgtccttggctccgtctgtccgtgtggccttgctgccattccgtctgatcattaaacacagcttttgattaaaaaaaaaggggggcgctaaaaacctgagggcagtacgtccacatttggaaaggcaagagaggaaaaaagggggcgggaaacgcgcggacggacgggctggaagaaccctggggggggaccaaaacggaaaagtgggacctcgcagggtaa

SEQ ID NO: 426943 - DNA, 3512 bp, Homo sapiens
cggggcgttgctgggaaacatctgccgttggttgcggcgggcaccggccgacatggcggcagcggtggcggctgcgctggcgcggcttttggcggcctttctgctcctcgcggcccaggtggcctgtgagtacggcatggtgcacgtggtctcccaggccgggggccccgaaggcaaagactactgcatcctctacaacccgcagtgggcccatcttccgcacgacctcagcaaggcatctttcctgcagctgcgcaactggacggcctccctgctctgctccgcagccgacctccccgcccgtggcttcagcaaccagatcccgctggtggcgcgggggaactgcaccttctatgagaaagtgaggctggcccagggcagcggagcacgcgggctgctcatcgtcagcagggagaggctgctacaaagacatgctggacatcttcacgcgtttcggccgcacggtgagggcggcgctgtatgcgcctaaggagccggtgctggactacaacatggtcatcatcttcatcatggctgtgggcaccgtcgccatcggcggctactgggccgggagtcgggacgtgaagaaaaggtacatgaagcacaagcgcgacgatgggcccgagaagcaggaggacgaggcggtggacgtgacgccggtgatgacctgcgtgtttgtggtgatgtgctgctccatgctggtgctgctctactatttctacgacctcctcgtgtacgtggtcatcgggatcttctgcctggcctccgccaccggcctctacagctgcctggcgccctgtgtgcggcggctgcccttcggcaagtgcaggatccccaacaacagcctgccctacttccacaagcgcccgcaggcccgtatgctgctcctggcgctcttctgcgtggccgtcagcgtggtgtggggcgtcttccgcaacgaggaccagtgggcctgggtcctccaggatgccctgggcatcgccttctgcctctacatgctgaagaccatccgtctgcccaccttcaaggcctgcacgctgctgctgctggtgctgttcctctacgacatcttcttcgtgttcatcacgcccttcctgaccaagagtgggagcagcatcatggtggaggtggccactgggccctcggactcagccacccgtgagaagctgcccatggtcctgaaggtgcccaggctgaactcctcacctctggccctgtgtgaccggcccttctccctcctgggtttcggagacattttggtgccagggctgctggtggcctactgccacaggtttgacatccaggtacagtcctccagggtatacttcgtggcctgcaccatcgcctatggcgttggcctccttgtgacattcgtggcactggccctgatgcagcgtggccagcccgctctcctctacctggtgccctgcacgctggtgacgagctgcgctgtggcgctctggcgccgggagctgggcgtgttctggacgggcagcggctttgcgaaagtcctacctccatctccgtgggccccagcaccagccgacggcccgcagcctcccaaagactctgccacgccactctccccgcagccgcccagcgaagaaccagccacatccccctggcctgctgagcagtccccaaaatcacgcacgtccgaggagatgggggctggagcccccatgcgggagcctgggagcccagctgaatccgagggccgggaccaggcccagccgtccccggtaacccagcctggcgcctcggcctaggggaggggtgagacgctcgctgccgtgcccgccacaccaagatgttggggctgcctggcgcccactggagacagacagacagacgcctgtcccccgggaccgaggcctgtgccgtccccacccgccccaacatggtgctcatccttgccgagacccctgcggtctgtgcccgcgcccagcccagctgccccggctgcacgcctgctgctcccagctcgcccggctgccacaagctctctgcgggtccatcctccccaccggggtccgtcctcgcaggccctgcccggcctctctgcagaccctcaagcgtcgtctgcatgagtgagcaggcgtgggtggactctggccgcggccacacttggtgctcaccagctgcttcggccttcaggtgacctccctccccacggcatcctgctctccgggtggaagagcagctttctgtctcccagaaggcatcgcttttccctcttgagcagatcggagcccctgggaggtttggaagctgcctccaagcctaggacacggaccggtggccggggcggcctctggcccctgacgctggctgagacaggcccgtggggcggggttttggggcgtgaacaaggctggcagtaagtggacaagctgctcccctggctaaggccctgccctgccctcagccagaggtgcctggccatgcctgcacactcctccccattttaataaatggtcgcaacttctagaagtcctgctggtgccacctggtggggtggacgtctctcagactgcccttctgacaagcaggggtgggcgccaggcaggctgggtcaggccctcaggggtccctggagccctgggagggagggactgggtcgtgggaggtcctggtagctcccggcacccaacctcgcttcccgtgtgggccccgtgttgcttttctgctgagaggggcttgggcctcggttctccctgtggcagcggcattggtgcctgggttcttaaccctctggacccagcagctaggagcttctggaacccacgaggacatctgccactggcatggtctactcactgatggggtcctcctgactccagggcagagacgtccgtgcgggaactgaccgaggcgtggccccaggccccggcatcctcccctcgctgcacgtggtcacttccgaagcagcgctccctgtggccgcagagacagagcccgcaccctggctgtctgtggtgcctgggccccagctcccgcccgccacccgccctgttgagtgcggcctccagactcgagtccagaatctgtttctgtcaagtcagtcgtccccagctgcacacggggactgctgagcgctgcgctctcacgggtctgttccggacagagggtggcaggggtgagccctgatcccttacaaaaaataccagcttcccagggagtaatggcgccttcactgaagccattttgtacatggggacggggtggggacgtctcttttttggtgttggacgtttgaccagtggggaggggttcagaggcggcggtcctgtccttggctccgtctgtccgtgtggccttgctgccattccgtctgatcattaaacacagcttttgattaaaaaaaaaggggggcgctaaaaacctgagggcagtacgtccacatttggaaaggcaagagaggaaaaaagggggcgggaaacgcgcggacggacgggctggaagaaccctggggggggaccaaaacggaaaagtgggacctcgcagggtaa

SEQ ID NO: 426944 - DNA, 3487 bp, Homo sapiens
cggggcgttgctgggaaacatctgccgttggttgcggcgggcaccggccgacatggcggcagcggtggcggctgcgctggcgcggcttttggcggcctttctgctcctcgcggcccaggtggcctgtgagtacggcatggtgcacgtggtctcccaggccgggggccccgaaggcaaagactactgcatcctctacaacccgcagtgggcccatcttccgcacgacctcagcaaggcatctttcctgcagctgcgcaactggacggcctccctgctctgctccgcagccgacctccccgcccgtggcttcagcaaccagatcccgctggtggcgcgggggaactgcaccttctatgagaaagtgaggctggcccagggcagcggagcacgcgggctgctcatcgtcagcagggagaggctggtccccccggggggtaataagacgcagtatgatgagattggcattcccgtggccctgctcagctacaaagacatgctggacatcttcacgcgtttcggccgcacggtgagggcggcgctgtatgcgcctaaggagccggtgctggactacaacatggtcatcatcttcatcatggctgtgggcaccgtcgccatcggcggctactgggccgggagtcgggacgtgaagaaaaggtacatgaagcacaagcgcgacgatgggcccgagaagcaggaggacgaggcggtggacgtgacgccggtgatgacctgcgtgtttgtggtgatgtgctgctccatgctggtgctgctctactatttctacgacctcctcgtgtacgtggtcatcgggatcttctgcctggcctccgccaccggcctctacagctgcctggcgccctgtgtgcggcggctgcccttcggcaagtgcaggatccccaacaacagcctgccctacttccacaagcgcccgcaggcccgtatgctgctcctggcgctcttctgcgtggccgtcagcgtggtgtggggcgtcttccgcaacgaggaccagtgggcctgggtcctccaggatgccctgggcatcgccttctgcctctacatgctgaagaccatccgtctgcccaccttcaaggcctgcacgctgctgctgctggtgctgttcctctacgacatcttcttcgtgttcatcacgcccttcctgaccaagagtgggagcagcatcatggtggaggtggccactgggccctcggactcagccacccgtgagaagctgcccatggtcctgaaggtgcccaggctgaactcctcacctctggccctgtgtgaccggcccttctccctcctgggtttcggagacattttggtgccagggctgctggtggcctactgccacaggtttgacatccaggtacagtcctccagggtatacttcgtggcctgcaccatcgcctatggcgttggcctccttgtgacattcgtggcactggccctgatgcagcgtggccagcccgctctcctctacctggtgccctgcacgctggtgacgagctgcgctgtggcgctctggcgccgggagctgggcgtgttctggacgggcagcggctttgcgaaagtcctacctccatctccgtgggccccagcaccagccgacggcccgcagcctcccaaagactctgccacgccactctccccgcagccgcccagcgaagaaccagccacatccccctggcctgctgagcagtccccaaaatcacgcacgtccgaggagatgggggctggagcccccatgcgggagcctgggagcccagctgaatccgagggccgggaccaggcccagccgtccccggtaacccagcctggcgcctcggcctaggggaggggtgagacgctcgctgccgtgcccgccacaccaagatgttggggctgcctggcgcccactggagacagacagacagacgcctgtcccccgggaccgaggcctgtgccgtccccacccgccccaacatggtgctcatccttgccgagacccctgcggtctgtgcccgcgcccagcccagctgccccggctgcacgcctgctgctcccagctcgcccggctgccacaagctctctgcgggtccatcctccccaccggggtccgtcctcgcaggccctgcccggcctctctgcagaccctcaagcgtcgtctgcatgagtgagcaggcgtgggtggaagagcagctttctgtctcccagaaggcatcgcttttccctcttgagcagatcggagcccctgggaggtttggaagctgcctccaagcctaggacacggaccggtggccggggcggcctctggcccctgacgctggctgagacaggcccgtggggcggggttttggggcgtgaacaaggctggcagtaagtggacaagctgctcccctggctaaggccctgccctgccctcagccagaggtgcctggccatgcctgcacactcctccccattttaataaatggtcgcaacttctagaagtcctgctggtgccacctggtggggtggacgtctctcagactgcccttctgacaagcaggggtgggcgccaggcaggctgggtcaggccctcaggggtccctggagccctgggagggagggactgggtcgtgggaggtcctggtagctcccggcacccaacctcgcttcccgtgtgggccccgtgttgcttttctgctgagaggggcttgggcctcggttctccctgtggcagcggcattggtgcctgggttcttaaccctctggacccagcagctaggagcttctggaacccacgaggacatctgccactggcatggtctactcactgatggggtcctcctgactccagggcagagacgtccgtgcgggaactgaccgaggcgtggccccaggccccggcatcctcccctcgctgcacgtggtcacttccgaagcagcgctccctgtggccgcagagacagagcccgcaccctggctgtctgtggtgcctgggccccagctcccgcccgccacccgccctgttgagtgcggcctccagactcgagtccagaatctgtttctgtcaagtcagtcgtccccagctgcacacggggactgctgagcgctgcgctctcacgggtctgttccggacagagggtggcaggggtgagccctgatcccttacaaaaaataccagcttcccagggagtaatggcgccttcactgaagccattttgtacatggggacggggtggggacgtctcttttttggtgttggacgtttgaccagtggggaggggttcagaggcggcggtcctgtccttggctccgtctgtccgtgtggccttgctgccattccgtctgatcattaaacacagcttttgattaaaaaaaaaggggggcgctaaaaacctgagggcagtacgtccacatttggaaaggcaagagaggaaaaaagggggcgggaaacgcgcggacggacgggctggaagaaccctggggggggaccaaaacggaaaagtgggacctcgcagggtaa

SEQ ID NO: 426945 - DNA, 3069 bp, Homo sapiens
cggggcggttccttgcgcttcagtcccccccgggtcccctcctgctcccgggttttctgccccgttcccccgggtggctgtgggctcccgagccccgtgtcggccagccggccccagggccccacgaccccatggtgtctcccaagaaggtacatgaagcacaagcgcgacgatgggcccgagaagcaggaggacgaggcggtggacgtgacgccggtgatgacctgcgtgtttgtggtgatgtgctgctccatgctggtgctgctctactatttctacgacctcctcgtgtacgtggtcatcgggatcttctgcctggcctccgccaccggcctctacagctgcctggcgccctgtgtgcggcggctgcccttcggcaagtgcaggatccccaacaacagcctgccctacttccacaagcgcccgcaggcccgtatgctgctcctggcgctcttctgcgtggccgtcagcgtggtgtggggcgtcttccgcaacgaggaccagtgggcctgggtcctccaggatgccctgggcatcgccttctgcctctacatgctgaagaccatccgtctgcccaccttcaaggcctgcacgctgctgctgctggtgctgttcctctacgacatcttcttcgtgttcatcacgcccttcctgaccaagagtgggagcagcatcatggtggaggtggccactgggccctcggactcagccacccgtgagaagctgcccatggtcctgaaggtgcccaggctgaactcctcacctctggccctgtgtgaccggcccttctccctcctgggtttcggagacattttggtgccagggctgctggtggcctactgccacaggtttgacatccaggtacagtcctccagggtatacttcgtggcctgcaccatcgcctatggcgttggcctccttgtgacattcgtggcactggccctgatgcagcgtggccagcccgctctcctctacctggtgccctgcacgctggtgacgagctgcgctgtggcgctctggcgccgggagctgggcgtgttctggacgggcagcggctttgcgaaagtcctacctccatctccgtgggccccagcaccagccgacggcccgcagcctcccaaagactctgccacgccactctccccgcagccgcccagcgaagaaccagccacatccccctggcctgctgagcagtccccaaaatcacgcacgtccgaggagatgggggctggagcccccatgcgggagcctgggagcccagctgaatccgagggccgggaccaggcccagccgtccccggtaacccagcctggcgcctcggcctaggggaggggtgagacgctcgctgccgtgcccgccacaccaagatgttggggctgcctggcgcccactggagacagacagacagacgcctgtcccccgggaccgaggcctgtgccgtccccacccgccccaacatggtgctcatccttgccgagacccctgcggtctgtgcccgcgcccagcccagctgccccggctgcacgcctgctgctcccagctcgcccggctgccacaagctctctgcgggtccatcctccccaccggggtccgtcctcgcaggccctgcccggcctctctgcagaccctcaagcgtcgtctgcatgagtgagcaggcgtgggtggactctggccgcggccacacttggtgctcaccagctgcttcggccttcaggtgacctccctccccacggcatcctgctctccgggtggaagagcagctttctgtctcccagaaggcatcgcttttccctcttgagcagatcggagcccctgggaggtttggaagctgcctccaagcctaggacacggaccggtggccggggcggcctctggcccctgacgctggctgagacaggcccgtggggcggggttttggggcgtgaacaaggctggcagtaagtggacaagctgctcccctggctaaggccctgccctgccctcagccagaggtgcctggccatgcctgcacactcctccccattttaataaatggtcgcaacttctagaagtcctgctggtgccacctggtggggtggacgtctctcagactgcccttctgacaagcaggggtgggcgccaggcaggctgggtcaggccctcaggggtccctggagccctgggagggagggactgggtcgtgggaggtcctggtagctcccggcacccaacctcgcttcccgtgtgggccccgtgttgcttttctgctgagaggggcttgggcctcggttctccctgtggcagcggcattggtgcctgggttcttaaccctctggacccagcagctaggagcttctggaacccacgaggacatctgccactggcatggtctactcactgatggggtcctcctgactccagggcagagacgtccgtgcgggaactgaccgaggcgtggccccaggccccggcatcctcccctcgctgcacgtggtcacttccgaagcagcgctccctgtggccgcagagacagagcccgcaccctggctgtctgtggtgcctgggccccagctcccgcccgccacccgccctgttgagtgcggcctccagactcgagtccagaatctgtttctgtcaagtcagtcgtccccagctgcacacggggactgctgagcgctgcgctctcacgggtctgttccggacagagggtggcaggggtgagccctgatcccttacaaaaaataccagcttcccagggagtaatggcgccttcactgaagccattttgtacatggggacggggtggggacgtctcttttttggtgttggacgtttgaccagtggggaggggttcagaggcggcggtcctgtccttggctccgtctgtccgtgtggccttgctgccattccgtctgatcattaaacacagcttttgattaaaaaaaaaggggggcgctaaaaacctgagggcagtacgtccacatttggaaaggcaagagaggaaaaaagggggcgggaaacgcgcggacggacgggctggaagaaccctggggggggaccaaaacggaaaagtgggacctcgcagggtaa

SEQ ID NO: 426946 - DNA, 2443 bp, Homo sapiens
cgaagaggtcaagaaccttgcagaaaagttggccaggttcatagcggacgggggtcccgaggtggaaaccattgccctccagaacaaccgtgagaagctgcccatggtcctgaaggtgcccaggctgaactcctcacctctggccctgtgtgaccggcccttctccctcctgggtttcggagacattttggtgccagggctgctggtggcctactgccacaggtttgacatccaggtacagtcctccagggtatacttcgtggcctgcaccatcgcctatggcgttggcctccttgtgacattcgtggcactggccctgatgcagcgtggccagcccgctctcctctacctggtgccctgcacgctggtgacgagctgcgctgtggcgctctggcgccgggagctgggcgtgttctggacgggcagcggctttgcgaaagtcctacctccatctccgtgggccccagcaccagccgacggcccgcagcctcccaaagactctgccacgccactctccccgcagccgcccagcgaagaaccagccacatccccctggcctgctgagcagtccccaaaatcacgcacgtccgaggagatgggggctggagcccccatgcgggagcctgggagcccagctgaatccgagggccgggaccaggcccagccgtccccggtaacccagcctggcgcctcggcctaggggaggggtgagacgctcgctgccgtgcccgccacaccaagatgttggggctgcctggcgcccactggagacagacagacagacgcctgtcccccgggaccgaggcctgtgccgtccccacccgccccaacatggtgctcatccttgccgagacccctgcggtctgtgcccgcgcccagcccagctgccccggctgcacgcctgctgctcccagctcgcccggctgccacaagctctctgcgggtccatcctccccaccggggtccgtcctcgcaggccctgcccggcctctctgcagaccctcaagcgtcgtctgcatgagtgagcaggcgtgggtggactctggccgcggccacacttggtgctcaccagctgcttcggccttcaggtgacctccctccccacggcatcctgctctccgggtggaagagcagctttctgtctcccagaaggcatcgcttttccctcttgagcagatcggagcccctgggaggtttggaagctgcctccaagcctaggacacggaccggtggccggggcggcctctggcccctgacgctggctgagacaggcccgtggggcggggttttggggcgtgaacaaggctggcagtaagtggacaagctgctcccctggctaaggccctgccctgccctcagccagaggtgcctggccatgcctgcacactcctccccattttaataaatggtcgcaacttctagaagtcctgctggtgccacctggtggggtggacgtctctcagactgcccttctgacaagcaggggtgggcgccaggcaggctgggtcaggccctcaggggtccctggagccctgggagggagggactgggtcgtgggaggtcctggtagctcccggcacccaacctcgcttcccgtgtgggccccgtgttgcttttctgctgagaggggcttgggcctcggttctccctgtggcagcggcattggtgcctgggttcttaaccctctggacccagcagctaggagcttctggaacccacgaggacatctgccactggcatggtctactcactgatggggtcctcctgactccagggcagagacgtccgtgcgggaactgaccgaggcgtggccccaggccccggcatcctcccctcgctgcacgtggtcacttccgaagcagcgctccctgtggccgcagagacagagcccgcaccctggctgtctgtggtgcctgggccccagctcccgcccgccacccgccctgttgagtgcggcctccagactcgagtccagaatctgtttctgtcaagtcagtcgtccccagctgcacacggggactgctgagcgctgcgctctcacgggtctgttccggacagagggtggcaggggtgagccctgatcccttacaaaaaataccagcttcccagggagtaatggcgccttcactgaagccattttgtacatggggacggggtggggacgtctcttttttggtgttggacgtttgaccagtggggaggggttcagaggcggcggtcctgtccttggctccgtctgtccgtgtggccttgctgccattccgtctgatcattaaacacagcttttgattaaaaaaaaaggggggcgctaaaaacctgagggcagtacgtccacatttggaaaggcaagagaggaaaaaagggggcgggaaacgcgcggacggacgggctggaagaaccctggggggggaccaaaacggaaaagtgggacctcgcagggtaa

SEQ ID NO: 426947 - DNA, 2989 bp, Homo sapiens
cggggcgttgctgggaaacatctgccgttggttgcggcgggcaccggccgacatggcggcagcggtggcggctgcgctggcgcggcttttggcggcctttctgctcctcgcggcccaggtggcctgtgagtacggcatggtgcacgtggtctcccaggccgggggccccgaaggcaaagactactgcatcctctacaacccgcagtgggcccatcttccgcacgacctcagcaaggcatctttcctgcagctgcgcaactggacggcctccctgctctgctccgcagccgacctccccgcccgtggcttcagcaaccagatcccgctggtggcgcgggggaactgcaccttctatgagaaagtgaggctggcccagggcagcggagcacgcgggctgctcatcgtcagcagggagaggctggtccccccggggggtaataagacgcagtatgatgagattggcattcccgtggccctgctcagctacaaagacatgctggacatcttcacgcgtttcggccgcacggtgagggcggcgctgtatgcgcctaaggagccggtgctggactacaacatggtcatcatcttcatcatggctgtgggcaccgtcgccatcggcggctactgggccgggagtcgggacgtgaagaaaaggtacatgaagcacaagcgcgacgatgggcccgagaagcaggaggacgaggcggtggacgtgacgccggtgatgacctgcgtgtttgtggtgatgtgctgctccatgctggtgctgctctactatttctacgacctcctcgtgtacgtggtcatcgggatcttctgcctggcctccgccaccggcctctacagctgcctggcgccctgtgtgcggcggctgcccttcggcaagtgcaggatccccaacaacagcctgccctacttccacaagcgcccgcaggcccgtatgctgctcctggcgctcttctgcgtggccgtcagcgtggtgtggggcgtcttccgcaacgaggaccagtgggcctgggtcctccaggatgccctgggcatcgccttctgcctctacatgctgaagaccatccgtctgcccaccttcaaggcctgcacgctgctgctgctggtgctgttcctctacgacatcttcttcgtgttcatcacgcccttcctgaccaagagtgggagcagcatcatggtggaggtggccactgggccctcggactcagccacccgtgagaagctgcccatggtcctgaaggtgcccaggctgaactcctcacctctggccctgtgtgaccggcccttctccctcctgggtttcggagacattttggtgccagggctgctggtggcctactgccacaggtttgacatccaggtacagtcctccagggtatacttcgtggcctgcaccatcgcctatggcgttggcctccttgtgacattcgtggcactggccctgatgcagcgtggccagcccgctctcctctacctggtgccctgcacgctggtgacgagctgcgctgtggcgctctggcgccgggagctgggcgtgttctggacgggcagcggctttgcggtgaataccagtttgctctgactgtgagaaatactcgcctagtgagccctaactagagttaaaaaagtcctacctccatctccgtgggccccagcaccagccgacggcccgcagcctcccaaagactctgccacgccactctccccgcagccgcccagcgaagaaccagccacatccccctggcctgctgagcagtccccaaaatcacgcacgtccgaggagatgggggctggagcccccatgcgggagcctgggagcccagctgaatccgagggccgggaccaggcccagccgtccccggtaacccagccttggctaaggccctgccctgccctcagccagaggtgcctggccatgcctgcacactcctccccattttaataaatggtcgcaacttctagaagtcctgctggtgccacctggtggggtggacgtctctcagactgcccttctgacaagcaggggtgggcgccaggcaggctgggtcaggccctcaggggtccctggagccctgggagggagggactgggtcgtgggaggtcctggtagctcccggcacccaacctcgcttcccgtgtgggccccgtgttgcttttctgctgagaggggcttgggcctcggttctccctgtggcagcggcattggtgcctgggttcttaaccctctggacccagcagctaggagcttctggaacccacgaggacatctgccactggcatggtctactcactgatggggtcctcctgactccagggcagagacgtccgtgcgggaactgaccgaggcgtggccccaggccccggcatcctcccctcgctgcacgtggtcacttccgaagcagcgctccctgtggccgcagagacagagcccgcaccctggctgtctgtggtgcctgggccccagctcccgcccgccacccgccctgttgagtgcggcctccagactcgagtccagaatctgtttctgtcaagtcagtcgtccccagctgcacacggggactgctgagcgctgcgctctcacgggtctgttccggacagagggtggcaggggtgagccctgatcccttacaaaaaataccagcttcccagggagtaatggcgccttcactgaagccattttgtacatggggacggggtggggacgtctcttttttggtgttggacgtttgaccagtggggaggggttcagaggcggcggtcctgtccttggctccgtctgtccgtgtggccttgctgccattccgtctgatcattaaacacagcttttgattaaaaaaaaaggggggcgctaaaaacctgagggcagtacgtccacatttggaaaggcaagagaggaaaaaagggggcgggaaacgcgcggacggacgggctggaagaaccctggggggggaccaaaacggaaaagtgggacctcgcagggtaa

SEQ ID NO: 426948 - DNA, 2941 bp, Homo sapiens
cggggcgttgctgggaaacatctgccgttggttgcggcgggcaccggccgacatggcggcagcggtggcggctgcgctggcgcggcttttggcggcctttctgctcctcgcggcccaggtggcctgtgagtacggcatggtgcacgtggtctcccaggccgggggccccgaaggcaaagactactgcatcctctacaacccgcagtgggcccatcttccgcacgacctcagcaaggcatctttcctgcagctgcgcaactggacggcctccctgctctgctccgcagccgacctccccgcccgtggcttcagcaaccagatcccgctggtggcgcgggggaactgcaccttctatgagaaagtgaggctggcccagggcagcggagcacgcgggctgctcatcgtcagcagggagaggctggtccccccggggggtaataagacgcagtatgatgagattggcattcccgtggccctgctcagctacaaagacatgctggacatcttcacgcgtttcggccgcacggtgagggcggcgctgtatgcgcctaaggagccggtgctggactacaacatggtcatcatcttcatcatggctgtgggcaccgtcgccatcggcggctactgggccgggagtcgggacgtgaagaaaaggtacatgaagcacaagcgcgacgatgggcccgagaagcaggaggacgaggcggtggacgtgacgccggtgatgacctgcgtgtttgtggtgatgtgctgctccatgctggtgctgctctactatttctacgacctcctcgtgtacgtggtcatcgggatcttctgcctggcctccgccaccggcctctacagctgcctggcgccctgtgtgcggcggctgcccttcggcaagtgcaggatccccaacaacagcctgccctacttccacaagcgcccgcaggcccgtatgctgctcctggcgctcttctgcgtggccgtcagcgtggtgtggggcgtcttccgcaacgaggaccagtgggcctgggtcctccaggatgccctgggcatcgccttctgcctctacatgctgaagaccatccgtctgcccaccttcaaggcctgcacgctgctgctgctggtgctgttcctctacgacatcttcttcgtgttcatcacgcccttcctgaccaagagtgggagcagcatcatggtggaggtggccactgggccctcggactcagccacccgtgagaagctgcccatggtcctgaaggtgcccaggctgaactcctcacctctggccctgtgtgaccggcccttctccctcctgggtttcggagacattttggtgccagggctgctggtggcctactgccacaggtttgacatccaggtacagtcctccagggtatacttcgtggcctgcaccatcgcctatggcgttggcctccttgtgacattcgtggcactggccctgatgcagcgtggccagcccgctctcctctacctggtgccctgcacgctggtgacgagctgcgctgtggcgctctggcgccgggagctgggcgtgttctggacgggcagcggctttgcgaaagtcctacctccatctccgtgggccccagcaccagccgacggcccgcagcctcccaaagactctgccacgccactctccccgcagccgcccagcgaagaaccagccacatccccctggcctgctgagcagtccccaaaatcacgcacgtccgaggagatgggggctggagcccccatgcgggagcctgggagcccagctgaatccgagggccgggaccaggcccagccgtccccggtaacccagcctggcgcctcggcctaggggaggggtgagacgctcgctgccgtgcccgccacaccaagatgttggggctgcctggcgcccactggagacagacagacagacgcctgtcccccgggaccgaggcctgtgccgtccccacccgccccaacatggtgctcatccttgccgagacccctgcggtctgtgcccgcgcccagcccagctgccccggctgcacgcctgctgctcccagctcgcccggctgccacaagctctctgcgggtccatcctccccaccggggtccgtcctcgcaggccctgcccggcctctctgcagaccctcaagcgtcgtctgcatgagtgagcaggcgtgggtggactctggccgcggccacacttggtgctcaccagctgcttcggccttcaggtgacctccctccccacggcatcctgctctccgggtggaagagcagctttctgtctcccagaaggcatcgcttttccctcttgagcagatcggagcccctgggaggtttggaagctgcctccaagcctaggacacggaccggtggccggggcggcctctggcccctgacgctggctgagacaggcccgtggggcggggttttggggcgtgaacaaggctggcagtaagtggacaagctgctcccctggctaaggccctgccctgccctcagccagaggtgcctggccatgcctgcacactcctccccattttaataaatggtcgcaaccttcaaaaaaagaaaagaagcgacaagcaacaaacagcagagagactcacacacgacaacgcaaacagacacacagaagacaagacaaaaacgaacagggggccgggcgagccaaaaagaaaaccacgcaggcgggagcggcagacagacgcgagcagcacacccaagcacaactgcacagaaaaaagagacggcacaccaaaaagcagcgaagcagaaagagaaaaaaacagacagacaggaacgaaggcccacaaagacgaacaaaacaccgcaccaacggcgagcgagaacacacaagggccagcagaggagggaacaagcgaaagcagagagagcgcccaacaacacggggggaacggcgaccaacaccgcaggaccaacacacacagaa

SEQ ID NO: 426949 - DNA, 2191 bp, Homo sapiens
cggggcgttgctgggaaacatctgccgttggttgcggcgggcaccggccgacatggcggcagcggtggcggctgcgctggcgcggcttttggcggcctttctgctcctcgcggcccaggtggcctgtgagtacggcatggtgcacgtggtctcccaggccgggggccccgaaggcaaagactactgcatcctctacaacccgcagtgggcccatcttccgcacgacctcagcaaggcatctttcctgcagctgcgcaactggacggcctccctgctctgctccgcagccgacctccccgcccgtggcttcagcaaccagatcccgctggtggcgcgggggaactgcaccttctatgagaaagtgaggctggcccagggcagcggagcacgcgggctgctcatcgtcagcagggagaggctggtccccccggggggtaataagacgcagtatgatgagattggcattcccgtggccctgctcagctacaaagacatgctggacatcttcacgcgtttcggccgcacggtgagggcggcgctgtatgcgcctaaggagccggtgctggactacaacatggtcatcatcttcatcatggctgtgggcaccgtcgccatcggcggctactgggccgggagtcgggacgtgaagaaaaggtacatgaagcacaagcgcgacgatgggcccgagaagcaggaggacgaggcggtggacgtgacgccggtgatgacctgcgtgtttgtggtgatgtgctgctccatgctggtgctgctctactatttctacgacctcctcgtgtacgtggtcatcgggatcttctgcctggcctccgccaccggcctctacagctgcctggcgccctgtgtgcggcggctgcccttcggcaagtgcaggatccccaacaacagcctgccctacttccacaagcgcccgcaggcccgtatgctgctcctggcgctcttctgcgtggccgtcagcgtggtgtggggcgtcttccgcaacgaggaccagtgggcctgggtcctccaggatgccctgggcatcgccttctgcctctacatgctgaagaccatccgtctgcccaccttcaaggcctgcacgctgctgctgctggtgctgttcctctacgacatcttcttcgtgttcatcacgcccttcctgaccaagagtgggagcagcatcatggtggaggtggccactgggccctcggactcagccacccgtgagaagctgcccatggtcctgaaggtgcccaggctgaactcctcacctctggccctgtgtgaccggcccttctccctcctgggtttcggagacattttggtgccagggctgctggtggcctactgccacaggtttgacatccaggtacagtcctccagggtatacttcgtggcctgcaccatcgcctatggcgttggcctccttgtgacattcgtggcactggccctgatgcagcgtggccagcccgctctcctctacctggtgccctgcacgctggtgacgagctgcgctgtggcgctctggcgccgggagctgggcgtgttctggacgggcagcggctttgcgaaagtcctacctccatctccgtgggccccagcaccagccgacggcccgcagcctcccgcagagacagagcccgcaccctggctgtctgtggtgcctgggccccagctcccgcccgccacccgccctgttgagtgcggcctccagactcgagtccagaatctgtttctgtcaagtcagtcgtccccagctgcacacggggactgctgagcgctgcgctctcacgggtctgttccggacagagggtggcaggggtgagccctgatcccttacaaaaaataccagcttcccagggagtaatggcgccttcactgaagccattttgtacatggggacggggtggggacgtctcttttttggtgttggacgtttgaccagtggggaggggttcagaggcggcggtcctgtccttggctccgtctgtccgtgtggccttgctgccattccgtctgatcattaaacacagcttttgattaaaaaaaaaggggggcgctaaaaacctgagggcagtacgtccacatttggaaaggcaagagaggaaaaaagggggcgggaaacgcgcggacggacgggctggaagaaccctggggggggaccaaaacggaaaagtgggacctcgcagggtaa

SEQ ID NO: 426950 - DNA, 117 bp, Homo sapiens
tggcctactgccacaggtttgacatccaggtacagtcctccagggtatacttcgtggcctgcaccatcggtaagtgcctcggttgggcccgtgctggcctctctggctccagcccca

SEQ ID NO: 426951 - DNA, 2795 bp, Homo sapiens
tataaaagctgggccggcgcgggccgggccattcgcgacccggaggtgcgcgggcgcgggcgagcagggtctccgggtgggcggcggcgacgccccgcgcaggctggaggccgccgaggctcgccatgccgggagaactctaactcccccatggagtcggccgacttctacgaggcggagccgcggcccccgatgagcagccacctgcagagccccccgcacgcgcccagcagcgccgccttcggctttccccggggcgcgggccccgcgcagcctcccgccccacctgccgccccggagccgctgggcggcatctgcgagcacgagacgtccatcgacatcagcgcctacatcgacccggccgccttcaacgacgagttcctggccgacctgttccagcacagccggcagcaggagaaggccaaggcggccgtgggccccacgggcggcggcggcggcggcgactttgactacccgggcgcgcccgcgggccccggcggcgccgtcatgcccgggggagcgcacgggcccccgcccggctacggctgcgcggccgccggctacctggacggcaggctggagcccctgtacgagcgcgtcggggcgccggcgctgcggccgctggtgatcaagcaggagccccgcgaggaggatgaagccaagcagctggcgctggccggcctcttcccttaccagccgccgccgccgccgccgccctcgcacccgcacccgcacccgccgcccgcgcacctggccgccccgcacctgcagttccagatcgcgcactgcggccagaccaccatgcacctgcagcccggtcaccccacgccgccgcccacgcccgtgcccagcccgcaccccgcgcccgcgctcggtgccgccggcctgccgggccctggcagcgcgctcaaggggctgggcgccgcgcaccccgacctccgcgcgagtggcggcagcggcgcgggcaaggccaagaagtcggtggacaagaacagcaacgagtaccgggtgcggcgcgagcgcaacaacatcgcggtgcgcaagagccgcgacaaggccaagcagcgcaacgtggagacgcagcagaaggtgctggagctgaccagtgacaatgaccgcctgcgcaagcgggtggaacagctgagccgcgaactggacacgctgcggggcatcttccgccagctgccagagagctccttggtcaaggccatgggcaactgcgcgtgaggcgcgcggctgtgggaccgccctgggccagcctccggcggggacccagggagtggtttggggtcgccggatctcgaggcttgcccgagccgtgcgagccaggactaggagattccggtgcctcctgaaagcctggcctgctccgcgtgtcccctcccttcctctgcgccggacttggtgcgtctaagatgagggggccaggcggtggcttctccctgcgaggaggggagaattcttggggctgagctgggagcccggcaactctagtatttaggataaccttggccttggaaatgcaaactcaccgctccaatgcctactgagtagggggagcaaatcgtgccttgtcattttatttggaggtttcctgcctccttcccgaggctacagcagacccccatgagagaaggaggggagcaggcccgtggcaggaggagggctcagggagctgagatcccgacaagcccgccagccccagccgctcctccacgcctgtccttagaaaggggtggaaacatagggacttggggcttggaacctaaggttgttcccctagttctacatgaaggtggagggtctctagttccacgcctctcccacctccctccgcacacaccccaccccagcctgctataggctgggcttccccttggggcggaactcactgcgatgggggtcaccaggtgaccagtgggagcccccaccccgagtcacaccagaaagctaggtcgtgggtcagctctgaggatgtatacccctggtgggagagggagacctagagatctggctgtggggcgggcatggggggtgaagggccactgggaccctcagccttgtttgtactgtatgccttcagcattgcctaggaacacgaagcacgatcagtccatcccagagggaccggagttatgacaagctttccaaatattttgctttatcagccgatatcaacacttgtatctggcctctgtgccccagcagtgccttgtgcaatgtgaatgtgcgcgtctctgctaaaccaccattttatttggtttttgttttgttttggttttgctcggatacttgccaaaatgagactctccgtcggcagctgggggaagggtctgagactccctttccttttggttttgggattacttttgatcctgggggaccaatgaggtgaggggggttctcctttgccctcagctttccccagcccctccggcctgggctgcccacaaggcttgtcccccagaggccctggctcctggtcgggaagggaggtggcctcccgccaacgcatcactggggctgggagcagggaaggacggcttggttctcttcttttggggagaacgtagagtctcactctagatgttttatgtattatatctataatataaacatatcaaagtcaatgtcggtgtctttttaaaaccagaaagaagctacttccaaggttgtctgtgggccaggtcacatttgtaaataatacagcattttccctggcggcaatcctgactttcatgagctctccatccatcctgagcccctcttaccctaagggggtgacttacttcccc

SEQ ID NO: 426952 - DNA, 2708 bp, Homo sapiens
ctgcaggtggctgctcatcgggggccgcggctccgcctcgtagaagtcggccgactccatgggggagttagagttctcccggcatggcgagccctggcgcctccagcctgcgcggggcgtcgccgccgcccacccggagaccctgctcgcccgcgcccgcgcacctccgggtcgccgcccgcgcagcctcccgccccacctgccgccccggagccgctgggcggcatctgcgagcacgagacgtccatcgacatcagcgcctacatcgacccggccgccttcaacgacgagttcctggccgacctgttccagcacagccggcagcaggagaaggccaaggcggccgtgggccccacgggcggcggcggcggcggcgactttgactacccgggcgcgcccgcgggccccggcggcgccgtcatgcccgggggagcgcacgggcccccgcccggctacggctgcgcggccgccggctacctggacggcaggctggagcccctgtacgagcgcgtcggggcgccggcgctgcggccgctggtgatcaagcaggagccccgcgaggaggatgaagccaagcagctggcgctggccggcctcttcccttaccagccgccgccgccgccgccgccctcgcacccgcacccgcacccgccgcccgcgcacctggccgccccgcacctgcagttccagatcgcgcactgcggccagaccaccatgcacctgcagcccggtcaccccacgccgccgcccacgcccgtgcccagcccgcaccccgcgcccgcgctcggtgccgccggcctgccgggccctggcagcgcgctcaaggggctgggcgccgcgcaccccgacctccgcgcgagtggcggcagcggcgcgggcaaggccaagaagtcggtggacaagaacagcaacgagtaccgggtgcggcgcgagcgcaacaacatcgcggtgcgcaagagccgcgacaaggccaagcagcgcaacgtggagacgcagcagaaggtgctggagctgaccagtgacaatgaccgcctgcgcaagcgggtggaacagctgagccgcgaactggacacgctgcggggcatcttccgccagctgccagagagctccttggtcaaggccatgggcaactgcgcgtgaggcgcgcggctgtgggaccgccctgggccagcctccggcggggacccagggagtggtttggggtcgccggatctcgaggcttgcccgagccgtgcgagccaggactaggagattccggtgcctcctgaaagcctggcctgctccgcgtgtcccctcccttcctctgcgccggacttggtgcgtctaagatgagggggccaggcggtggcttctccctgcgaggaggggagaattcttggggctgagctgggagcccggcaactctagtatttaggataaccttggccttggaaatgcaaactcaccgctccaatgcctactgagtagggggagcaaatcgtgccttgtcattttatttggaggtttcctgcctccttcccgaggctacagcagacccccatgagagaaggaggggagcaggcccgtggcaggaggagggctcagggagctgagatcccgacaagcccgccagccccagccgctcctccacgcctgtccttagaaaggggtggaaacatagggacttggggcttggaacctaaggttgttcccctagttctacatgaaggtggagggtctctagttccacgcctctcccacctccctccgcacacaccccaccccagcctgctataggctgggcttccccttggggcggaactcactgcgatgggggtcaccaggtgaccagtgggagcccccaccccgagtcacaccagaaagctaggtcgtgggtcagctctgaggatgtatacccctggtgggagagggagacctagagatctggctgtggggcgggcatggggggtgaagggccactgggaccctcagccttgtttgtactgtatgccttcagcattgcctaggaacacgaagcacgatcagtccatcccagagggaccggagttatgacaagctttccaaatattttgctttatcagccgatatcaacacttgtatctggcctctgtgccccagcagtgccttgtgcaatgtgaatgtgcgcgtctctgctaaaccaccattttatttggtttttgttttgttttggttttgctcggatacttgccaaaatgagactctccgtcggcagctgggggaagggtctgagactccctttccttttggttttgggattacttttgatcctgggggaccaatgaggtgaggggggttctcctttgccctcagctttccccagcccctccggcctgggctgcccacaaggcttgtcccccagaggccctggctcctggtcgggaagggaggtggcctcccgccaacgcatcactggggctgggagcagggaaggacggcttggttctcttcttttggggagaacgtagagtctcactctagatgttttatgtattatatctataatataaacatatcaaagtcaatgtcggtgtctttttaaaaccagaaagaagctacttccaaggttgtctgtgggccaggtcacatttgtaaataatacagcattttccctggcggcaatcctgactttcatgagctctccatccatcctgagcccctcttaccctaagggggtgacttacttcccc

SEQ ID NO: 426953 - DNA, 2615 bp, Homo sapiens
tataaaagctgggccggcgcgggccgggccattcgcgacccggaggtgcgcgggcgcgggcgagcagggtctccgggtgggcggcggcgacgccccgcgcaggctggaggccgccgaggctcgccatgccgggagaactctaactcccccatggagtcggccgacttctacgaggcggagccgcggcccccgatgagcagccacctgcagagccccccgcacgcgcccagcagcgccgccttcggctttccccggggcgcgggccccgcgcagcctcccgccccacctgccgccccggagccgctgggcggcatctgcgagcacgagacgtccatcgacatcagcgcctacatcgacccggccgccttcaacgacgagttcctggccgacctgttccagcacagccggcagcaggagaaggccaaggcggccgtgggccccacgggcggcggcggcggcggcgactttgactacccgggcgcgcccgcgggccccggcggcgccgtcatgcccgggggagcgcacgggcccccgcccggctacggctgcgcggccgccggctacctggacggcaggctggagcccctgtacgagcgcgtcggggcgccggcgctgcggccgctggtgatcaagcaggagccccgcgaggaggatgaagccaagcagctggcgctggccggcctcttcccttaccagccgccgccgccgccgccgccctcgcacccgcacccgcacccgccgcccgcgcaccccgacctccgcgcgagtggcggcagcggcgcgggcaaggccaagaagtcggtggacaagaacagcaacgagtaccgggtgcggcgcgagcgcaacaacatcgcggtgcgcaagagccgcgacaaggccaagcagcgcaacgtggagacgcagcagaaggtgctggagctgaccagtgacaatgaccgcctgcgcaagcgggtggaacagctgagccgcgaactggacacgctgcggggcatcttccgccagctgccagagagctccttggtcaaggccatgggcaactgcgcgtgaggcgcgcggctgtgggaccgccctgggccagcctccggcggggacccagggagtggtttggggtcgccggatctcgaggcttgcccgagccgtgcgagccaggactaggagattccggtgcctcctgaaagcctggcctgctccgcgtgtcccctcccttcctctgcgccggacttggtgcgtctaagatgagggggccaggcggtggcttctccctgcgaggaggggagaattcttggggctgagctgggagcccggcaactctagtatttaggataaccttggccttggaaatgcaaactcaccgctccaatgcctactgagtagggggagcaaatcgtgccttgtcattttatttggaggtttcctgcctccttcccgaggctacagcagacccccatgagagaaggaggggagcaggcccgtggcaggaggagggctcagggagctgagatcccgacaagcccgccagccccagccgctcctccacgcctgtccttagaaaggggtggaaacatagggacttggggcttggaacctaaggttgttcccctagttctacatgaaggtggagggtctctagttccacgcctctcccacctccctccgcacacaccccaccccagcctgctataggctgggcttccccttggggcggaactcactgcgatgggggtcaccaggtgaccagtgggagcccccaccccgagtcacaccagaaagctaggtcgtgggtcagctctgaggatgtatacccctggtgggagagggagacctagagatctggctgtggggcgggcatggggggtgaagggccactgggaccctcagccttgtttgtactgtatgccttcagcattgcctaggaacacgaagcacgatcagtccatcccagagggaccggagttatgacaagctttccaaatattttgctttatcagccgatatcaacacttgtatctggcctctgtgccccagcagtgccttgtgcaatgtgaatgtgcgcgtctctgctaaaccaccattttatttggtttttgttttgttttggttttgctcggatacttgccaaaatgagactctccgtcggcagctgggggaagggtctgagactccctttccttttggttttgggattacttttgatcctgggggaccaatgaggtgaggggggttctcctttgccctcagctttccccagcccctccggcctgggctgcccacaaggcttgtcccccagaggccctggctcctggtcgggaagggaggtggcctcccgccaacgcatcactggggctgggagcagggaaggacggcttggttctcttcttttggggagaacgtagagtctcactctagatgttttatgtattatatctataatataaacatatcaaagtcaatgtcggtgtctttttaaaaccagaaagaagctacttccaaggttgtctgtgggccaggtcacatttgtaaataatacagcattttccctggcggcaatcctgactttcatgagctctccatccatcctgagcccctcttaccctaagggggtgacttacttcccc

SEQ ID NO: 426954 - DNA, 1781 bp, Homo sapiens
atgctgcagtgatctaaggatcccttgcatatggccgacaaggccaagcagcgcaacgtggagacgcagcagaaggtgctggagctgaccagtgacaatgaccgcctgcgcaagcgggtggaacagctgagccgcgaactggacacgctgcggggcatcttccgccagctgccagagagctccttggtcaaggccatgggcaactgcgcgtgaggcgcgcggctgtgggaccgccctgggccagcctccggcggggacccagggagtggtttggggtcgccggatctcgaggcttgcccgagccgtgcgagccaggactaggagattccggtgcctcctgaaagcctggcctgctccgcgtgtcccctcccttcctctgcgccggacttggtgcgtctaagatgagggggccaggcggtggcttctccctgcgaggaggggagaattcttggggctgagctgggagcccggcaactctagtatttaggataaccttggccttggaaatgcaaactcaccgctccaatgcctactgagtagggggagcaaatcgtgccttgtcattttatttggaggtttcctgcctccttcccgaggctacagcagacccccatgagagaaggaggggagcaggcccgtggcaggaggagggctcagggagctgagatcccgacaagcccgccagccccagccgctcctccacgcctgtccttagaaaggggtggaaacatagggacttggggcttggaacctaaggttgttcccctagttctacatgaaggtggagggtctctagttccacgcctctcccacctccctccgcacacaccccaccccagcctgctataggctgggcttccccttggggcggaactcactgcgatgggggtcaccaggtgaccagtgggagcccccaccccgagtcacaccagaaagctaggtcgtgggtcagctctgaggatgtatacccctggtgggagagggagacctagagatctggctgtggggcgggcatggggggtgaagggccactgggaccctcagccttgtttgtactgtatgccttcagcattgcctaggaacacgaagcacgatcagtccatcccagagggaccggagttatgacaagctttccaaatattttgctttatcagccgatatcaacacttgtatctggcctctgtgccccagcagtgccttgtgcaatgtgaatgtgcgcgtctctgctaaaccaccattttatttggtttttgttttgttttggttttgctcggatacttgccaaaatgagactctccgtcggcagctgggggaagggtctgagactccctttccttttggttttgggattacttttgatcctgggggaccaatgaggtgaggggggttctcctttgccctcagctttccccagcccctccggcctgggctgcccacaaggcttgtcccccagaggccctggctcctggtcgggaagggaggtggcctcccgccaacgcatcactggggctgggagcagggaaggacggcttggttctcttcttttggggagaacgtagagtctcactctagatgttttatgtattatatctataatataaacatatcaaagtcaatgtcggtgtctttttaaaaccagaaagaagctacttccaaggttgtctgtgggccaggtcacatttgtaaataatacagcattttccctggcggcaatcctgactttcatgagctctccatccatcctgagcccctcttaccctaagggggtgacttacttcccc

SEQ ID NO: 426955 - DNA, 1811 bp, Homo sapiens
tcgatctacaggatcccttcatatgctaatgttgcttggcctttccatatgcaattgcatatggccgacaaggccaagcagcgcaacgtggagacgcagcagaaggtgctggagctgaccagtgacaatgaccgcctgcgcaagcgggtggaacagctgagccgcgaactggacacgctgcggggcatcttccgccagctgccagagagctccttggtcaaggccatgggcaactgcgcgtgaggcgcgcggctgtgggaccgccctgggccagcctccggcggggacccagggagtggtttggggtcgccggatctcgaggcttgcccgagccgtgcgagccaggactaggagattccggtgcctcctgaaagcctggcctgctccgcgtgtcccctcccttcctctgcgccggacttggtgcgtctaagatgagggggccaggcggtggcttctccctgcgaggaggggagaattcttggggctgagctgggagcccggcaactctagtatttaggataaccttggccttggaaatgcaaactcaccgctccaatgcctactgagtagggggagcaaatcgtgccttgtcattttatttggaggtttcctgcctccttcccgaggctacagcagacccccatgagagaaggaggggagcaggcccgtggcaggaggagggctcagggagctgagatcccgacaagcccgccagccccagccgctcctccacgcctgtccttagaaaggggtggaaacatagggacttggggcttggaacctaaggttgttcccctagttctacatgaaggtggagggtctctagttccacgcctctcccacctccctccgcacacaccccaccccagcctgctataggctgggcttccccttggggcggaactcactgcgatgggggtcaccaggtgaccagtgggagcccccaccccgagtcacaccagaaagctaggtcgtgggtcagctctgaggatgtatacccctggtgggagagggagacctagagatctggctgtggggcgggcatggggggtgaagggccactgggaccctcagccttgtttgtactgtatgccttcagcattgcctaggaacacgaagcacgatcagtccatcccagagggaccggagttatgacaagctttccaaatattttgctttatcagccgatatcaacacttgtatctggcctctgtgccccagcagtgccttgtgcaatgtgaatgtgcgcgtctctgctaaaccaccattttatttggtttttgttttgttttggttttgctcggatacttgccaaaatgagactctccgtcggcagctgggggaagggtctgagactccctttccttttggttttgggattacttttgatcctgggggaccaatgaggtgaggggggttctcctttgccctcagctttccccagcccctccggcctgggctgcccacaaggcttgtcccccagaggccctggctcctggtcgggaagggaggtggcctcccgccaacgcatcactggggctgggagcagggaaggacggcttggttctcttcttttggggagaacgtagagtctcactctagatgttttatgtattatatctataatataaacatatcaaagtcaatgtcggtgtctttttaaaaccagaaagaagctacttccaaggttgtctgtgggccaggtcacatttgtaaataatacagcattttccctggcggcaatcctgactttcatgagctctccatccatcctgagcccctcttaccctaagggggtgacttacttcccc

SEQ ID NO: 426956 - DNA, 2629 bp, Homo sapiens
tataaaagctgggccggcgcgggccgggccattcgcgacccggaggtgcgcgggcgcgggcgagcagggtctccgggtgggcggcggcgacgccccgcgcaggctggaggccgccgaggctcgccatgccgggagaactctaactcccccatggagtcggccgacttctacgaggcggagccgcggcccccgatgagcagccacctgcagagccccccgcacgcgcccagcagcgccgccttcggctttccccggggcgcgggccccgcgcagcctcccgccccacctgccgccccggagccgctgggcggcatctgcgagcacgagacgtccatcgacatcagcgcctacatcgacccggccgccttcaacgacgagttcctggccgacctgttccagcacagccggcagcaggagaaggccaaggcggccgtgggccccacgggcggcggcggcggcggcgactttgactacccgggcgcgcccgcgggccccggcggcgccgtcatgcccgggggagcgcacgggcccccgcccggctacggctgcgcggccgccggctacctggacggcaggctggagcccctgtacgagcgcgtcggggcgccggcgctgcggccgctggtgatcaagcaggagccccgcgaggaggatgaagccaagcagctggcgctggccggcctcttcccttaccagccgccgccgccgccgccgccctcgcacccgcacccgcacccgccgcccgcgcacctggccgccccgcacctgcagttccagatcgcgcactgcggccagaccaccatgcacctgcagcccggtcaccccacgccgccgcccacgcccgtgcccagcccgcaccccgcgcccgcgctcggtgccgccggcctgccgggccctggcagcgcgctcaaggggctgggcgccgcgcaccccgacctccgcgcgagtggcggcagcggcgcgggcaaggccaagaagtcggtggacaagaacagcaacgagtaccgggtgcggcgcgagcgcaacaacatcgcggtgcgcaagagccgcgacaaggccaagcagcgcaacgtggagacgcagcagaaggtgctggagctgaccagtgacaatgaccgcctgcgcaagcgggtggaacagctgagccgcgaactggacacgctgcggggcatcttccgccagctgccagagagctccttggtcaaggccatgggcaactgcgcgtgaggcgcgcggctgtgggaccgccctgggccagcctccggcggggacccagggagtggtttggggtcgccggatctcgaggcttgcccgagccgtgcgagccaggactaggagattccggtgcctcctgaaagcctggcctgctccgcgtgtcccctcccttcctctgcgccggacttggtgcgtctaagatgagggggccaggcggtggcttctccctgcgaggaggggagaattcttggggctgagctgggagcccggcaactctagtatttaggataaccttggccttggaaatgcaaactcaccgctccaatgcctactgagtagggggagcaaatcgtgccttgtcattttatttggaggtttcctgcctccttcccgaggctacagcagacccccatgagagaaggaggggagcaggcccgtggcaggaggagggctcagggagctgagatcccgacaagcccgccagccccagccgctcctccacgcctgtccttagaaaggggtggaaacatagggacttggggcttggaacctaaggttgttcccctagttctacatgaaggtggagggtctctagttccacgcctctcccacctccctccgcacacaccccaccccagcctgctataggctgggcttccccttggggcggaactcagccttgtttgtactgtatgccttcagcattgcctaggaacacgaagcacgatcagtccatcccagagggaccggagttatgacaagctttccaaatattttgctttatcagccgatatcaacacttgtatctggcctctgtgccccagcagtgccttgtgcaatgtgaatgtgcgcgtctctgctaaaccaccattttatttggtttttgttttgttttggttttgctcggatacttgccaaaatgagactctccgtcggcagctgggggaagggtctgagactccctttccttttggttttgggattacttttgatcctgggggaccaatgaggtgaggggggttctcctttgccctcagctttccccagcccctccggcctgggctgcccacaaggcttgtcccccagaggccctggctcctggtcgggaagggaggtggcctcccgccaacgcatcactggggctgggagcagggaaggacggcttggttctcttcttttggggagaacgtagagtctcactctagatgttttatgtattatatctataatataaacatatcaaagtcaatgtcggtgtctttttaaaaccagaaagaagctacttccaaggttgtctgtgggccaggtcacatttgtaaataatacagcattttccctggcggcaatcctgactttcatgagctctccatccatcctgagcccctcttaccctaagggggtgacttacttcccc

SEQ ID NO: 426957 - DNA, 2748 bp, Homo sapiens
tataaaagctgggccggcgcgggccgggccattcgcgacccggaggtgcgcgggcgcgggcgagcagggtctccgggtgggcggcggcgacgccccgcgcaggctggaggccgccgaggctcgccatgccgggagaactctaactcccccatggagtcggccgacttctacgaggcggagccgcggcccccgatgagcagccacctgcagagccccccgcacgcgcccagcagcgccgccttcggctttccccggggcgcgggccccgcgcagcctcccgccccacctgccgccccggagccgctgggcggcatctgcgagcacgagacgtccatcgacatcagcgcctacatcgacccggccgccttcaacgacgagttcctggccgacctgttccagcacagccggcagcaggagaaggccaaggcggccgtgggccccacgggcggcggcggcggcggcgactttgactacccgggcgcgcccgcgggccccggcggcgccgtcatgcccgggggagcgcacgggcccccgcccggctacggctgcgcggccgccggctacctggacggcaggctggagcccctgtacgagcgcgtcggggcgccggcgctgcggccgctggtgatcaagcaggagccccgcgaggaggatgaagccaagcagctggcgctggccggcctcttcccttaccagccgccgccgccgccgccgccctcgcacccgcacccgcacccgccgcccgcgcacctggccgccccgcacctgcagttccagatcgcgcactgcggccagaccaccatgcacctgcagcccggtcaccccacgccgccgcccacgcccgtgcccagcccgcaccccgcgcccgcgctcggtgccgccggcctgccgggccctggcagcgcgctcaaggggctgggcgccgcgcaccccgacctccgcgcgagtggcggcagcggcgcgggcaaggccaagaagtcggtggacaagaacagcaacgagtaccgggtgcggcgcgagcgcaacaacatcgcggtgcgcaagagccgcgacaaggccaagcagcgcaacgtggagacgcagcagaaggtgctggagctgaccagtgacaatgaccgcctgcgcaagcgggtggaacagctgagccgcgaactggacacgctgcggggcatcttccgccagctgccagagagctccttggtcaaggccatgggcaactgcgcgtgaggcgcgcggctgtgggaccgccctgggccagcctccggcggggacccagggagtggtttggggtcgccggatctcgaggcttgcccgagccgtgcgagccaggactaggagattccggtgcctcctgaaagcctggcctgctccgcgtgtcccctcccttcctctgcgccggacttggtgcgtctaagatgagggggccaggcggtggcttctccctgcgaggaggggagaattcttggggctgagctgggagcccggcaactctagtatttaggataaccttggccttggaaatgcaaactcaccgctccaatgcctactgagtagggggagcaaatcgtgccttgtcattttatttggaggtttcctgcctccttcccgaggctacagcagacccccatgagagaaggaggggagcaggcccgtggcaggaggagggctcagggagctgagatcccgacaagcccgccagccccagccgctcctccacgcctgtccttagaaaggggtggaaacatagggacttggggcttggaacctaaggttgttcccctagttctacatgaaggtggagggtctctagttccacgcctctcccacctccctccgcacacaccccaccccagcctgctataggctgggcttccccttggggcggaactcactgcgatgggggtcaccaggtgaccagtgggagcccccaccccgagtcacaccagaaagctaggtcgtgggtcagctctgaggatgtatacccctggtgggagagggagacctagagatctggctgtggggcgggcatggggggtgaagggccactgggaccctcagccttgtttgtactgtatgccttcagcattgcctaggaacacgaagcacgatcagtccatcccagagggaccggagttatgacaagctttccaaatattttgctttatcagccgatatcaacacttgtatctggcctctgtgccccagcagtgccttgtgcaatgtgaatgtgcgcgtctctgctaaaccaccattttatttggtttttgttttgttttggttttgctcggatacttgccaaaatgattggttttgggattacttttgatcctgggggaccaatgaggtgaggggggttctcctttgccctcagctttccccagcccctccggcctgggctgcccacaaggcttgtcccccagaggccctggctcctggtcgggaagggaggtggcctcccgccaacgcatcactggggctgggagcagggaaggacggcttggttctcttcttttggggagaacgtagagtctcactctagatgttttatgtattatatctataatataaacatatcaaagtcaatgtcggtgtctttttaaaaccagaaagaagctacttccaaggttgtctgtgggccaggtcacatttgtaaataatacagcattttccctggcggcaatcctgactttcatgagctctccatccatcctgagcccctcttaccctaagggggtgacttacttcccc

SEQ ID NO: 426958 - DNA, 2687 bp, Homo sapiens
tataaaagctgggccggcgcgggccgggccattcgcgacccggaggtgcgcgggcgcgggcgagcagggtctccgggtgggcggcggcgacgccccgcgcaggctggaggccgccgaggctcgccatgccgggagaactctaactcccccatggagtcggccgacttctacgaggcggagccgcggcccccgatgagcagccacctgcagagccccccgcacgcgcccagcagcgccgccttcggctttccccggggcgcgggccccgcgcagcctcccgccccacctgccgccccggagccgctgggcggcatctgcgagcacgagacgtccatcgacatcagcgcctacatcgacccggccgccttcaacgacgagttcctggccgacctgttccagcacagccggcagcaggagaaggccaaggcggccgtgggccccacgggcggcggcggcggcggcgactttgactacccgggcgcgcccgcgggccccggcggcgccgtcatgcccgggggagcgcacgggcccccgcccggctacggctgcgcggccgccggctacctggacggcaggctggagcccctgtacgagcgcgtcggggcgccggcgctgcggccgctggtgatcaagcaggagccccgcgaggaggatgaagccaagcagctggcgctggccggcctcttcccttaccagccgccgccgccgccgccgccctcgcacccgcacccgcacccgccgcccgcgcacctggccgccccgcacctgcagttccagatcgcgcactgcggccagaccaccatgcacctgcagcccggtcaccccacgccgccgcccacgcccgtgcccagcccgcaccccgcgcccgcgctcggtgccgccggcctgccgggccctggcagcgcgctcaaggggctgggcgccgcgcaccccgacctccgcgcgagtggcggcagcggcgcgggcaaggccaagaagtcggtggacaagaacagcaacgagtaccgggtgcggcgcgagcgcaacaacatcgcggtgcgcaagagccgcgacaaggccaagcagcgcaacgtggagacgcagcagaaggtgctggagctgaccagtgacaatgaccgcctgcgcaagcgggtggaacagctgagccgcgaactggacacgctgcggggcatcttccgccagctgccagagagctccttggtcaaggccatgggcaactgcgcgtgaggcgcgcggctgtgggaccgccctgggccagcctccggcggggacccagggagtggtttggggtcgccggatctcgaggcttgcccgagccgtgcgagccaggactaggagattccggtgcctcctgaaagcctggcctgctccgcgtgtcccctcccttcctctgcgccggacttggtgcgtctaagatgagggggccaggcggtggcttctccctgcgaggaggggagaattcttggggctgagctgggagcccggcaactctagtatttaggataaccttggccttggaaatgcaaactcaccgctccaatgcctactgagtagggggagcaaatcgtgccttgtcattttatttggaggtttcctgcctccttcccgaggctacagcagacccccatgagagaaggaggggagcaggcccgtggcaggaggagggctcagggagctgagatcccgacaagcccgccagccccagccgctcctccacgcctgtccttagaaaggggtggaaacatagggacttggggcttggaacctaaggttgttcccctagttctacatgaaggtggagggtctctagttccacgcctctcccacctccctccgcacacaccccaccccagcctgctataggctgggcttccccttggggcggaactcactgcgatgggggtcaccaggtgaccagtgggagcccccaccccgagtcacaccagaaagctaggtcgtgggtcagctctgaggatgtatacccctggtgggagagggagacctagagatctggctgtggggcgggcatggggggtgaagggccactgggaccctcagccttgtttgtactgtatgccttcagcattgcctaggaacacgaagcacgatcagtccatcccagagggaccggagttatgacaagctttccaaatattttgctttatcagccgatatcaacacttgtatctggcctctgtgccccagcagtgccttgtgcaatgtgaatgtgcgcgtctctgctaaaccaccattttatttggtttttgttttgttttggttttgctcggatacttgccaaaatgacctcagctttccccagcccctccggcctgggctgcccacaaggcttgtcccccagaggccctggctcctggtcgggaagggaggtggcctcccgccaacgcatcactggggctgggagcagggaaggacggcttggttctcttcttttggggagaacgtagagtctcactctagatgttttatgtattatatctataatataaacatatcaaagtcaatgtcggtgtctttttaaaaccagaaagaagctacttccaaggttgtctgtgggccaggtcacatttgtaaataatacagcattttccctggcggcaatcctgactttcatgagctctccatccatcctgagcccctcttaccctaagggggtgacttacttcccc

SEQ ID NO: 426959 - DNA, 1774 bp, Homo sapiens
tatagaatccagcgtggtcccttcatattgcatgtcaagcagtgctagaagtggatgacatcaaaatggtgctggagctgaccagtgacaatgaccgcctgcgcaagcgggtggaacagctgagccgcgaactggacacgctgcggggcatcttccgccagctgccagagagctccttggtcaaggccatgggcaactgcgcgtgaggcgcgcggctgtgggaccgccctgggccagcctccggcggggacccagggagtggtttggggtcgccggatctcgaggcttgcccgagccgtgcgagccaggactaggagattccggtgcctcctgaaagcctggcctgctccgcgtgtcccctcccttcctctgcgccggacttggtgcgtctaagatgagggggccaggcggtggcttctccctgcgaggaggggagaattcttggggctgagctgggagcccggcaactctagtatttaggataaccttggccttggaaatgcaaactcaccgctccaatgcctactgagtagggggagcaaatcgtgccttgtcattttatttggaggtttcctgcctccttcccgaggctacagcagacccccatgagagaaggaggggagcaggcccgtggcaggaggagggctcagggagctgagatcccgacaagcccgccagccccagccgctcctccacgcctgtccttagaaaggggtggaaacatagggacttggggcttggaacctaaggttgttcccctagttctacatgaaggtggagggtctctagttccacgcctctcccacctccctccgcacacaccccaccccagcctgctataggctgggcttccccttggggcggaactcactgcgatgggggtcaccaggtgaccagtgggagcccccaccccgagtcacaccagaaagctaggtcgtgggtcagctctgaggatgtatacccctggtgggagagggagacctagagatctggctgtggggcgggcatggggggtgaagggccactgggaccctcagccttgtttgtactgtatgccttcagcattgcctaggaacacgaagcacgatcagtccatcccagagggaccggagttatgacaagctttccaaatattttgctttatcagccgatatcaacacttgtatctggcctctgtgccccagcagtgccttgtgcaatgtgaatgtgcgcgtctctgctaaaccaccattttatttggtttttgttttgttttggttttgctcggatacttgccaaaatgagactctccgtcggcagctgggggaagggtctgagactccctttccttttggttttgggattacttttgatcctgggggaccaatgaggtgaggggggttctcctttgccctcagctttccccagcccctccggcctgggctgcccacaaggcttgtcccccagaggccctggctcctggtcgggaagggaggtggcctcccgccaacgcatcactggggctgggagcagggaaggacggcttggttctcttcttttggggagaacgtagagtctcactctagatgttttatgtattatatctataatataaacatatcaaagtcaatgtcggtgtctttttaaaaccagaaagaagctacttccaaggttgtctgtgggccaggtcacatttgtaaataatacagcattttccctggcggcaatcctgactttcatgagctctccatccatcctgagcccctcttaccctaagggggtgacttacttcccc

SEQ ID NO: 426960 - DNA, 1568 bp, Homo sapiens
tataaaagctgggccggcgcgggccgggccattcgcgacccggaggtgcgcgggcgcgggcgagcagggtctccgggtgggcggcggcgacgccccgcgcaggctggaggccgccgaggctcgccatgccgggagaactctaactcccccatggagtcggccgacttctacgaggcggagccgcggcccccgatgagcagccacctgcagagccccccgcacgcgcccagcagcgccgccttcggctttccccggggcgcgggccccgcgcagcctcccgccccacctgccgccccggagccgctgggcggcatctgcgagcacgagacgtccatcgacatcagcgcctacatcgacccggccgccttcaacgacgagttcctggccgacctgttccagcacagccggcagcaggagaaggccaaggcggccgtgggccccacgggcggcggcggcggcggcgactttgactacccgggcgcgcccgcgggccccggcggcgccgtcatgcccgggggagcgcacgggcccccgcccggctacggctgcgcggccgccggctacctggacggcaggctggagcccctgtacgagcgcgtcggggcgccggcgctgcggccgctggtgatcaagcaggagccccgcgaggaggatgaagccaagcagctggcgctggccggcctcttcccttaccagccgccgccgccgccgccgccctcgcacccgcacccgcacccgccgcccgcgcacctggccgccccgcacctgcagttccagatcgcgcactgcggccagaccaccatgcacctgcagcccggtcaccccacgccgccgcccacgcccgtgcccagcccgcaccccgcgcccgcgctcggtgccgccggcctgccgggccctggcagcgcgctcaaggggctgggcgccgcgcaccccgacctccgcgcgagtggcggcagcggcgcgggcaaggccaagaagtcggtggacaagaacagcaacgagtaccgggtgcggcgcgagcgcaacaacatcgcggtgcgcaagagccgcgacaaggccaagcagcgcaacgtggagacgcagcagaaggtgctggagctgaccagtgacaatgaccgcctgcgcaagcgggtggaacagctgagccgcgaactggacacgctgcggggcatcttccgccagctgccagagagctccttggtcaaggccatgggcaactgcgcgtgaggcgcgcggctgtgggaccgccctgggccagcctccggcggggacccagggagtggtttggggtcgccggatctcgaggcttgcccgagccgtgcgagccaggactaggagattccggtgcctcctgaaagcctggcctgctccgcgtgtcccctcccttcctctgcgccggacttggtgcgtctaagatgagggggccaggcggtggcttctccctgcgaggaggggagaattcttggggctgagctgggagcccggcaactctagtatttaggataaccttgccatatgcaaggccaatgtaccctgcgtaggggcacaactccatagtagcgtgcctg

SEQ ID NO: 426961 - DNA, 888 bp, Homo sapiens
cctcctgcctcagcctcctgagtagatggggcaataggtatgtgccaccacacccagctaagtttttaaaaattttttgtagacacagggtcttgatatgttgcctgagctggtctggaactccgggcttcaagcaatcctcctgtctcagccttgtttgtactgtatgccttcagcattgcctaggaacacgaagcacgatcagtccatcccagagggaccggagttatgacaagctttccaaatattttgctttatcagccgatatcaacacttgtatctggcctctgtgccccagcagtgccttgtgcaatgtgaatgtgcgcgtctctgctaaaccaccattttatttggtttttgttttgttttggttttgctcggatacttgccaaaatgagactctccgtcggcagctgggggaagggtctgagactccctttccttttggttttgggattacttttgatcctgggggaccaatgaggtgaggggggttctcctttgccctcagctttccccagcccctccggcctgggctgcccacaaggcttgtcccccagaggccctggctcctggtcgggaagggaggtggcctcccgccaacgcatcactggggctgggagcagggaaggacggcttggttctcttcttttggggagaacgtagagtctcactctagatgttttatgtattatatctataatataaacatatcaaagtcaatgtcggtgtctttttaaaaccagaaagaagctacttccaaggttgtctgtgggccaggtcacatttgtaaataatacagcattttccctggcggcaatcctgactttcatgagctctccatccatcctgagcccctcttaccctaagggggtgacttacttcccc

SEQ ID NO: 426962 - DNA, 3924 bp, Homo sapiens
gggcgacggtggcagcgccatggagccgggggaggtgaaggaccggatcctggagaacatctcgctgtcggtgaagaagttgcagagctattttgctgcatgtgaggatgagatccctgccatccggaaccatgacaaggtcctacagcgtctgtgtgagcacctggaccacgccctgctgtacggactgcaagacctctcctctggctactgggtgctcgtggtgcattttactcggagagaggccatcaagcagatcgaggtgctgcagcacgtggccaccaacctggggcgcagccgtgcctggctgtacctggccctcaacgagaactccttggagagctacctgcggttgttccaggagaacctgggcctgctgcataagtactacgtcaagaatgccctggtctgcagccacgatcacctgacgctcttcctgaccttggtgtccgggctagagttcattcgtttcgagctggatctggatgccccttacctagacctggccccctacatgcccgactactacaaacctcagtacctgctggactttgaagaccgccttcccagctcggtccacggctcagacagtctgtccctcaactctttcaactccgtcacctccaccaacctggagtgggatgacagtgcgattgccccatctagtgaggattatgattttggagatgtgtttccagcagtgccgtctgtacccagcacagactgggaagatggagacctcacagacacggtcagtggtccccgctccacagcctccgacctgaccagcagcaaggcctccaccaggagccccacccagcgccagaaccccttcaacgaggagccggcagagactgtgtcctcctctgacaccacccccgtgcacaccacctctcaggagaaggaggaggcccaggccctggacccgccggatgcctgcacggagctcgaggtcatcagggtcaccaagaagaagaaaattggcaagaagaaaaagagcagatcagatgaggaggcaagtccactccaccccgcctgcagccagaagaaatgtgccaagcagggggacggtgacagccgcaacggcagcccaagccttgggcgggactcgccagacactatgcttgcctccccccaggaggagggagaggggccgagcagcaccacggagagcagcgagcgctccgagccgggcctgctgatccctgagatgaaggacacctccatggagcgcttggggcagcccctgagcaaggttatcgaccagctcaacgggcagctggaccccagcacctggtgctcccgtgctgagcccccagaccagtcctttcggaccggctctcccggggatgccccggagaggccgccgctttgcgactttagtgaggggctttcagccccaatggacttctaccgctttaccgtcgagagtccaagcactgttacatcaggtggcggccaccatgaccctgcagggcttggccaaccgctgcatgttcctagtagccctgaggctgctggccaagaagaagagggaggaggaggagagggacagacgcctcggcccctagaggataccacgagggaggctcaggagctggaggcccagctgtccctggtcagggaggggcctgtgtctgagccagagcctgggacccaggaggttctctgccagctcaagcgagaccagcccagcccgtgtctgagtagcgctgaggattctggggtggatgagggacaggggagcccttcggagatggtccattcctcggagttcagagtagacaacaatcacctgctcctgctcatgatccacgtgttccgagaaaacgaagagcagctgttcaaaatgatccggatgagcaccgggcacatggagggcaacctgcagctgctgtacgtgctgctcacagactgctatgtctacctgctccggaaaggggccacagagaagccatacctggtggaagaggccgtttcttacaatgaacttgactatgtgtcggttggccttgaccagcagacggtgaagctggtgtgcaccaaccgcaggaagcagtttctgctggacacggctgatgtggcgctggctgagttctttttggcttctttgaagtcagccatgatcaaaggctgtcgagaacctccctaccccagcatcctgacggatgccaccatggagaagctggcactggccaaatttgtggcccaagaatcgaagtgtgaggcatctgctgtcaccgtgcgcttctacggccttgtgcactgggaggaccccacagacgagtccctgggccccacgccctgccactgctcaccccccgagggcaccatcaccaaagaaggcatgctgcactacaaggcgggcacctcctacctgggcaaggaacactggaagacgtgcttcgtggtgctcagcaacgggatcctctaccagtacccggaccgcaccgacgtcatccctctgctctcggtgaacatggggggggagcagtgcggtggctgccggagagccaacaccacggatcggccccacgccttccaggtcattctctccgaccggccctgcctggagctaagtgccgagagcgaggccgagatggccgagtggatgcagcatctctgccaggctgtgtccaaaggggtcatcccccagggcgtagctcccagcccctgcataccctgctgcctggtcctcacggatgaccgcctctttacgtgccatgaggattgccagaccagcttcttccgctctttgggcacagccaagctgggcgacatcagcgccgtctccaccgagccgggcaaggagtactgcgtcttggagttctcccaggacagccagcagctcctcccgccctgggtcatctacctgagctgcacttctgaactggaccgattgctgtctgcactgaactctgggtggaaaaccatctatcaggtggacctcccccacacggcgatccaggaagcctccaacaagaagaaattcgaggatgccttgagcctcatccacagcgcctggcagcggagcgacagtctctgccgcggccgagcctcccgagacccctggtgctgaggcagagctggttggcgtccctggtgggcaggaaaggaaggcacgccagccggcaggcacactgtcacggctgttgtcatgctgtcgggagcctacagtccacccctgccctgggcggcagaaccaccgagtgtggcttaagacagggtccctccactccagggatccagatcaggtgcccggcacccctgggcatcctgcccgacaggtagcgaatggaggtcgctgggggcagagggtccgagccctgtgggctctgcggatgcacgccctcctcccgggcctccgcctcagtctgcagaatttctgccgagtggcaccgagaacaccatccatctaaggacgaacaaaagaaccaggagggcgggacccccctcttcctctcctgggttgggggctggggccctgagtgcccagccatccttgttcgtgtttgaacactctcctggccacgtggggaagcgggaacacggggtgtctgcgcatgtttcctcctcctagctccatcactgcgcacacagctgcctgcctcgccagatgcaggggggcgggcagccctccctggctgccaggaggctctgcatgcccacagtcctgccctgcctgtcccctcaacccggcagtgcctgtagcaccgaggagcaaagggggtggatggggggcttggagaagggcggagcccaccagcctggcatccatgttgacatcttctgactgtcccctgcttggctggagccaggcccttccctagagtttcgtcaagagcctcctggggaaggggtcaggtggtttgggttttgttttttaaaataaaatagacatgttatattgccaaaaaaaaaaaa

SEQ ID NO: 426963 - DNA, 3583 bp, Homo sapiens
aatcgagctcggtacctgtttcaggagaactgggctgctgcataagtactatcaagaatgccctggtctgcagccacgatcacctgacgctcttcctgaccttggtgtccgggctagagttcattcgtttcgagctggatctggatgccccttacctagacctggccccctacatgcccgactactacaaacctcagtacctgctggactttgaagaccgccttcccagctcggtccacggctcagacagtctgtccctcaactctttcaactccgtcacctccaccaacctggagtgggatgacagtgcgattgccccatctagtgaggattatgattttggagatgtgtttccagcagtgccgtctgtacccagcacagactgggaagatggagacctcacagacacggtcagtggtccccgctccacagcctccgacctgaccagcagcaaggcctccaccaggagccccacccagcgccagaaccccttcaacgaggagccggcagagactgtgtcctcctctgacaccacccccgtgcacaccacctctcaggagaaggaggaggcccaggccctggacccgccggatgcctgcacggagctcgaggtcatcagggtcaccaagaagaagaaaattggcaagaagaaaaagagcagatcagatgaggaggcaagtccactccaccccgcctgcagccagaagaaatgtgccaagcagggggacggtgacagccgcaacggcagcccaagccttgggcgggactcgccagacactatgcttgcctccccccaggaggagggagaggggccgagcagcaccacggagagcagcgagcgctccgagccgggcctgctgatccctgagatgaaggacacctccatggagcgcttggggcagcccctgagcaaggttatcgaccagctcaacgggcagctggaccccagcacctggtgctcccgtgctgagcccccagaccagtcctttcggaccggctctcccggggatgccccggagaggccgccgctttgcgactttagtgaggggctttcagccccaatggacttctaccgctttaccgtcgagagtccaagcactgttacatcaggtggcggccaccatgaccctgcagggcttggccaaccgctgcatgttcctagtagccctgaggctgctggccaagaagaagagggaggaggaggagagggacagacgcctcggcccctagaggataccacgagggaggctcaggagctggaggcccagctgtccctggtcagggaggggcctgtgtctgagccagagcctgggacccaggaggttctctgccagctcaagcgagaccagcccagcccgtgtctgagtagcgctgaggattctggggtggatgagggacaggggagcccttcggagatggtccattcctcggagttcagagtagacaacaatcacctgctcctgctcatgatccacgtgttccgagaaaacgaagagcagctgttcaaaatgatccggatgagcaccgggcacatggagggcaacctgcagctgctgtacgtgctgctcacagactgctatgtctacctgctccggaaaggggccacagagaagccatacctggtggaagaggccgtttcttacaatgaacttgactatgtgtcggttggccttgaccagcagacggtgaagctggtgtgcaccaaccgcaggaagcagtttctgctggacacggctgatgtggcgctggctgagttctttttggcttctttgaagtcagccatgatcaaaggctgtcgagaacctccctaccccagcatcctgacggatgccaccatggagaagctggcactggccaaatttgtggcccaagaatcgaagtgtgaggcatctgctgtcaccgtgcgcttctacggccttgtgcactgggaggaccccacagacgagtccctgggccccacgccctgccactgctcaccccccgagggcaccatcaccaaagaaggcatgctgcactacaaggcgggcacctcctacctgggcaaggaacactggaagacgtgcttcgtggtgctcagcaacgggatcctctaccagtacccggaccgcaccgacgtcatccctctgctctcggtgaacatggggggggagcagtgcggtggctgccggagagccaacaccacggatcggccccacgccttccaggtcattctctccgaccggccctgcctggagctaagtgccgagagcgaggccgagatggccgagtggatgcagcatctctgccaggctgtgtccaaaggggtcatcccccagggcgtagctcccagcccctgcataccctgctgcctggtcctcacggatgaccgcctctttacgtgccatgaggattgccagaccagcttcttccgctctttgggcacagccaagctgggcgacatcagcgccgtctccaccgagccgggcaaggagtactgcgtcttggagttctcccaggacagccagcagctcctcccgccctgggtcatctacctgagctgcacttctgaactggaccgattgctgtctgcactgaactctgggtggaaaaccatctatcaggtggacctcccccacacggcgatccaggaagcctccaacaagaagaaattcgaggatgccttgagcctcatccacagcgcctggcagcggagcgacagtctctgccgcggccgagcctcccgagacccctggtgctgaggcagagctggttggcgtccctggtgggcaggaaaggaaggcacgccagccggcaggcacactgtcacggctgttgtcatgctgtcgggagcctacagtccacccctgccctgggcggcagaaccaccgagtgtggcttaagacagggtccctccactccagggatccagatcaggtgcccggcacccctgggcatcctgcccgacaggtagcgaatggaggtcgctgggggcagagggtccgagccctgtgggctctgcggatgcacgccctcctcccgggcctccgcctcagtctgcagaatttctgccgagtggcaccgagaacaccatccatctaaggacgaacaaaagaaccaggagggcgggacccccctcttcctctcctgggttgggggctggggccctgagtgcccagccatccttgttcgtgtttgaacactctcctggccacgtggggaagcgggaacacggggtgtctgcgcatgtttcctcctcctagctccatcactgcgcacacagctgcctgcctcgccagatgcaggggggcgggcagccctccctggctgccaggaggctctgcatgcccacagtcctgccctgcctgtcccctcaacccggcagtgcctgtagcaccgaggagcaaagggggtggatggggggcttggagaagggcggagcccaccagcctggcatccatgttgacatcttctgactgtcccctgcttggctggagccaggcccttccctagagtttcgtcaagagcctcctggggaaggggtcaggtggtttgggttttgttttttaaaataaaatagacatgttatattgccaaaaaaaaaaaa

SEQ ID NO: 426964 - DNA, 3451 bp, Homo sapiens
gggcgacggtggcagcgccatggagccgggggaggtgaaggaccggatcctggagaacatctcgctgtcggtgaagaagttgcagagctattttgctgcatgtgaggatgagatccctgccatccggaaccatgacaaggtcctacagcgtctgtgtgagcacctggaccacgccctgctgtacggactgcaagacctctcctctggctactgggtgctcgtggtgcattttactcggagagaggccatcaagcagatcgaggtgctgcagcacgtggccaccaacctggggcgcagccgtgcctggctgtacctggccctcaacgagaactccttggagagctacctgcggttgttccaggagaacctgggcctgctgcataagtactacgtcaagaatgccctggtctgcagccacgatcacctgacgctcttcctgaccttggtgtccgggctagagttcattcgtttcgagctggatctggatgccccttacctagacctggccccctacatgcccgactactacaaacctcagtacctgctggactttgaagaccgcctgcagccagaagaaatgtgccaagcagggggacggtgacagccgcaacggcagcccaagccttgggcgggactcgccagacactatgcttgcctccccccaggaggagggagaggggccgagcagcaccacggagagcagcgagcgctccgagccgggcctgctgatccctgagatgaaggacacctccatggagcgcttggggcagcccctgagcaaggttatcgaccagctcaacgggcagctggaccccagcacctggtgctcccgtgctgagcccccagaccagtcctttcggaccggctctcccggggatgccccggagaggccgccgctttgcgactttagtgaggggctttcagccccaatggacttctaccgctttaccgtcgagagtccaagcactgttacatcaggtggcggccaccatgaccctgcagggcttggccaaccgctgcatgttcctagtagccctgaggctgctggccaagaagaagagggaggaggaggagagggacagacgcctcggcccctagaggataccacgagggaggctcaggagctggaggcccagctgtccctggtcagggaggggcctgtgtctgagccagagcctgggacccaggaggttctctgccagctcaagcgagaccagcccagcccgtgtctgagtagcgctgaggattctggggtggatgagggacaggggagcccttcggagatggtccattcctcggagttcagagtagacaacaatcacctgctcctgctcatgatccacgtgttccgagaaaacgaagagcagctgttcaaaatgatccggatgagcaccgggcacatggagggcaacctgcagctgctgtacgtgctgctcacagactgctatgtctacctgctccggaaaggggccacagagaagccatacctggtggaagaggccgtttcttacaatgaacttgactatgtgtcggttggccttgaccagcagacggtgaagctggtgtgcaccaaccgcaggaagcagtttctgctggacacggctgatgtggcgctggctgagttctttttggcttctttgaagtcagccatgatcaaaggctgtcgagaacctccctaccccagcatcctgacggatgccaccatggagaagctggcactggccaaatttgtggcccaagaatcgaagtgtgaggcatctgctgtcaccgtgcgcttctacggccttgtgcactgggaggaccccacagacgagtccctgggccccacgccctgccactgctcaccccccgagggcaccatcaccaaagaaggcatgctgcactacaaggcgggcacctcctacctgggcaaggaacactggaagacgtgcttcgtggtgctcagcaacgggatcctctaccagtacccggaccgcaccgacgtcatccctctgctctcggtgaacatggggggggagcagtgcggtggctgccggagagccaacaccacggatcggccccacgccttccaggtcattctctccgaccggccctgcctggagctaagtgccgagagcgaggccgagatggccgagtggatgcagcatctctgccaggctgtgtccaaaggggtcatcccccagggcgtagctcccagcccctgcataccctgctgcctggtcctcacggatgaccgcctctttacgtgccatgaggattgccagaccagcttcttccgctctttgggcacagccaagctgggcgacatcagcgccgtctccaccgagccgggcaaggagtactgcgtcttggagttctcccaggacagccagcagctcctcccgccctgggtcatctacctgagctgcacttctgaactggaccgattgctgtctgcactgaactctgggtggaaaaccatctatcaggtggacctcccccacacggcgatccaggaagcctccaacaagaagaaattcgaggatgccttgagcctcatccacagcgcctggcagcggagcgacagtctctgccgcggccgagcctcccgagacccctggtgctgaggcagagctggttggcgtccctggtgggcaggaaaggaaggcacgccagccggcaggcacactgtcacggctgttgtcatgctgtcgggagcctacagtccacccctgccctgggcggcagaaccaccgagtgtggcttaagacagggtccctccactccagggatccagatcaggtgcccggcacccctgggcatcctgcccgacaggtagcgaatggaggtcgctgggggcagagggtccgagccctgtgggctctgcggatgcacgccctcctcccgggcctccgcctcagtctgcagaatttctgccgagtggcaccgagaacaccatccatctaaggacgaacaaaagaaccaggagggcgggacccccctcttcctctcctgggttgggggctggggccctgagtgcccagccatccttgttcgtgtttgaacactctcctggccacgtggggaagcgggaacacggggtgtctgcgcatgtttcctcctcctagctccatcactgcgcacacagctgcctgcctcgccagatgcaggggggcgggcagccctccctggctgccaggaggctctgcatgcccacagtcctgccctgcctgtcccctcaacccggcagtgcctgtagcaccgaggagcaaagggggtggatggggggcttggagaagggcggagcccaccagcctggcatccatgttgacatcttctgactgtcccctgcttggctggagccaggcccttccctagagtttcgtcaagagcctcctggggaaggggtcaggtggtttgggttttgttttttaaaataaaatagacatgttatattgccaaaaaaaaaaaa

SEQ ID NO: 426965 - DNA, 3951 bp, Homo sapiens
  misc_feature (1863)..(1863): n is a, c, g, or t
  misc_feature (1865)..(1865): n is a, c, g, or t
  misc_feature (1869)..(1870): n is a, c, g, or t
gggcgacggtggcagcgccatggagccgggggaggtgaaggaccggatcctggagaacatctcgctgtcggtgaagaagttgcagagctattttgctgcatgtgaggatgagatccctgccatccggaaccatgacaaggtcctacagcgtctgtgtgagcacctggaccacgccctgctgtacggactgcaagacctctcctctggctactgggtgctcgtggtgcattttactcggagagaggccatcaagcagatcgaggtgctgcagcacgtggccaccaacctggggcgcagccgtgcctggctgtacctggccctcaacgagaactccttggagagctacctgcggttgttccaggagaacctgggcctgctgcataagtactacgtcaagaatgccctggtctgcagccacgatcacctgacgctcttcctgaccttggtgtccgggctagagttcattcgtttcgagctggatctggatgccccttacctagacctggccccctacatgcccgactactacaaacctcagtacctgctggactttgaagaccgccttcccagctcggtccacggctcagacagtctgtccctcaactctttcaactccgtcacctccaccaacctggagtgggatgacagtgcgattgccccatctagtgaggattatgattttggagatgtgtttccagcagtgccgtctgtacccagcacagactgggaagatggagacctcacagacacggtcagtggtccccgctccacagcctccgacctgaccagcagcaaggcctccaccaggagccccacccagcgccagaaccccttcaacgaggagccggcagagactgtgtcctcctctgacaccacccccgtgcacaccacctctcaggagaaggaggaggcccaggccctggacccgccggatgcctgcacggagctcgaggtcatcagggtcaccaagaagaagaaaattggcaagaagaaaaagagcagatcagatgaggaggcaagtccactccaccccgcctgcagccagaagaaatgtgccaagcagggggacggtgacagccgcaacggcagcccaagccttgggcgggactcgccagacactatgcttgcctccccccaggaggagggagaggggccgagcagcaccacggagagcagcgagcgctccgagccgggcctgctgatccctgagatgaaggacacctccatggagcgcttggggcagcccctgagcaaggttatcgaccagctcaacgggcagctggaccccagcacctggtgctcccgtgctgagcccccagaccagtcctttcggaccggctctcccggggatgccccggagaggccgccgctttgcgactttagtgaggggctttcagccccaatggacttctaccgctttaccgtcgagagtccaagcactgttacatcaggtggcggccaccatgaccctgcagggcttggccaaccgctgcatgttcctagtagccctgaggctgctggccaagaagaagagggaggaggaggagagggacagacgcctcggcccctagaggataccacgagggaggctcaggagctggaggcccagctgtccctggtcagggaggggcctgtgtctgagccagagcctgggacccaggaggttctctgccagctcaagcgagaccagcccagcccgtgtctgagtagcgctgaggattctggggtggatgagggacaggggagcccttcggagatggtccattcctcggagttcagagtagacaacaatcacctgctcctgctcatgatccacgtgttccgagaaaacgaagagcagctgttcaaatgatccggatgagnancggnncatggagggtaagcatgcagttgctgttcgtgctgctcatcagattgctatgtctacctgctccggataggggccacatgagaatccataacctgagtgagaagaggccggtatctctagcaactgagactgggactatgtagatacggcttggaacttgcacacatggatacggagaaagctggatgtgcaaccaaacagcaggaagcggtttcatgacatggacacggctgatgtggcgctgagctgaggttctttttggcttctttgaagtcagccatgatcaaaggctgtcgagaacctccctaccccagcatcctgacggatgccaccatggagaagctggcactggccaaatttgtggcccaagaatcgaagtgtgaggcatctgctgtcaccgtgcgcttctacggccttgtgcactgggaggaccccacagacgagtccctgggccccacgccctgccactgctcaccccccgagggcaccatcaccaaagaaggcatgctgcactacaaggcgggcacctcctacctgggcaaggaacactggaagacgtgcttcgtggtgctcagcaacgggatcctctaccagtacccggaccgcaccgacgtcatccctctgctctcggtgaacatggggggggagcagtgcggtggctgccggagagccaacaccacggatcggccccacgccttccaggtcattctctccgaccggccctgcctggagctaagtgccgagagcgaggccgagatggccgagtggatgcagcatctctgccaggctgtgtccaaaggggtcatcccccagggcgtagctcccagcccctgcataccctgctgcctggtcctcacggatgaccgcctctttacgtgccatgaggattgccagaccagcttcttccgctctttgggcacagccaagctgggcgacatcagcgccgtctccaccgagccgggcaaggagtactgcgtcttggagttctcccaggacagccagcagctcctcccgccctgggtcatctacctgagctgcacttctgaactggaccgattgctgtctgcactgaactctgggtggaaaaccatctatcaggtggacctcccccacacggcgatccaggaagcctccaacaagaagaaattcgaggatgccttgagcctcatccacagcgcctggcagcggagcgacagtctctgccgcggccgagcctcccgagacccctggtgctgaggcagagctggttggcgtccctggtgggcaggaaaggaaggcacgccagccggcaggcacactgtcacggctgttgtcatgctgtcgggagcctacagtccacccctgccctgggcggcagaaccaccgagtgtggcttaagacagggtccctccactccagggatccagatcaggtgcccggcacccctgggcatcctgcccgacaggtagcgaatggaggtcgctgggggcagagggtccgagccctgtgggctctgcggatgcacgccctcctcccgggcctccgcctcagtctgcagaatttctgccgagtggcaccgagaacaccatccatctaaggacgaacaaaagaaccaggagggcgggacccccctcttcctctcctgggttgggggctggggccctgagtgcccagccatccttgttcgtgtttgaacactctcctggccacgtggggaagcgggaacacggggtgtctgcgcatgtttcctcctcctagctccatcactgcgcacacagctgcctgcctcgccagatgcaggggggcgggcagccctccctggctgccaggaggctctgcatgcccacagtcctgccctgcctgtcccctcaacccggcagtgcctgtagcaccgaggagcaaagggggtggatggggggcttggagaagggcggagcccaccagcctggcatccatgttgacatcttctgactgtcccctgcttggctggagccaggcccttccctagagtttcgtcaagagcctcctggggaaggggtcaggtggtttgggttttgttttttaaaataaaatagacatgttatattgccaaaaaaaaaaaa

SEQ ID NO: 426966 - DNA, 3606 bp, Homo sapiens
gggcgacggtggcagcgccatggagccgggggaggtgaaggaccggatcctggagaacatctcgctgtcggtgaagaagttgcagagctattttgctgcatgtgaggatgagatccctgccatccggaaccatgacaaggtcctacagcgtctgtgtgagcacctggaccacgccctgctgtacggactgcaagacctctcctctggctactgggtgctcgtggtgcattttactcggagagaggccatcaagcagatcgaggtgctgcagcacgtggccaccaacctggggcgcagccgtgcctggctgtacctggccctcaacgagaactccttggagagctacctgcggttgttccaggagaacctgggcctgctgcataagtactacgtcaagaatgccctggtctgcagccacgatcacctgacgctcttcctgaccttggtgtccgggctagagttcattcgtttcgagctggatctggatgccccttacctagacctggccccctacatgcccgactactacaaacctcagtacctgctggactttgaagaccgccttcccagctcggtccacggctcagacagtctgtccctcaactctttcaactccgtcacctccaccaacctggagtgggatgacagtgcgattgccccatctagtgaggattatgattttggagatgtgtttccagcagtgccgtctgtacccagcacagactgggaagatggagacctcacagacacggtcagtggtccccgctccacagcctccgacctgaccagcagcaaggcctccaccaggagccccacccagcgccagaaccccttcaacgaggagccggcagagactgtgtcctcctctgacaccacccccgtgcacaccacctctcaggagaaggaggaggcccaggccctggacccgccggatgcctgcacggagctcgaggtcatcagggtcaccaagaagaagaaaattggcaagaagaaaaagagcagatcagatgaggaggcaagtccactccaccccgcctgcagccagaagaaatgtgccaagcagggggacggtgacagccgcaacggcagcccaagccttgggcgggactcgccagacactatgcttgcctccccccaggaggagggagaggggccgagcagcaccacggagagcagcgagcgctccgagccgggcctgctgatccctgagatgaaggacacctccatggagcgcttggggcagcccctgagcaaggttatcgaccagctcaacgggcagctggaccccagcacctggtgctcccgtgctgagcccccagaccagtcctttcggaccggctctcccggggatgccccggagaggccgccgctttgcgactttagtgaggggctttcagccccaatggacttctaccgctttaccgtcgagagtccaagcactgttacatcaggtggcggccaccatgaccctgcagggcttggccaaccgctgcatgttcctagtagccctgaggctgctggccaagaagaagagggaggaggaggagagggacagacgcctcggcccctagaggataccacgagggaggctcaggagctggaggcccagctgtccctggtcagggaggggcctgtgtctgagccagagcctgggacccaggaggttctctgccagctcaagcgagaccagcccagcccgtgtctgagtagcgctgaggattctggggtggatgagggacaggggagcccttcggagatggtccattcctcggagttcaggtaacaagactctgcagcttcagccatgatcaaaggctgtcgagaacctccctaccccagcatcctgacggatgccaccatggagaagctggcactggccaaatttgtggcccaagaatcgaagtgtgaggcatctgctgtcaccgtgcgcttctacggccttgtgcactgggaggaccccacagacgagtccctgggccccacgccctgccactgctcaccccccgagggcaccatcaccaaagaaggcatgctgcactacaaggcgggcacctcctacctgggcaaggaacactggaagacgtgcttcgtggtgctcagcaacgggatcctctaccagtacccggaccgcaccgacgtcatccctctgctctcggtgaacatggggggggagcagtgcggtggctgccggagagccaacaccacggatcggccccacgccttccaggtcattctctccgaccggccctgcctggagctaagtgccgagagcgaggccgagatggccgagtggatgcagcatctctgccaggctgtgtccaaaggggtcatcccccagggcgtagctcccagcccctgcataccctgctgcctggtcctcacggatgaccgcctctttacgtgccatgaggattgccagaccagcttcttccgctctttgggcacagccaagctgggcgacatcagcgccgtctccaccgagccgggcaaggagtactgcgtcttggagttctcccaggacagccagcagctcctcccgccctgggtcatctacctgagctgcacttctgaactggaccgattgctgtctgcactgaactctgggtggaaaaccatctatcaggtggacctcccccacacggcgatccaggaagcctccaacaagaagaaattcgaggatgccttgagcctcatccacagcgcctggcagcggagcgacagtctctgccgcggccgagcctcccgagacccctggtgctgaggcagagctggttggcgtccctggtgggcaggaaaggaaggcacgccagccggcaggcacactgtcacggctgttgtcatgctgtcgggagcctacagtccacccctgccctgggcggcagaaccaccgagtgtggcttaagacagggtccctccactccagggatccagatcaggtgcccggcacccctgggcatcctgcccgacaggtagcgaatggaggtcgctgggggcagagggtccgagccctgtgggctctgcggatgcacgccctcctcccgggcctccgcctcagtctgcagaatttctgccgagtggcaccgagaacaccatccatctaaggacgaacaaaagaaccaggagggcgggacccccctcttcctctcctgggttgggggctggggccctgagtgcccagccatccttgttcgtgtttgaacactctcctggccacgtggggaagcgggaacacggggtgtctgcgcatgtttcctcctcctagctccatcactgcgcacacagctgcctgcctcgccagatgcaggggggcgggcagccctccctggctgccaggaggctctgcatgcccacagtcctgccctgcctgtcccctcaacccggcagtgcctgtagcaccgaggagcaaagggggtggatggggggcttggagaagggcggagcccaccagcctggcatccatgttgacatcttctgactgtcccctgcttggctggagccaggcccttccctagagtttcgtcaagagcctcctggggaaggggtcaggtggtttgggttttgttttttaaaataaaatagacatgttatattgccaaaaaaaaaaaa

SEQ ID NO: 426967 - DNA, 3764 bp, Homo sapiens
gggcgacggtggcagcgccatggagccgggggaggtgaaggaccggatcctggagaacatctcgctgtcggtgaagaagttgcagagctattttgctgcatgtgaggatgagatccctgccatccggaaccatgacaaggtcctacagcgtctgtgtgagcacctggaccacgccctgctgtacggactgcaagacctctcctctggctactgggtgctcgtggtgcattttactcggagagaggccatcaagcagatcgaggtgctgcagcacgtggccaccaacctggggcgcagccgtgcctggctgtacctggccctcaacgagaactccttggagagctacctgcggttgttccaggagaacctgggcctgctgcataagtactacgtcaagaatgccctggtctgcagccacgatcacctgacgctcttcctgaccttggtgtccgggctagagttcattcgtttcgagctggatctggatgccccttacctagacctggccccctacatgcccgactactacaaacctcagtacctgctggactttgaagaccgccttcccagctcggtccacggctcagacagtctgtccctcaactctttcaactccgtcacctccaccaacctggagtgggatgacagtgcgattgccccatctagtgaggattatgattttggagatgtgtttccagcagtgccgtctgtacccagcacagactgggaagatggagacctcacagacacggtcagtggtccccgctccacagcctccgacctgaccagcagcaaggcctccaccaggagccccacccagcgccagaaccccttcaacgaggagccggcagagactgtgtcctcctctgacaccacccccgtgcacaccacctctcaggagaaggaggaggcccaggccctggacccgccggatgcctgcacggagctcgaggtcatcagggtcaccaagaagaagaaaattggcaagaagaaaaagagcagatcagatgaggaggcaagtccactccaccccgcctgcagccagaagaaatgtgccaagcagggggacggtgacagccgcaacggcagcccaagccttgggcgggactcgccagacactatgcttgcctccccccaggaggagggagaggggccgagcagcaccacggagagcagcgagcgctccgagccgggcctgctgatccctgagatgaaggacacctccatggagcgcttggggcagcccctgagcaaggttatcgaccagctcaacgggcagctggaccccagcacctggtgctcccgtgctgagcccccagaccagtcctttcggaccggctctcccggggatgccccggagaggccgccgctttgcgactttagtgaggggctttcagccccaatggacttctaccgctttaccgtcgagagtccaagcactgttacatcaggtggcggccaccatgaccctgcagggcttggccaaccgctgcatgttcctagtagccctgaggctgctggccaagaagaagagggaggaggaggagagggacagacgcctcggcccctagaggataccacgagggaggctcaggagctggaggcccagctgtccctggtcagggaggggcctgtgtctgagccagagcctgggacccaggaggttctctgccagctcaagcgagaccagcccagcccgtgtctgagtagcgctgaggattctggggtggatgagggacaggggagcccttcggagatggtccattcctcggagttcagagtagacaacaatcacctgctcctgctcatgatccacgtgttccgagaaaacgaagagcagctgttcaaaatgatccggatgagcaccgggcacatggagggcaacctgcagctgctgtacgtgctgctcacagactgctatgtctacctgctccggaaaggggccacagagaagccatacctggtggaagaggccgtttcttacaatgaacttgactatgtgtcggttggccttgaccagcagacggtgaagctggtgtgcaccaaccgcaggaagcagtttctgctggacacggctgatgtggcgctggctgagttctttttggcttctttgaagtcagccatgatcaaaggctgtcgagaacctccctaccccagcatcctgacggatgccaccatggagaagctggcactggccaaatttgtggcccaagaatcgaagtgtgaggcatctgctgtcaccgtgcgcttctacggccttgtgcactgggaggaccccacagacgagtccctgggccccacgccctgccactgctcaccccccgagggcaccatcaccaaagaaggcatgctgcactacaaggcgggcacctcctacctgggcaaggaacactggaagacgtgcttcgtggtgctcagcaacgggatcctctaccagtacccggaccgcaccgacgtcatccctctgctctcggtgaacatggggtcatcccccagggcgtagctcccagcccctgcataccctgctgcctggtcctcacggatgaccgcctctttacgtgccatgaggattgccagaccagcttcttccgctctttgggcacagccaagctgggcgacatcagcgccgtctccaccgagccgggcaaggagtactgcgtcttggagttctcccaggacagccagcagctcctcccgccctgggtcatctacctgagctgcacttctgaactggaccgattgctgtctgcactgaactctgggtggaaaaccatctatcaggtggacctcccccacacggcgatccaggaagcctccaacaagaagaaattcgaggatgccttgagcctcatccacagcgcctggcagcggagcgacagtctctgccgcggccgagcctcccgagacccctggtgctgaggcagagctggttggcgtccctggtgggcaggaaaggaaggcacgccagccggcaggcacactgtcacggctgttgtcatgctgtcgggagcctacagtccacccctgccctgggcggcagaaccaccgagtgtggcttaagacagggtccctccactccagggatccagatcaggtgcccggcacccctgggcatcctgcccgacaggtagcgaatggaggtcgctgggggcagagggtccgagccctgtgggctctgcggatgcacgccctcctcccgggcctccgcctcagtctgcagaatttctgccgagtggcaccgagaacaccatccatctaaggacgaacaaaagaaccaggagggcgggacccccctcttcctctcctgggttgggggctggggccctgagtgcccagccatccttgttcgtgtttgaacactctcctggccacgtggggaagcgggaacacggggtgtctgcgcatgtttcctcctcctagctccatcactgcgcacacagctgcctgcctcgccagatgcaggggggcgggcagccctccctggctgccaggaggctctgcatgcccacagtcctgccctgcctgtcccctcaacccggcagtgcctgtagcaccgaggagcaaagggggtggatggggggcttggagaagggcggagcccaccagcctggcatccatgttgacatcttctgactgtcccctgcttggctggagccaggcccttccctagagtttcgtcaagagcctcctggggaaggggtcaggtggtttgggttttgttttttaaaataaaatagacatgttatattgccaaaaaaaaaaaa

SEQ ID NO: 426968 - DNA, 3658 bp, Homo sapiens
gggcgacggtggcagcgccatggagccgggggaggtgaaggaccggatcctggagaacatctcgctgtcggtgaagaagttgcagagctattttgctgcatgtgaggatgagatccctgccatccggaaccatgacaaggtcctacagcgtctgtgtgagcacctggaccacgccctgctgtacggactgcaagacctctcctctggctactgggtgctcgtggtgcattttactcggagagaggccatcaagcagatcgaggtgctgcagcacgtggccaccaacctggggcgcagccgtgcctggctgtacctggccctcaacgagaactccttggagagctacctgcggttgttccaggagaacctgggcctgctgcataagtactacgtcaagaatgccctggtctgcagccacgatcacctgacgctcttcctgaccttggtgtccgggctagagttcattcgtttcgagctggatctggatgccccttacctagacctggccccctacatgcccgactactacaaacctcagtacctgctggactttgaagaccgccttcccagctcggtccacggctcagacagtctgtccctcaactctttcaactccgtcacctccaccaacctggagtgggatgacagtgcgattgccccatctagtgaggattatgattttggagatgtgtttccagcagtgccgtctgtacccagcacagactgggaagatggagacctcacagacacggtcagtggtccccgctccacagcctccgacctgaccagcagcaaggcctccaccaggagccccacccagcgccagaaccccttcaacgaggagccggcagagactgtgtcctcctctgacaccacccccgtgcacaccacctctcaggagaaggaggaggcccaggccctggacccgccggatgcctgcacggagctcgaggtcatcagggtcaccaagaagaagaaaattggcaagaagaaaaagagcagatcagatgaggaggcaagtccactccaccccgcctgcagccagaagaaatgtgccaagcagggggacggtgacagccgcaacggcagcccaagccttgggcgggactcgccagacactatgcttgcctccccccaggaggagggagaggggccgagcagcaccacggagagcagcgagcgctccgagccgggcctgctgatccctgagatgaaggacacctccatggagcgcttggggcagcccctgagcaaggttatcgaccagctcaacgggcagctggaccccagcacctggtgctcccgtgctgagcccccagaccagtcctttcggaccggctctcccggggatgccccggagaggccgccgctttgcgactttagtgaggggctttcagccccaatggacttctaccgctttaccgtcgagagtccaagcactgttacatcaggtggcggccaccatgaccctgcagggcttggccaaccgctgcatgttcctagtagccctgaggctgctggccaagaagaagagggaggaggaggagagggacagacgcctcggcccctagaggataccacgagggaggctcaggagctggaggcccagctgtccctggtcagggaggggcctgtgtctgagccagagcctgggacccaggaggttctctgccagctcaagcgagaccagcccagcccgtgtctgagtagcgctgaggattctggggtggatgagggacaggggagcccttcggagatggtccattcctcggagttcagagtagacaacaatcacctgctcctgctcatgatccacgtgttccgagaaaacgaagagcagctgttcaaaatgatccggatgagcaccgggcacatggagggcaacctgcagctgctgtacgtgctgctcacagactgctatgtctacctgctccggaaaggggccacagagaagccatacctggtggaagaggccgtttcttacaatgaacttgactatgtgtcggttggccttgaccagcagacggtgaagctggtgtgcaccaaccgcaggaagcagtttctgctggacacggctgatgtggcgctggctgagttctttttggcttctttgaagtcagccatgatcaaaggctgtcgagaacctccctaccccagcatcctgacggatgccaccatggagaagctggcactggccaaatttgtggcccaagaatcgaagtgtgaggcatctgctgtcaccgtgcgcttctacggccttgtgcactgggaggaccccacagacgagtccctgggccccacgccctgccactgctcaccccccgagggcaccatcaccaaagaaggcatgctgcactacaaggcgggcacctcctacctgggcaaggaacactggaagacgtgcttcgtggtgctcagcaacgggatcctctaccagtacccggaccgcaccgacgtcatccctctgctctcggtgaacatggggggggagcagtgcggtggctgccggagagccaacaccacggatcggccccacgccttccaggtcattctctccgaccggccctgcctggagctaagtgccgagagcgaggccgagatggccgagtggatgcagcatctctgccaggctgtgtccaaaggggtcatcccccagggcgtagctcccagcccctgcataccctgctgcctggtcctcacggatgaccgcctctttacgtgccatgaggattgccagaccagcttcttccgctctttgggcacagccaagctgggcgacatcagcgccgtctccaccgagccgggcaaggagtactgcgtcttggagttctcccaggacagccagcagctcctcccgccctgggtcatctacctgagctgcacttctgaactggaccgattgctgtctgcactgaactctgggtggaaaaccatctatcaggtggacctcccccacacggcgatccaggaagcctccaacaagaagaaattcgaggatgccttgagcctcatccacagcgcctggcagcggagcgacagtctctgccgcggccgagcctcccgagacccctggtgctgaggcagagctggttggcgtccctggtgggcaggaaaggaaggcacgccagccggcaggcacactgtcacggctgttgtcatgctgtcgggagcctacagtccacccctgccctgggcggcagaaccaccgagtgtggcttaagacagggtccctccactccagggatccagatcaggtgcccggcacccctgggcatcctgcccgacaggtagcgaatggaggtcgctgggggcagagggtccgagccctgtgggctctgcggatgcacgccctcctcccgggcctccgcctcagtctgcagaattgtgttcggttggtattggtatgggagtcattatacttccctgaaaaaatgaaattatcttttaaaaagtctattgttcttataatttccatgttacccatgtgagcatatgcaaatttcaggatctactgcatgctattctcaagtaatggactactagaaatgctagctctagctcatctagctagccaggcatggagatttggggaatttttttttttggggcgggagtggggaagggggggggggggcgtaccggcggggcaagccggggg

SEQ ID NO: 426969 - DNA, 3454 bp, Homo sapiens
  misc_feature (3365)..(3365): n is a, c, g, or t
gggcgacggtggcagcgccatggagccgggggaggtgaaggaccggatcctggagaacatctcgctgtcggtgaagaagttgcagagctattttgctgcatgtgaggatgagatccctgccatccggaaccatgacaaggtcctacagcgtctgtgtgagcacctggaccacgccctgctgtacggactgcaagacctctcctctggctactgggtgctcgtggtgcattttactcggagagaggccatcaagcagatcgaggtgctgcagcacgtggccaccaacctggggcgcagccgtgcctggctgtacctggccctcaacgagaactccttggagagctacctgcggttgttccaggagaacctgggcctgctgcataagtactacgtcaagaatgccctggtctgcagccacgatcacctgacgctcttcctgaccttggtgtccgggctagagttcattcgtttcgagctggatctggatgccccttacctagacctggccccctacatgcccgactactacaaacctcagtacctgctggactttgaagaccgccttcccagctcggtccacggctcagacagtctgtccctcaactctttcaactccgtcacctccaccaacctggagtgggatgacagtgcgattgccccatctagtgaggattatgattttggagatgtgtttccagcagtgccgtctgtacccagcacagactgggaagatggagacctcacagacacggtcagtggtccccgctccacagcctccgacctgaccagcagcaaggcctccaccaggagccccacccagcgccagaaccccttcaacgaggagccggcagagactgtgtcctcctctgacaccacccccgtgcacaccacctctcaggagaaggaggaggcccaggccctggacccgccggatgcctgcacggagctcgaggtcatcagggtcaccaagaagaagaaaattggcaagaagaaaaagagcagatcagatgaggaggcaagtccactccaccccgcctgcagccagaagaaatgtgccaagcagggggacggtgacagccgcaacggcagcccaagccttgggcgggactcgccagacactatgcttgcctccccccaggaggagggagaggggccgagcagcaccacggagagcagcgagcgctccgagccgggcctgctgatccctgagatgaaggacacctccatggagcgcttggggcagcccctgagcaaggttatcgaccagctcaacgggcagctggaccccagcacctggtgctcccgtgctgagcccccagaccagtcctttcggaccggctctcccggggatgccccggagaggccgccgctttgcgactttagtgaggggctttcagccccaatggacttctaccgctttaccgtcgagagtccaagcactgttacatcaggtggcggccaccatgaccctgcagggcttggccaaccgctgcatgttcctagtagccctgaggctgctggccaagaagaagagggaggaggaggagagggacagacgcctcggcccctagaggataccacgagggaggctcaggagctggaggcccagctgtccctggtcagggaggggcctgtgtctgagccagagcctgggacccaggaggttctctgccagctcaagcgagaccagcccagcccgtgtctgagtagcgctgaggattctggggtggatgagggacaggggagcccttcggagatggtccattcctcggagttcagagtagacaacaatcacctgctcctgctcatgatccacgtgttccgagaaaacgaagagcagctgttcaaaatgatccggatgagcaccgggcacatggagggcaacctgcagctgctgtacgtgctgctcacagactgctatgtctacctgctccggaaaggggccacagagaagccatacctggtggaagaggccgtttcttacaatgaacttgactatgtgtcggttggccttgaccagcagacggtgaagctggtgtgcaccaaccgcaggaagcagtttctgctggacacggctgatgtggcgctggctgagttctttttggcttctttgaagtcagccatgatcaaaggctgtcgagaacctccctaccccagcatcctgacggatgccaccatggagaagctggcactggccaaatttgtggcccaagaatcgaagtgtgaggcatctgctgtcaccgtgcgcttctacggccttgtgcactgggaggaccccacagacgagtccctgggccccacgccctgccactgctcaccccccgagggcaccatcaccaaagaaggcatgctgcactacaaggcgggcacctcctacctgggcaaggaacactggaagacgtgcttcgtggtgctcagcaacgggatcctctaccagtacccggaccgcaccgacgtcatccctctgctctcggtgaacatggggggggagcagtgcggtggctgccggagagccaacaccacggatcggccccacgccttccaggtcattctctccgaccggccctgcctggagctaagtgccgagagcgaggccgagatggccgagtggatgcagcatctctgccaggctgtgtccaaaggggtcatcccccagggcgtagctcccagcccctgcataccctgctgcctggtcctcacggatgaccgcctctttacgtgccatgaggattgccagaccagcttcttccgctctttgggcacagccaagctgggcgacatcagcgccgtctccaccgagccgggcaaggagtactgcgtcttggagttctcccaggacagccagcagctcctcccgccctgggtcatctacctgagctgcacttctgaactggaccgattgctgtctgcactgaactctgggtggaaaaccatctatcaggtggacctcccccacacggcgatccaggaagcctccaacaagaagaaattcgaggatgccttgagcctcatccacagcgcctggcagcggagcgacagtctctgccgcggccgagcctcccgagacccctggtgctgaggcagagctggttggcgtccctggtgggcaggaaaggaaggcacgccagccggcaggcacactgtcacggctgttgtcatgctgtcgggagcctacagtccacccctgccctggtgcaggcatccctcgagtatgcctgcaccaggccatctgcggggtcagtgggggctgctgtatgtcttggctgccgaacggggaaggtgacataggcatcatagccaaagaggcacgtagcgattaggcccagtacccctgcggcgggtttggagtggtttcctctcacacnacccacaacaatggaggtggtcaggtagaggaaaaacgctatgagggttcggaagaaatctctccagggccagttgaggagggtttcct

SEQ ID NO: 426970 - DNA, 3140 bp, Homo sapiens
gggcgacggtggcagcgccatggagccgggggaggtgaaggaccggatcctggagaacatctcgctgtcggtgaagaagttgcagagctattttgctgcatgtgaggatgagatccctgccatccggaaccatgacaaggtcctacagcgtctgtgtgagcacctggaccacgccctgctgtacggactgcaagacctctcctctggctactgggtgctcgtggtgcattttactcggagagaggccatcaagcagatcgaggtgctgcagcacgtggccaccaacctggggcgcagccgtgcctggctgtacctggccctcaacgagaactccttggagagctacctgcggttgttccaggagaacctgggcctgctgcataagtactacgtcaagaatgccctggtctgcagccacgatcacctgacgctcttcctgaccttggtgtccgggctagagttcattcgtttcgagctggatctggatgccccttacctagacctggccccctacatgcccgactactacaaacctcagtacctgctggactttgaagaccgccttcccagctcggtccacggctcagacagtctgtccctcaactctttcaactccgtcacctccaccaacctggagtgggatgacagtgcgattgccccatctagtgaggattatgattttggagatgtgtttccagcagtgccgtctgtacccagcacagactgggaagatggagacctcacagacacggtcagtggtccccgctccacagcctccgacctgaccagcagcaaggcctccaccaggagccccacccagcgccagaaccccttcaacgaggagccggcagagactgtgtcctcctctgacaccacccccgtgcacaccacctctcaggagaaggaggaggcccaggccctggacccgccggatgcctgcacggagctcgaggtcatcagggtcaccaagaagaagaaaattggcaagaagaaaaagagcagatcagatgaggaggcaagtccactccaccccgcctgcagccagaagaaatgtgccaagcagggggacggtgacagccgcaacggcagcccaagccttgggcgggactcgccagacactatgcttgcctccccccaggaggagggagaggggccgagcagcaccacggagagcagcgagcgctccgagccgggcctgctgatccctgagatgaaggacacctccatggagcgcttggggcagcccctgagcaaggttatcgaccagctcaacgggcagctggaccccagcacctggtgctcccgtgctgagcccccagaccagtcctttcggaccggctctcccggggatgccccggagaggccgccgctttgcgactttagtgaggggctttcagccccaatggacttctaccgctttaccgtcgagagtccaagcactgttacatcaggtggcggccaccatgaccctgcagggcttggccaaccgctgcatgttcctagtagccctgaggctgctggccaagaagaagagggaggaggaggagagggacagacgcctcggcccctagaggataccacgagggaggctcaggagctggaggcccagctgtccctggtcagggaggggcctgtgtctgagccagagcctgggacccaggaggttctctgccagctcaagcgagaccagcccagcccgtgtctgagtagcgctgaggattctggggtggatgagggacaggggagcccttcggagatggtccattcctcggagttcagagtagacaacaatcacctgctcctgctcatgatccacgtgttccgagaaaacgaagagcagctgttcaaaatgatccggatgagcaccgggcacatggagggcaacctgcagctgctgtacgtgctgctcacagactgctatgtctacctgctccggaaaggggccacagagaagccatacctggtggaagaggccgtttcttacaatgaacttgactatgtgtcggttggccttgaccagcagacggtgaagctggtgtgcaccaaccgcaggaagcagtttctgctggacacggctgatgtggcgctggctgagttctttttggcttctttgaagtcagccatgatcaaaggctgtcgagaacctccctaccccagcatcctgacggatgccaccatggagaagctggcactggccaaatttgtggcccaagaatcgaagtgtgaggcatctgctgtcaccgtgcgcttctacggccttgtgcactgggaggaccccacagacgagtccctgggccccacgccctgccactgctcaccccccgagggcaccatcaccaaagaaggcatgctgcactacaaggcgggcacctcctacctgggcaaggaacactggaagacgtgcttcgtggtgctcagcaacgggatcctctaccagtacccggaccgcaccgacgtcatccctctgctctcggtgaacatggggggggagcagtgcggtggctgccggagagccaacaccacggatcggccccacgccttccaggtcattctctccgaccggccctgcctggagctaagtgccgagagcgaggccgagatggccgagtggatgcagcatctctgccaggctgtgtccaaaggggtcatcccccagggcgtagctcccagcccctgcataccctgctgcctggtcctcacggatgaccgcctctttacgtgccatgaggattgccagaccagcttcttccgctctttgggcacagccaagctgggcgacatcagcgccgtctccaccgagccgggcaaggagtactgcgtcttggagttctcccaggacagccagcagctcctcccgccctgggtcatctacctgagctgcacttctgaactggaccgattgctgtctgcactgaactctgggtggaaaaccatctatcaggtggacctcccccacacggcgatccaggaagcctccaacaagaagaaattcgaggatgccttgagcctcatccacagcgcctggcagcggagcgacagtctctgccgcggccgagcctcccgagacccctggtgctgaggcagagctggttggcgtccctggtgggcacacattatggaggggtcctctagagcaccca

SEQ ID NO: 426971 - DNA, 1458 bp, Homo sapiens
aaaataaaaaattataacaaaccctgagaaccaaaatgaagcgaacagattttcgacggatcggccccacgccttccaggtcattctctccgaccggccctgcctggagctaagtgccgagagcgaggccgagatggccgagtggatgcagcatctctgccaggctgtgtccaaaggggtcatcccccagggcgtagctcccagcccctgcataccctgctgcctggtcctcacggatgaccgcctctttacgtgccatgaggattgccagaccagcttcttccgctctttgggcacagccaagctgggcgacatcagcgccgtctccaccgagccgggcaaggagtactgcgtcttggagttctcccaggacagccagcagctcctcccgccctgggtcatctacctgagctgcacttctgaactggaccgattgctgtctgcactgaactctgggtggaaaaccatctatcaggtggacctcccccacacggcgatccaggaagcctccaacaagaagaaattcgaggatgccttgagcctcatccacagcgcctggcagcggagcgacagtctctgccgcggccgagcctcccgagacccctggtgctgaggcagagctggttggcgtccctggtgggcaggaaaggaaggcacgccagccggcaggcacactgtcacggctgttgtcatgctgtcgggagcctacagtccacccctgccctgggcggcagaaccaccgagtgtggcttaagacagggtccctccactccagggatccagatcaggtgcccggcacccctgggcatcctgcccgacaggtagcgaatggaggtcgctgggggcagagggtccgagccctgtgggctctgcggatgcacgccctcctcccgggcctccgcctcagtctgcagaatttctgccgagtggcaccgagaacaccatccatctaaggacgaacaaaagaaccaggagggcgggacccccctcttcctctcctgggttgggggctggggccctgagtgcccagccatccttgttcgtgtttgaacactctcctggccacgtggggaagcgggaacacggggtgtctgcgcatgtttcctcctcctagctccatcactgcgcacacagctgcctgcctcgccagatgcaggggggcgggcagccctccctggctgccaggaggctctgcatgcccacagtcctgccctgcctgtcccctcaacccggcagtgcctgtagcaccgaggagcaaagggggtggatggggggcttggagaagggcggagcccaccagcctggcatccatgttgacatcttctgactgtcccctgcttggctggagccaggcccttccctagagtttcgtcaagagcctcctggggaaggggtcaggtggtttgggttttgttttttaaaataaaatagacatgttatattgccaaaaaaaaaaaa

SEQ ID NO: 426972 - DNA, 2814 bp, Homo sapiens
gggcgacggtggcagcgccatggagccgggggaggtgaaggaccggatcctggagaacatctcgctgtcggtgaagaagttgcagagctattttgctgcatgtgaggatgagatccctgccatccggaaccatgacaaggtcctacagcgtctgtgtgagcacctggaccacgccctgctgtacggactgcaagacctctcctctggctactgggtgctcgtggtgcattttactcggagagaggccatcaagcagatcgaggtgctgcagcacgtggccaccaacctggggcgcagccgtgcctggctgtacctggccctcaacgagaactccttggagagctacctgcggttgttccaggagaacctgggcctgctgcataagtactacgtcaagaatgccctggtctgcagccacgatcacctgacgctcttcctgaccttggtgtccgggctagagttcattcgtttcgagctggatctggatgccccttacctagacctggccccctacatgcccgactactacaaacctcagtacctgctggactttgaagaccgccttcccagctcggtccacggctcagacagtctgtccctcaactctttcaactccgtcacctccaccaacctggagtgggatgacagtgcgattgccccatctagtgaggattatgattttggagatgtgtttccagcagtgccgtctgtacccagcacagactgggaagatggagacctcacagacacggtcagtggtccccgctccacagcctccgacctgaccagcagcaaggcctccaccaggagccccacccagcgccagaaccccttcaacgaggagccggcagagactgtgtcctcctctgacaccacccccgtgcacaccacctctcaggagaaggaggaggcccaggccctggacccgccggatgcctgcacggagctcgaggtcatcagggtcaccaagaagaagaaaattggcaagaagaaaaagagcagatcagatgaggaggcaagtccactccaccccgcctgcagccagaagaaatgtgccaagcagggggacggtgacagccgcaacggcagcccaagccttgggcgggactcgccagacactatgcttgcctccccccaggaggagggagaggggccgagcagcaccacggagagcagcgagcgctccgagccgggcctgctgatccctgagatgaaggacacctccatggagcgcttggggcagcccctgagcaaggttatcgaccagctcaacgggcagctggaccccagcacctggtgctcccgtgctgagcccccagaccagtcctttcggaccggctctcccggggatgccccggagaggccgccgctttgcgactttagtgaggggctttcagccccaatggacttctaccgctttaccgtcgagagtccaagcactgttacatcaggtggcggccaccatgaccctgcagggcttggccaaccgctgcatgttcctagtagccctgaggctgctggccaagaagaagagggaggaggaggagagggacagacgcctcggcccctagaggataccacgagggaggctcaggagctggaggcccagctgtccctggtcagggaggggcctgtgtctgagccagagcctgggacccaggaggttctctgccagctcaagcgagaccagcccagcccgtgtctgagtagcgctgaggattctggggtggatgagggacaggggagcccttcggagatggtccattcctcggagttcagagtagacaacaatcacctgctcctgctcatgatccacgtgttccgagaaaacgaagagcagctgttcaaaatgatccggatgagcaccgggcacatggagggcaacctgcagctgctgtacgtgctgctcacagactgctatgtctacctgctccggaaaggggccacagagaagccatacctggtggaagaggccgtttcttacaatgaacttgactatgtgtcggttggccttgaccagcagacggtgaagctggtgtgcaccaaccgcaggaagcagtttctgctggacacggctgatgtggcgctggctgagttctttttggcttctttgaagtcagccatgatcaaaggctgtcgagaacctccctaccccagcatcctgacggatgccaccatggagaagctggcactggccaaatttgtggcccaagaatcgaagtgtgaggcatctgctgtcaccgtgcgcttctacggccttgtgcactgggaggaccccacagacgagtccctgggccccacgccctgccactgctcaccccccgagggcaccatcaccaaagaaggcatgctgcactacaaggcgggcacctcctacctgggcaaggaacactggaagacgtgcttcgtggtgctcagcaacgggatcctctaccagtacccggaccgcaccgacgtcatccctctgctctcggtgaacatggggggggagcagtgcggtggctgccggagagccaacaccacggatcggccccacgccttccaggtcattctctccgaccggccctgcctggagctaagtgccgagagcgaggccgagatggccgagtggatgcagcatctctgccaggctgtgtccaaaggggtcatcccccagggcgtagctcccagcccctgcataccctgctgcctggtcctcacggatgaccgcctctttacgtgccatgaggattgccagaccagcttcttccgctctttgggcacagccaagctgggcgacatcagcgccatggggatcctcctagagtcagactc

SEQ ID NO: 426973 - DNA, 1116 bp, Homo sapiens
ttcccagggagagatggggagggcctgacaggggctccgtggccaaggcagaggcaggcctggtgcccacaagccctgaagactcctgtggccctcagtggccctcatctgttctctgcacgccccaacacaggtggacctcccccacacggcgatccaggaagcctccaacaagaagaaattcgaggatgccttgagcctcatccacagcgcctggcagcggagcgacagtctctgccgcggccgagcctcccgagacccctggtgctgaggcagagctggttggcgtccctggtgggcaggaaaggaaggcacgccagccggcaggcacactgtcacggctgttgtcatgctgtcgggagcctacagtccacccctgccctgggcggcagaaccaccgagtgtggcttaagacagggtccctccactccagggatccagatcaggtgcccggcacccctgggcatcctgcccgacaggtagcgaatggaggtcgctgggggcagagggtccgagccctgtgggctctgcggatgcacgccctcctcccgggcctccgcctcagtctgcagaatttctgccgagtggcaccgagaacaccatccatctaaggacgaacaaaagaaccaggagggcgggacccccctcttcctctcctgggttgggggctggggccctgagtgcccagccatccttgttcgtgtttgaacactctcctggccacgtggggaagcgggaacacggggtgtctgcgcatgtttcctcctcctagctccatcactgcgcacacagctgcctgcctcgccagatgcaggggggcgggcagccctccctggctgccaggaggctctgcatgcccacagtcctgccctgcctgtcccctcaacccggcagtgcctgtagcaccgaggagcaaagggggtggatggggggcttggagaagggcggagcccaccagcctggcatccatgttgacatcttctgactgtcccctgcttggctggagccaggcccttccctagagtttcgtcaagagcctcctggggaaggggtcaggtggtttgggttttgttttttaaaataaaatagacatgttatattgccaaaaaaaaaaaa

SEQ ID NO: 426974 - DNA, 1991 bp, Homo sapiens
gggcgacggtggcagcgccatggagccgggggaggtgaaggaccggatcctggagaacatctcgctgtcggtgaagaagttgcagagctattttgctgcatgtgaggatgagatccctgccatccggaaccatgacaaggtcctacagcgtctgtgtgagcacctggaccacgccctgctgtacggactgcaagacctctcctctggctactgggtgctcgtggtgcattttactcggagagaggccatcaagcagatcgaggtgctgcagcacgtggccaccaacctggggcgcagccgtgcctggctgtacctggccctcaacgagaactccttggagagctacctgcggttgttccaggagaacctgggcctgctgcataagtactacgtcaagaatgccctggtctgcagccacgatcacctgacgctcttcctgaccttggtgtccgggctagagttcattcgtttcgagctggatctggatgccccttacctagacctggccccctacatgcccgactactacaaacctcagtacctgctggactttgaagaccgccttcccagctcggtccacggctcagacagtctgtccctcaactctttcaactccgtcacctccaccaacctggagtgggatgacagtgcgattgccccatctagtgaggattatgattttggagatgtgtttccagcagtgccgtctgtacccagcacagactgggaagatggagacctcacagacacggtcagtggtccccgctccacagcctccgacctgaccagcagcaaggcctccaccaggagccccacccagcgccagaaccccttcaacgaggagccggcagagactgtgtcctcctctgacaccacccccgtgcacaccacctctcaggagaaggaggaggcccaggccctggacccgccggatgcctgcacggagctcgaggtcatcagggtcaccaagaagaagaaaattggcaagaagaaaaagagcagatcagatgaggaggcaagtccactccaccccgcctgcagccagaagaaatgtgccaagcagggggacggtgacagccgcaacggcagcccaagccttgggcgggactcgccagacactatgcttgcctccccccaggaggagggagaggggccgagcagcaccacggagagcagcgagcgctccgagccgggcctgctgatccctgagatgaaggacacctccatggagcgcttggggcagcccctgagcaaggttatcgaccagctcaacgggcagctggaccccagcacctggtgctcccgtgctgagcccccagaccagtcctttcggaccggctctcccggggatgccccggagaggccgccgctttgcgactttagtgaggggctttcagccccaatggacttctaccgctttaccgtcgagagtccaagcactgttacatcaggtggcggccaccatgaccctgcagggcttggccaaccgctgcatgttcctagtagccctgaggctgctggccaagaagaagagggaggaggaggagagggacagacgcctcgccatccttgttcgtgtttgaacactctcctggccacgtggggaagcgggaacacggggtgtctgcgcatgtttcctcctcctagctccatcactgcgcacacagctgcctgcctcgccagatgcaggggggcgggcagccctccctggctgccaggaggctctgcatgcccacagtcctgccctgcctgtcccctcaacccggcagtgcctgtagcaccgaggagcaaagggggtggatggggggcttggagaagggcggagcccaccagcctggcatccatgttgacatcttctgactgtcccctgcttggctggagccaggcccttccctagagtttcgtcaagagcctcctggggaaggggtcaggtggtttgggttttgttttttaaaataaaatagacatgttatattgccaaaaaaaaaaaa

SEQ ID NO: 426975 - DNA, 2498 bp, Homo sapiens
gggcgacggtggcagcgccatggagccgggggaggtgaaggaccggatcctggagaacatctcgctgtcggtgaagaagttgcagagctattttgctgcatgtgaggatgagatccctgccatccggaaccatgacaaggtcctacagcgtctgtgtgagcacctggaccacgccctgctgtacggactgcaagacctctcctctggctactgggtgctcgtggtgcattttactcggagagaggccatcaagcagatcgaggtgctgcagcacgtggccaccaacctggggcgcagccgtgcctggctgtacctggccctcaacgagaactccttggagagctacctgcggttgttccaggagaacctgggcctgctgcataagtactacgtcaagaatgccctggtctgcagccacgatcacctgacgctcttcctgaccttggtgtccgggctagagttcattcgtttcgagctggatctggatgccccttacctagacctggccccctacatgcccgactactacaaacctcagtacctgctggactttgaagaccgccttcccagctcggtccacggctcagacagtctgtccctcaactctttcaactccgtcacctccaccaacctggagtgggatgacagtgcgattgccccatctagtgaggattatgattttggagatgtgtttccagcagtgccgtctgtacccagcacagactgggaagatggagacctcacagacacggtcagtggtccccgctccacagcctccgacctgaccagcagcaaggcctccaccaggagccccacccagcgccagaaccccttcaacgaggagccggcagagactgtgtcctcctctgacaccacccccgtgcacaccacctctcaggagaaggaggaggcccaggccctggacccgccggatgcctgcacggagctcgaggtcatcagggtcaccaagaagaagaaaattggcaagaagaaaaagagcagatcagatgaggaggcaagtccactccaccccgcctgcagccagaagaaatgtgccaagcagggggacggtgacagccgcaacggcagcccaagccttgggcgggactcgccagacactatgcttgcctccccccaggaggagggagaggggccgagcagcaccacggagagcagcgagcgctccgagccgggcctgctgatccctgagatgaaggacacctccatggagcgcttggggcagcccctgagcaaggttatcgaccagctcaacgggcagctggaccccagcacctggtgctcccgtgctgagcccccagaccagtcctttcggaccggctctcccggggatgccccggagaggccgccgctttgcgactttagtgaggggctttcagccccaatggacttctaccgctttaccgtcgagagtccaagcactgttacatcaggtggcggccaccatgaccctgcagggcttggccaaccgctgcatgttcctagtagccctgaggctgctggccaagaagaagagggaggaggaggagagggacagacgcctcggcccctagaggataccacgagggaggctcaggagctggaggcccagctgtccctggtcagggaggggcctgtgtctgagccagagcctgggacccaggaggttctctgccagctcaagcgagaccagcccagcccgtgtctgagtagcgctgaggattctggggtggatgagggacaggggagcccttcggagatggtccattcctcggagttcagagtagacaacaatcacctgctcctgctcatgatccacgtgttccgagaaaacgaagagcagctgttcaaaatgatccggatgagcaccgggcacatggagggcaacctgcagctgctgtacgtgctgctcacagactgctatgtctacctgctccggaaaggggccacagagaagccatacctggtggaagaggccgtttcttacaatgaacttgactatgtgtcggttggccttgaccagcagacggtgaagctggtgtgcaccaaccgcaggaagcagtttctgctggacacggctgatgtggcgctggctgagttctttttggcttctttgaagtcagccatgatcaaaggctgtcgagaacctccctaccccagcatcctgacggatgccaccatggagaagctggcactggccaaatttgtggcccaagaatcgaagtgtgaggcatctgctgtcaccgtgcgcttctacggccttgtgcactgggaggaccccacagacgagtccctgggccccacgccctgccactgctcaccccccgagggcaccatcaccaaagaaggcatgctgcactacaaggcgggcaccaccaataagtattggtggtgctgcctctgctgagccacaatccaagaacctggattctgggcactgtgtcccggagcccagctcctcaggccagcgcctgtatcctgaggttttctatggcagtgct

SEQ ID NO: 426976 - DNA, 1911 bp, Homo sapiens
  misc_feature (1863)..(1863): n is a, c, g, or t
  misc_feature (1865)..(1865): n is a, c, g, or t
  misc_feature (1869)..(1870): n is a, c, g, or t
gggcgacggtggcagcgccatggagccgggggaggtgaaggaccggatcctggagaacatctcgctgtcggtgaagaagttgcagagctattttgctgcatgtgaggatgagatccctgccatccggaaccatgacaaggtcctacagcgtctgtgtgagcacctggaccacgccctgctgtacggactgcaagacctctcctctggctactgggtgctcgtggtgcattttactcggagagaggccatcaagcagatcgaggtgctgcagcacgtggccaccaacctggggcgcagccgtgcctggctgtacctggccctcaacgagaactccttggagagctacctgcggttgttccaggagaacctgggcctgctgcataagtactacgtcaagaatgccctggtctgcagccacgatcacctgacgctcttcctgaccttggtgtccgggctagagttcattcgtttcgagctggatctggatgccccttacctagacctggccccctacatgcccgactactacaaacctcagtacctgctggactttgaagaccgccttcccagctcggtccacggctcagacagtctgtccctcaactctttcaactccgtcacctccaccaacctggagtgggatgacagtgcgattgccccatctagtgaggattatgattttggagatgtgtttccagcagtgccgtctgtacccagcacagactgggaagatggagacctcacagacacggtcagtggtccccgctccacagcctccgacctgaccagcagcaaggcctccaccaggagccccacccagcgccagaaccccttcaacgaggagccggcagagactgtgtcctcctctgacaccacccccgtgcacaccacctctcaggagaaggaggaggcccaggccctggacccgccggatgcctgcacggagctcgaggtcatcagggtcaccaagaagaagaaaattggcaagaagaaaaagagcagatcagatgaggaggcaagtccactccaccccgcctgcagccagaagaaatgtgccaagcagggggacggtgacagccgcaacggcagcccaagccttgggcgggactcgccagacactatgcttgcctccccccaggaggagggagaggggccgagcagcaccacggagagcagcgagcgctccgagccgggcctgctgatccctgagatgaaggacacctccatggagcgcttggggcagcccctgagcaaggttatcgaccagctcaacgggcagctggaccccagcacctggtgctcccgtgctgagcccccagaccagtcctttcggaccggctctcccggggatgccccggagaggccgccgctttgcgactttagtgaggggctttcagccccaatggacttctaccgctttaccgtcgagagtccaagcactgttacatcaggtggcggccaccatgaccctgcagggcttggccaaccgctgcatgttcctagtagccctgaggctgctggccaagaagaagagggaggaggaggagagggacagacgcctcggcccctagaggataccacgagggaggctcaggagctggaggcccagctgtccctggtcagggaggggcctgtgtctgagccagagcctgggacccaggaggttctctgccagctcaagcgagaccagcccagcccgtgtctgagtagcgctgaggattctggggtggatgagggacaggggagcccttcggagatggtccattcctcggagttcagagtagacaacaatcacctgctcctgctcatgatccacgtgttccgagaaaacgaagagcagctgttcaaatgatccggatgagnancggnncatggagggtaagtgctcccgtaagatcctctaagtcacct

SEQ ID NO: 426977 - DNA, 347 bp, Homo sapiens
gccctctaagagagggggctgtgtctaagaaaatggggcagggggagggaaaagaggcctgtggggataataggccttggggtttcctctctcaggggccacagagaagccatacctggtggaagaggccgtttcttacaatgaacttgactatgtgtcggtgagtccaggccccgcagttgtgcgcctgctgtaggtacagggcttctcaagccacttacccatagaactgcagggcgaggcacggccccttactcccctcccggggttgggcaccaacttaactctcagagaggcttctgtacacgatgctgggggtaagaaccaagcttgaggttgcctcttcc

SEQ ID NO: 426978 - DNA, 354 bp, Homo sapiens
caaattgttgtgagctccggaggccccaggggtggtggagatggtgttccttccaagttgctcctaaagtacaaaaccccatgtcctgttaggttgtggcttctactcgaaatggggccacccctgtcaggtttccctgggaggaactggccagcctgcctccctcctgggctaacgcatgctctgggggtcggggaccccggggggtgcctgacagggtgtctcctgcttccttgtcctcccagatggagacctcacagacacggtcagtggtccccgctccacagcctccgacctgaccagcagcaaggcctccaccaggagccccacccagcgccagaaccccttcaacga

SEQ ID NO: 426979 - DNA, 367 bp, Homo sapiens
gctgcctggtcctcacggatgaccgcctctttacgtgccatgaggattgccagaccagcttcttccgctctttgggcacagccaagctgggcgacatcagcgccgtctccaccgagccgggcaaggagtactgcgtcttggtgagctttgagtgggggcggggctgcaaggcctgcagaaggaaagctctggctgctcacccgggggcctggctctccctaggagttctcccaggacagccagcagctcctcccgccctgggtcatctacctgagctgcacttctgaactggaccgattgctgtctgcactgaactctgggtggaaaaccatctatcaggtacccagctgcccaggaaacccattag

SEQ ID NO: 426980 - DNA, 1902 bp, Homo sapiens
gggcgacggtggcagcgccatggagccgggggaggtgaaggaccggatcctggagaacatctcgctgtcggtgaagaagttgcagagctattttgctgcatgtgaggatgagatccctgccatccggaaccatgacaaggtcctacagcgtctgtgtgagcacctggaccacgccctgctgtacggactgcaagacctctcctctggctactgggtgctcgtggtgcattttactcggagagaggccatcaagcagatcgaggtgctgcagcacgtggccaccaacctggggcgcagccgtgcctggctgtacctggccctcaacgagaactccttggagagctacctgcggttgttccaggagaacctgggcctgctgcataagtactacgtcaagaatgccctggtctgcagccacgatcacctgacgctcttcctgaccttggtgtccgggctagagttcattcgtttcgagctggatctggatgccccttacctagacctggccccctacatgcccgactactacaaacctcagtacctgctggactttgaagaccgccttcccagctcggtccacggctcagacagtctgtccctcaactctttcaactccgtcacctccaccaacctggagtgggatgacagtgcgattgccccatctagtgaggattatgattttggagatgtgtttccagcagtgccgtctgtacccagcacagactgggaagatggagacctcacagacacggtcagtggtccccgctccacagcctccgacctgaccagcagcaaggcctccaccaggagccccacccagcgccagaaccccttcaacgaggagccggcagagactgtgtcctcctctgacaccacccccgtgcacaccacctctcaggagaaggaggaggcccaggccctggacccgccggatgcctgcacggagctcgaggtcatcagggtcaccaagaagaagaaaattggcaagaagaaaaagagcagatcagatgaggaggcaagtccactccaccccgcctgcagccagaagaaatgtgccaagcagggggacggtgacagccgcaacggcagcccaagccttgggcgggactcgccagacactatgcttgcctccccccaggaggagggagaggggccgagcagcaccacggagagcagcgagcgctccgagccgggcctgctgatccctgagatgaaggacacctccatggagcgcttggggcagcccctgagcaaggttatcgaccagctcaacgggcagctggaccccagcacctggtgctcccgtgctgagcccccagaccagtcctttcggaccggctctcccggggatgccccggagaggccgccgctttgcgactttagtgaggggctttcagccccaatggacttctaccgctttaccgtcgagagtccaagcactgttacatcaggtggcggccaccatgaccctgcagggcttggccaaccgctgcatgttcctagtagccctgaggctgctggccaagaagaagagggaggaggaggagagggacagacgcctcggcccctagaggataccacgagggaggctcaggagctggaggcccagctgtccctggtcagggaggggcctgtgtctgagccagagcctgggacccaggaggttctctgccagctcaagcgagaccagcccagcccgtgtctgagtagcgctgaggattctggggtggatgagggacaggggagcccttcggagatggtccattcctcggagttcagagtagacaacaatcacctgctcctgctcatgatccacgtgttccgagaaaacgaagagcagctgttcaaatccggtggccggggctggggcacctggtgcgcggtgccacggtatacggccga

SEQ ID NO: 426981 - DNA, 1055 bp, Homo sapiens
gggcgacggtggcagcgccatggagccgggggaggtgaaggaccggatcctggagaacatctcgctgtcggtgaagaagttgcagagctattttgctgcatgtgaggatgagatccctgccatccggaaccatgacaaggtcctacagcgtctgtgtgagcacctggaccacgccctgctgtacggactgcaagacctctcctctggctactgggtgctcgtggtgcattttactcggagagaggccatcaagcagatcgaggtgctgcagcacgtggccaccaacctggggcgcagccgtgcctggctgtacctggccctcaacgagaactccttggagagctacctgcggttgttccaggagaacctgggcctgctgcataagtactacgtcaagaatgccctggtctgcagccacgatcacctgacgctcttcctgaccttggtgtccgggctagagttcattcgtttcgagctggatctggatgccccttacctagacctggccccctacatgcccgactactacaaacctcagtacctgctggactttgaagaccgccttcccagctcggtccacggctcagacagtctgtccctcaactctttcaactccgtcacctccaccaacctggagtgggatgacagtgcgattgccccatctagtgaggatggagacctcacagacacggtcagtggtccccgctccacagcctccgacctgaccagcagcaaggcctccaccaggagccccacccagcgccagaaccccttcaacgaggagccggcagagactgtgtcctcctctgacaccacccccgtgcacaccacctctcaggagaaggaggaggcccaggccctggacccgccggatgcctgcacggagctcgaggtcatcagggtcaccaagaagaagaaagaggatgccctaaatgagaccagggaatcagagacaaagctgaaggagctcccaggagtgtgcaatgagaccatgatggccctctgggaagagtgtaagccctgcctgaaacagacctgcatgaagttctacgcac

SEQ ID NO: 426982 - DNA, 3753 bp, Homo sapiens
cattttccccgcacaactgctaaagctccagagacacgagcgtgtgtggcagcaagagccgccagttcgggaccaccgcagctggggtggcagcggcgcaggaggggtcgcggggagggagtggtgagcgcaggcggcaggggtctgggaaagacgaagtcgctatttgctgtctgagcgcgctcgcagctcctggaagtgttgccgcctctcggtttcgctctcgctcgctgcgctcctagaaggggcggccgcctccaggtgacacagacgggactctcgcttgcgctttccagatgcatcagagatacttttggactgaccagggccaagtggcgctcggcgggcactacatggcggagggtgaagggtacttcgccatgtctgaggacgagctggcctgcagcccctacatccccctaggcggcgacttcggcggcggcgaccttcggcggcggcgacttcggcggcggcgacttcggcggtggcggcagcttcggtgggcattgcttggactattgcgaaagccctacggcgcactgcaatgtgctgaactgggagcaagtgcagcggctggacggcatcctgagcgagaccattccgattcacgggcgcggcaacttccccacgctcgagctgcagccgagcctgatcgtgaaggtggtgcggcggcgcctggccgagaagcgcattggcgtccgcgacgtgcgcctcaacggctcggcagccagccatgtcctgcaccaggacagcggcctgggctacaaggacctggacctcatcttctgcgccgacctgcgcggggaaggggagtttcagactgtgaaggacgtcgtgctggactgcctgttggacttcttacccgagggggtgaacaaagagaagatcacaccactcacgctcaaggaagcttatgtgcagaaaatggttaaagtgtgcaatgactctgaccgatggagtcttatatccctgtcaaacaacagtggcaaaaatgtggaactgaaatttgtggattccctccggaggcagtttgaattcagtgtagattcttttcaaatcaaattagactctcttctgctcttttatgaatgttcagagaacccaatgactgagacatttcaccccacaataatcggggagagcgtctatggcgatttccaggaagcctttgatcacctttgtaacaagatcattgccaccaggaacccagaggaaatccgagggggaggcctgcttaagtactgcaacctcttggtgaggggctttaggcccgcctctgatgaaatcaagacccttcaaaggtatatgtgttccaggtttttcatcgacttctcagacattggagagcagcagagaaaactggagtcctatttgcagaaccactttgtgggattggaagaccgcaagtatgagtatctcatgacccttcatggagtggtaaatgagagcacagtgtgcctgatgggacatgaaagaagacagactttaaaccttatcaccatgctggctatccgggtgttagctgaccaaaatgtcattcctaatgtggctaatgtcacttgctattaccagccagccccctatgtagcagatgccaactttagcaattactacattgcacaggttcagccagtattcacgtgccagcaacagacctactccacttggctaccctgcaattaagaatcatttaaaaatgtcctgtggggaagccatttcagacaagacaggagagaaaaaaaaaaaaaagaaaaaaaaaagagtgatccagcccttattagggatgtgttttgtgcaatgatgatatgctcctggttttaagtttggcaaagcttatgtatcttttaatagatgtgggagcatgatctcgaaaggatccttttcccttctcttattctcctacccaattggattctatcctgcaaaaaaagagagacctgtcattagaagcaaccaggttctcctgatacaagagaagaaatgtgtgatgacaatatgggtttgctgtatctgctcccatagctttgccataggaaaaaaaaaaagtggaaagtttcttttaagatggaattcataaaagggaaaatacggaggaaaaaaggtctcactccaacttgtgaatcagtttaggagttcagatattaatagtaacaatacaggaaaaaggggaactccaacgttgggattactgtctgaggcttgtagcaagtgctttctgtggaatgatcttgttttgctaacaaacggcttgctccaaatgaacagtagtaggttggtgcagttctcgtaacaatcagcagaacttatgatgacacaatccattaattccagctgcgtgcatagatcacatttttaaaatgtaaaaatgcaagcaaaaacagctgtaacaaagaaagtgtgctcaaggaccaaagatttaacagataaaaatacccaattagaagagatatagtagactatatgaagagagattatatttgttacacaccaatatacatcaaagtgcctgttgccttctgaaaatttgaagtggcaaaattattttatggtttaatgattattttattttatcagggactgcctcaagaagaaaataacataagcttgtgaatggtggagaaaatgccctattttttcttgcaaatacttgtataaagttaacatttgttgatctgatattatcataggtacatgtgtatgtgtgtataaattatatgtgtgtgtgtatatatacattttatatatacattttatatgtatatatacacagtagattgactatgatctagaataatgtctcaaataggaaatgtttaaatactgtgtgtttttatgttttcaacaggataacatgagacgtgggcatattgcaatgatgaattaaatccacatctaaaaaaattaaatgaaggagggaaccaagtaatatatttcataggaagagcagaaattatactgttttagtgggatttttttttctttttttttttttctttggtgagccataaaattccacaaatgggagaatatttgtttggcagagcactcttttttatattgaactgccattttgacagttggaacccatttattaaaaaaaaaattgcattcctctatgatgtttaatctagtggatcatggatcagtaataggctacttaaatccctgactgctaaaaaggatttccggtgatctaaacactacttgctaatgtttaaatgaattttaatgaatgcattctgcatttctggaccactagaatttagtaatgtgaaatgaccctttttacagaatatttgcacaattgcttaaaatttatatatgagatatatattatatataacattttataaatcatgtcaatatgaaacatctttgatctggttgtcacactgcatttaaatatttagtactgtactttaaatcgctttccattaaatcaaatccaactttattttctttcttacaaaaataccagttatacctttgtgaaatgaactggcattactatttcagttcaataacagctaatcctaaaaccaccctttctcctagccagtagttcctctagatactggtctctgaaaatgcatttgttaaaaacaaaacaaaactaacacataagaaccttccctttgtgttgtgaaacaaccacataatctccacaaccttagtggatgactgcttgctatgataattcctcgaagacccaattaggaagattttcatcatcagttaaagagagaccacggg

SEQ ID NO: 426983 - DNA, 3261 bp, Homo sapiens
cattttccccgcacaactgctaaagctccagagacacgagcgtgtgtggcagcaagagccgccagttcgggaccaccgcagctggggtggcagcggcgcaggaggggtcgcggggagggagtggtgagcgcaggcggcaggggtctgggaaagacgaagtcgctatttgctgtctgagcgcgctcgcagctcctggaagtgttgccgcctctcggtttcgctctcgctcgctgcgctcctagaaggggcggccgcctccaggtgacacagacgggactctcgcttgcgctttccagatgcatcagagatacttttggactgaccagggccaagtggcgctcggcgggcactacatggcggagggtgaagggtacttcgccatgtctgaggacgagctggcctgcagcccctacatccccctaggcggcgacttcggcggcggcgaccttcggcggcggcgacttcggcggcggcgacttcggcggtggcggcagcttcggtgggcattgcttggactattgcgaaagccctacggcgcactgcaatgtgctgaactgggagcaagtgcagcggctggacggcatcctgagcgagaccattccgattcacgggcgcggcaacttccccacgctcgagctgcagccgagcctgatcgtgaaggtggtgcggcggcgcctggccgagaagcgcattggcgtccgcgacgtgcgcctcaacggctcggcagccagccatgtcctgcaccaggacagcggcctgggctacaaggacctggacctcatcttctgcgccgacctgcgcggggaaggggagtttcagactgtgaaggacgtcgtgctggactgcctgttggacttcttacccgagggggtgaacaaagagaagatcacaccactcacgctcaaggaagcttatgtgcagaaaatggttaaagtgtgcaatgactctgaccgatggagtcttatatccctgtcaaacaacagtggcaaaaatgtggaactgaaatttgtggattccctccggaggcagtttgaattcagtgtagattcttttcaaatcaaattagactctcttctgctcttttatgaatgttcagagaacccaatgactgagacatttcaccccacaataatcggggagagcgtctatggcgatttccaggaagcctttgatcacctttgtaacaagatcattgccaccaggaacccagaggaaatccgagggggaggcctgcttaagtactgcaacctcttggtgaggggctttaggcccgcctctgatgaaatcaagacccttcaaaggtatatgtgttccaggtttttcatcgacttctcagacattggagagcagcagagaaaactggagtcctatttgcagaaccactttgtgggattggaagaccgcaagtatgagtatctcatgacccttcatggagtggtaaatgagagcacagtgtgcctgatgggacatgaaagaagacagactttaaaccttatcaccatgctggctatccgggtgttagctgaccaaaatgtcattcctaatgtggctaatgtcacttgctattaccagccagccccctatgtagcagatgccaactttagcaattactacattgcacaggttcagccagtattcacgtgccagcaacagacctactccacttggctaccctgcaattaagaatcatttaaaaatgtcctgtggggaagccatttcagacaagacaggagagaaaaaaaaaaaaaagaaaaaaaaaagagtgatccagcccttattagggatgtgttttgtgcaatgatgatatgctcctggttttaagtttggcaaagcttatgtatcttttaatagatgtgggagcatgatctcgaaaggatccttttcccttctcttattctcctacccaattggattctatcctgcaaaaaaagagagacctgtcattagaagcaaccaggttctcctgatacaagagaagaaatgtgtgatgacaatatgggtttgctgtatctgctcccatagctttgccataggaaaaaaaaaaagtggaaagtttcttttaagatggaattcataaaagggaaaatacggaggaaaaaaggtctcactccaacttgtgaatcagtttaggagttcagatattaatagtaacaatacaggaaaaaggggaactccaacgttgggattactgtctgaggcttgtagcaagtgctttctgtggaatgatcttgttttgctaacaaacggcttgctccaaatgaacagtagtaggttggtgcagttctcgtaacaatcagcagaacttatgatgacacaatccattaattccagctgcgtgcatagatcacatttttaaaatgtaaaaatgcaagcaaaaacagctgtaacaaagaaagtgtgctcaaggaccaaagatttaacagataaaaatacccaattagaagagatatagtagactatatgaagagagattatatttgttacacaccaatatacatcaaagtgcctgttgccttctgaaaatttgaagtggcaaaattattttatggtttaatgattattttattttatcagggactgcctcaagaagaaaataacataagcttgtgaatggtggagaaaatgccctattttttcttgcaaatacttgtataaagttaacatttgttgatctgatattatcataggtacatgtgtatgtgtgtataaattatatgtgtgtgtgtatatatacattttatatatacattttatatgtatatatacacagtagattgactatgatctagaataatgtctcaaataggaaatgtttaaatactgtgtgtttttatgttttcaacaggataacatgagacgtgggcatattgcaatgatgaattaaatccacatctaaaaaaattaaatgaaggagggaaccaagtaatatatttcataggaagagcagaaattatactgttttagtgggatttttttttctttttttttttttctttggtgagccataaaattccacaaatgggagaatatttgtttggcagagcactcttttttatattgaactgccattttgacagttggaacccatttattaaaaaaaaaattgcattcctctatgatgtttaatctagtggatcatggatcagtaataggctacttaaatccctgactgctaaaaaggatttccggtgatctcttaaattagtaagggaaatgaccttttacagattgcatgtaatatttgagttttttactttactg

SEQ ID NO: 426984 - DNA, 3682 bp, Homo sapiens
cattttccccgcacaactgctaaagctccagagacacgagcgtgtgtggcagcaagagccgccagttcgggaccaccgcagctggggtggcagcggcgcaggaggggtcgcggggagggagtggtgagcgcaggcggcaggggtctgggaaagacgaagtcgctatttgctgtctgagcgcgctcgcagctcctggaagtgttgccgcctctcggtttcgctctcgctcgctgcgctcctagaaggggcggccgcctccaggactgaccagggccaagtggcgctcggcgggcactacatggcggagggtgaagggtacttcgccatgtctgaggacgagctggcctgcagcccctacatccccctaggcggcgacttcggcggcggcgacttcggcggcggcgacttcggcggtggcggcagcttcggtgggcattgcttggactattgcgaaagccctacggcgcactgcaatgtgctgaactgggagcaagtgcagcggctggacggcatcctgagcgagaccattccgattcacgggcgcggcaacttccccacgctcgagctgcagccgagcctgatcgtgaaggtggtgcggcggcgcctggccgagaagcgcattggcgtccgcgacgtgcgcctcaacggctcggcagccagccatgtcctgcaccaggacagcggcctgggctacaaggacctggacctcatcttctgcgccgacctgcgcggggaaggggagtttcagactgtgaaggacgtcgtgctggactgcctgttggacttcttacccgagggggtgaacaaagagaagatcacaccactcacgctcaaggaagcttatgtgcagaaaatggttaaagtgtgcaatgactctgaccgatggagtcttatatccctgtcaaacaacagtggcaaaaatgtggaactgaaatttgtggattccctccggaggcagtttgaattcagtgtagattcttttcaaatcaaattagactctcttctgctcttttatgaatgttcagagaacccaatgactgagacatttcaccccacaataatcggggagagcgtctatggcgatttccaggaagcctttgatcacctttgtaacaagatcattgccaccaggaacccagaggaaatccgagggggaggcctgcttaagtactgcaacctcttggtgaggggctttaggcccgcctctgatgaaatcaagacccttcaaaggtatatgtgttccaggtttttcatcgacttctcagacattggagagcagcagagaaaactggagtcctatttgcagaaccactttgtgggattggaagaccgcaagtatgagtatctcatgacccttcatggagtggtaaatgagagcacagtgtgcctgatgggacatgaaagaagacagactttaaaccttatcaccatgctggctatccgggtgttagctgaccaaaatgtcattcctaatgtggctaatgtcacttgctattaccagccagccccctatgtagcagatgccaactttagcaattactacattgcacaggttcagccagtattcacgtgccagcaacagacctactccacttggctaccctgcaattaagaatcatttaaaaatgtcctgtggggaagccatttcagacaagacaggagagaaaaaaaaaaaaaagaaaaaaaaaagagtgatccagcccttattagggatgtgttttgtgcaatgatgatatgctcctggttttaagtttggcaaagcttatgtatcttttaatagatgtgggagcatgatctcgaaaggatccttttcccttctcttattctcctacccaattggattctatcctgcaaaaaaagagagacctgtcattagaagcaaccaggttctcctgatacaagagaagaaatgtgtgatgacaatatgggtttgctgtatctgctcccatagctttgccataggaaaaaaaaaaagtggaaagtttcttttaagatggaattcataaaagggaaaatacggaggaaaaaaggtctcactccaacttgtgaatcagtttaggagttcagatattaatagtaacaatacaggaaaaaggggaactccaacgttgggattactgtctgaggcttgtagcaagtgctttctgtggaatgatcttgttttgctaacaaacggcttgctccaaatgaacagtagtaggttggtgcagttctcgtaacaatcagcagaacttatgatgacacaatccattaattccagctgcgtgcatagatcacatttttaaaatgtaaaaatgcaagcaaaaacagctgtaacaaagaaagtgtgctcaaggaccaaagatttaacagataaaaatacccaattagaagagatatagtagactatatgaagagagattatatttgttacacaccaatatacatcaaagtgcctgttgccttctgaaaatttgaagtggcaaaattattttatggtttaatgattattttattttatcagggactgcctcaagaagaaaataacataagcttgtgaatggtggagaaaatgccctattttttcttgcaaatacttgtataaagttaacatttgttgatctgatattatcataggtacatgtgtatgtgtgtataaattatatgtgtgtgtgtatatatacattttatatatacattttatatgtatatatacacagtagattgactatgatctagaataatgtctcaaataggaaatgtttaaatactgtgtgtttttatgttttcaacaggataacatgagacgtgggcatattgcaatgatgaattaaatccacatctaaaaaaattaaatgaaggagggaaccaagtaatatatttcataggaagagcagaaattatactgttttagtgggatttttttttctttttttttttttctttggtgagccataaaattccacaaatgggagaatatttgtttggcagagcactcttttttatattgaactgccattttgacagttggaacccatttattaaaaaaaaaattgcattcctctatgatgtttaatctagtggatcatggatcagtaataggctacttaaatccctgactgctaaaaaggatttccggtgatctaaacactacttgctaatgtttaaatgaattttaatgaatgcattctgcatttctggaccactagaatttagtaatgtgaaatgaccctttttacagaatatttgcacaattgcttaaaatttatatatgagatatatattatatataacattttataaatcatgtcaatatgaaacatctttgatctggttgtcacactgcatttaaatatttagtactgtactttaaatcgctttccattaaatcaaatccaactttattttctttcttacaaaaataccagttatacctttgtgaaatgaactggcattactatttcagttcaataacagctaatcctaaaaccaccctttctcctagccagtagttcctctagatactggtctctgaaaatgcatttgttaaaaacaaaacaaaactaacacataagaaccttccctttgtgttgtgaaacaaccacataatctccacaaccttagtggatgactgcttgctatgataattcctcgaagacccaattaggaagattttcatcatcagttaaagagagaccacggg

SEQ ID NO: 426985 - DNA, 3560 bp, Homo sapiens
cattttccccgcacaactgctaaagctccagagacacgagcgtgtgtggcagcaagagccgccagttcgggaccaccgcagctggggtggcagcggcgcaggaggggtcgcggggagggagtggactgaccagggccaagtggcgctcggcgggcactacatggcggagggtgaagggtacttcgccatgtctgaggacgagctggcctgcagcccctacatccccctaggcggcgacttcggcggcggcgaccttcggcggcggcgacttcggcggcggcgacttcggcggtggcggcagcttcggtgggcattgcttggactattgcgaaagccctacggcgcactgcaatgtgctgaactgggagcaagtgcagcggctggacggcatcctgagcgagaccattccgattcacgggcgcggcaacttccccacgctcgagctgcagccgagcctgatcgtgaaggtggtgcggcggcgcctggccgagaagcgcattggcgtccgcgacgtgcgcctcaacggctcggcagccagccatgtcctgcaccaggacagcggcctgggctacaaggacctggacctcatcttctgcgccgacctgcgcggggaaggggagtttcagactgtgaaggacgtcgtgctggactgcctgttggacttcttacccgagggggtgaacaaagagaagatcacaccactcacgctcaaggaagcttatgtgcagaaaatggttaaagtgtgcaatgactctgaccgatggagtcttatatccctgtcaaacaacagtggcaaaaatgtggaactgaaatttgtggattccctccggaggcagtttgaattcagtgtagattcttttcaaatcaaattagactctcttctgctcttttatgaatgttcagagaacccaatgactgagacatttcaccccacaataatcggggagagcgtctatggcgatttccaggaagcctttgatcacctttgtaacaagatcattgccaccaggaacccagaggaaatccgagggggaggcctgcttaagtactgcaacctcttggtgaggggctttaggcccgcctctgatgaaatcaagacccttcaaaggtatatgtgttccaggtttttcatcgacttctcagacattggagagcagcagagaaaactggagtcctatttgcagaaccactttgtgggattggaagaccgcaagtatgagtatctcatgacccttcatggagtggtaaatgagagcacagtgtgcctgatgggacatgaaagaagacagactttaaaccttatcaccatgctggctatccgggtgttagctgaccaaaatgtcattcctaatgtggctaatgtcacttgctattaccagccagccccctatgtagcagatgccaactttagcaattactacattgcacaggttcagccagtattcacgtgccagcaacagacctactccacttggctaccctgcaattaagaatcatttaaaaatgtcctgtggggaagccatttcagacaagacaggagagaaaaaaaaaaaaaagaaaaaaaaaagagtgatccagcccttattagggatgtgttttgtgcaatgatgatatgctcctggttttaagtttggcaaagcttatgtatcttttaatagatgtgggagcatgatctcgaaaggatccttttcccttctcttattctcctacccaattggattctatcctgcaaaaaaagagagacctgtcattagaagcaaccaggttctcctgatacaagagaagaaatgtgtgatgacaatatgggtttgctgtatctgctcccatagctttgccataggaaaaaaaaaaagtggaaagtttcttttaagatggaattcataaaagggaaaatacggaggaaaaaaggtctcactccaacttgtgaatcagtttaggagttcagatattaatagtaacaatacaggaaaaaggggaactccaacgttgggattactgtctgaggcttgtagcaagtgctttctgtggaatgatcttgttttgctaacaaacggcttgctccaaatgaacagtagtaggttggtgcagttctcgtaacaatcagcagaacttatgatgacacaatccattaattccagctgcgtgcatagatcacatttttaaaatgtaaaaatgcaagcaaaaacagctgtaacaaagaaagtgtgctcaaggaccaaagatttaacagataaaaatacccaattagaagagatatagtagactatatgaagagagattatatttgttacacaccaatatacatcaaagtgcctgttgccttctgaaaatttgaagtggcaaaattattttatggtttaatgattattttattttatcagggactgcctcaagaagaaaataacataagcttgtgaatggtggagaaaatgccctattttttcttgcaaatacttgtataaagttaacatttgttgatctgatattatcataggtacatgtgtatgtgtgtataaattatatgtgtgtgtgtatatatacattttatatatacattttatatgtatatatacacagtagattgactatgatctagaataatgtctcaaataggaaatgtttaaatactgtgtgtttttatgttttcaacaggataacatgagacgtgggcatattgcaatgatgaattaaatccacatctaaaaaaattaaatgaaggagggaaccaagtaatatatttcataggaagagcagaaattatactgttttagtgggatttttttttctttttttttttttctttggtgagccataaaattccacaaatgggagaatatttgtttggcagagcactcttttttatattgaactgccattttgacagttggaacccatttattaaaaaaaaaattgcattcctctatgatgtttaatctagtggatcatggatcagtaataggctacttaaatccctgactgctaaaaaggatttccggtgatctaaacactacttgctaatgtttaaatgaattttaatgaatgcattctgcatttctggaccactagaatttagtaatgtgaaatgaccctttttacagaatatttgcacaattgcttaaaatttatatatgagatatatattatatataacattttataaatcatgtcaatatgaaacatctttgatctggttgtcacactgcatttaaatatttagtactgtactttaaatcgctttccattaaatcaaatccaactttattttctttcttacaaaaataccagttatacctttgtgaaatgaactggcattactatttcagttcaataacagctaatcctaaaaccaccctttctcctagccagtagttcctctagatactggtctctgaaaatgcatttgttaaaaacaaaacaaaactaacacataagaaccttccctttgtgttgtgaaacaaccacataatctccacaaccttagtggatgactgcttgctatgataattcctcgaagacccaattaggaagattttcatcatcagttaaagagagaccacggg

SEQ ID NO: 426986 - DNA, 487 bp, Homo sapiens
ccatgtcctgcaccaggacagcggcctgggctacaaggacctggacctcatcttctgcgccgacctgcgcggggaaggggagtttcagactgtgaaggacgtcgtgctggactgcctgttggacttcttacccgagggggtgaacaaagagaagatcacaccactcacgctcaaggtaacaccacccgagatgcacttgggtcctgacccagtctgggccgggtgtgacggggagcgggcagaggggcatcggttaaatgccatgaatctgtggccatcacgagtttgggcgcgcgttatttctttgatttttgattttttaaaccagtaaactgacgtgcgtggacggtgttgagtgtttcagtttacttgatgctttggcgctacaactcttctcccaggtcctcctctgccctctcttctcttctttctccttatgttttaactcttggctttccctgttggagtcttgtccagagtagattct

SEQ ID NO: 426987 - DNA, 1471 bp, Homo sapiens
tgccgggagctgggaagcccggcgcgcgtcgtttgctggggctgtttgtgcgttgctgctgtgctaccgcgttgcgttttctaggcatttacttacacgctttgtggtttacgctctcataaccttgtggttttatagtccttaaattattgtagcgcacgttacttaaatccagaagcagatgtgtaccccagcaagagataaaatgacgctcagagtcagtagatccagaccgtgcctgagatcctgaatcctgtttcctacccactattcagccattgggtcacaagcgatgaaaagagcaccttgaagatttgtggtctgcattatgtctggagccagaagtaagcttgctcttttcctctgcggctgttacgtggttgccctgggagcccacaccggggaggagagcgtggctgaccatcacgaggctgaatattatgtggctgccgtgtatgagcatccatccatcctgagtctgaaccctctggctctcatcagccgccaagaggccttggagctcatgaaccagaaccttgacatctatgaacagcaagtgatgactgcagcccaaaaggatgtacagattatagtgtttccagaagatggcattcatggattcaactttacaagaacatccatttatccatttttggacttcatgccgtctccccaggtggtcaggtggaacccatgcctggagcctcaccgcttcaatgacacagaggtgattcctgcctttttcctcagtaggctgagggtacacagaggtgatctaagtcagggaccagaagctgtgacatgttaactaagattgataggagaccttaacatccccaaaatccaacccaaactcccaaagatccatgtgccacatgttcattccattaaagaatgtctgacgttacaaggcagttattcatctatggatctttccatttattaattacacaataaatacaggaatgtatacttaaaccaaaccaaaagtaaaaaaagaaaagttcatcttcaccacagcctgcacctcatcccatgcccttgcttagagaaactgccatcaacaatttgatgtgcattcagttgtattcttttctatgcatttcatagttattgacatcctcttttttttttttttttttgagatggagtcttactctgccacccaggctggagcgcagtggcgcgatctcagctcactgcaagctctgccttccgggttcatgccattctcctgcctcagcctcccgagtagctgggactacaggcacccaccaccacgcccggctaattttttttgtgtgtgtatttttagtagagatggggtttcaccatgttagccaggatggtctcgatctcctgaccttgtgatctgtctacctcggcctgccaaagtgctgggattacaggcatgagccactgtgcctggccttgacatcctctttttaagcatactatatgcttattcatt

SEQ ID NO: 426988 - DNA, 1295 bp, Homo sapiens
gcctatgcaaagcagacagatttccccacgcagacgctgtgtgtcacagggggaatgggcagctgtcactttttacatccagtcatattgtatgaaattgcaagcaaattcaaaaagatgccatcgtgggagtgtgatttgtggtctgcattatgtctggagccagaagtaagcttgctcttttcctctgcggctgttacgtggttgccctgggagcccacaccggggaggagagcgtggctgaccatcacgaggctgaatattatgtggctgccgtgtatgagcatccatccatcctgagtctgaaccctctggctctcatcagccgccaagaggccttggagctcatgaaccagaaccttgacatctatgaacagcaagtgatgactgcagcccaaaaggatgtacagattatagtgtttccagaagatggcattcatggattcaactttacaagaacatccatttatccatttttggacttcatgccgtctccccaggtggtcaggtggaacccatgcctggagcctcaccgcttcaatgacacagaggtgattcctgcctttttcctcagtaggctgagggtacacagaggtgatctaagtcagggaccagaagctgtgacatgttaactaagattgataggagaccttaacatccccaaaatccaacccaaactcccaaagatccatgtgccacatgttcattccattaaagaatgtctgacgttacaaggcagttattcatctatggatctttccatttattaattacacaataaatacaggaatgtatacttaaaccaaaccaaaagtaaaaaaagaaaagttcatcttcaccacagcctgcacctcatcccatgcccttgcttagagaaactgccatcaacaatttgatgtgcattcagttgtattcttttctatgcatttcatagttattgacatcctcttttttttttttttttttgagatggagtcttactctgccacccaggctggagcgcagtggcgcgatctcagctcactgcaagctctgccttccgggttcatgccattctcctgcctcagcctcccgagtagctgggactacaggcacccaccaccacgcccggctaattttttttgtgtgtgtatttttagtagagatggggtttcaccatgttagccaggatggtctcgatctcctgaccttgtgatctgtctacctcggcctgccaaagtgctgggattacaggcatgagccactgtgcctggccttgacatcctctttttaagcatactatatgcttattcatt

SEQ ID NO: 426989 - DNA, 2099 bp, Homo sapiens
agaatgccagagggaggcgggactagcaggagattgctgcctatgcaaagcaggtaagaagccgaactctgaggcctctcgccattgtctccgagtcggccagctggagcgttttcggggctgtaaagggagaatggcgcatgcgcatattcagggcggaaggcgcgctaagagcagatttgtggtctgcattatgtctggagccagaagtaagcttgctcttttcctctgcggctgttacgtggttgccctgggagcccacaccggggaggagagcgtggctgaccatcacgaggctgaatattatgtggctgccgtgtatgagcatccatccatcctgagtctgaaccctctggctctcatcagccgccaagaggccttggagctcatgaaccagaaccttgacatctatgaacagcaagtgatgactgcagcccaaaaggatgtacagattatagtgtttccagaagatggcattcatggattcaactttacaagaacatccatttatccatttttggacttcatgccgtctccccaggtggtcaggtggaacccatgcctggagcctcaccgcttcaatgacacagaggtgctccagcgcctgagttgtatggccatcaggggagatatgttcttggtggccaatcttgggacaaaggagccttgtcatagcagtgacccaaggtgcccaaaagatgggagataccagttcaacacaaatgtcgtgttcagcaataatggaacccttgttgaccgctaccgtaaacacaacctctactttgaggcagcattcgatgttcctcttaaagtggatctcatcacctttgataccccctttgctggcaggtttggcatcttcacatgctttgatatattgttctttgaccctgccatcagagtcctcagagactacaaggtgaagcatgttgtgtacccaactgcctggatgaaccagctcccactcttggcagcaattgagattcagaaagcttttgctgttgcctttggcatcaacgttctggcagctaatgtccaccacccagttctggggatgacaggaagtggcatacacacccctctggagtccttttggtaccatgacatggaaaatcccaaaagtcaccttataattgcccaggtggccaaaaatccagtgggtctcattggtgcagagaatgcaacaggtgaaacggacccatcccatagtaagtttttaaaaattttgtcaggcgatccgtactgtgagaaggatgctcaggaagtccactgtgatgaggccaccaagtggaacgtgaatgctcctcccacatttcactctgagatgatgtatgacaatttcaccctggtccctgtctggggaaaggaaggctatctccacgtctgttccaatggcctctgctgttatttactttacgagaggcccaccttatccaaagagctgtatgccctgggggtctttgatgggcttcacacagtacatggcacttactacatccaagtgtgtgccctggtcaggtgtgggggtcttggcttcgacacctgtggacaggaaatcacagaggccacggggatatttgagtttcacctgtggggcaacttcagtacttcctatatctttcctttgtttctgacctcagggatgaccctagaagtccctgaccagcttggctgggagaatgaccactatttcctgaggaaaagtaggctgtcctctgggctggtgacggcggctctctatgggcgcttgtatgagagggactaggaaaagtgtgtggtctgtggggcggactctggccatcatgttgacagccttgcacttccacaggctacaagccctgggaccatctttctgccttaagggcaggagcccacttctgtggcaccagattccaccctgggaactgtggaaaaagtaggagaggcagattccctcagtgtcttcctcttaaacctcaatcatcgagacattagggggtattttctgttcacatttatctttttcaagccacatcttcctctaacaaatctctcagtatgcgattggtctcaagctaaaacaaaaataaatgtcagtttatattttacacatccacaaa

SEQ ID NO: 426990 - DNA, 2234 bp, Homo sapiens
tgccgggagctgggaagcccggcgcgcgtcgtttgctggggctgtttgtgcgttgctgctgtgctaccgcgttgcgttttctaggcatttacttacacgctttgtggtttacgctctcataaccttgtggttttatagtccttaaattattgtagcgcacgttacttaaatccagaagcagatgtgtaccccagcaagagataaaatgacgctcagagtcagtagatccagaccgtgcctgagatcctgaatcctgtttcctacccactattcagccattgggtcacaagcgatgaaaagagcaccttgaagatttgtggtctgcattatgtctggagccagaagtaagcttgctcttttcctctgcggctgttacgtggttgccctgggagcccacaccggggaggagagcgtggctgaccatcacgaggctgaatattatgtggctgccgtgtatgagcatccatccatcctgagtctgaaccctctggctctcatcagccgccaagaggccttggagctcatgaaccagaaccttgacatctatgaacagcaagtgatgactgcagcccaaaaggatgtacagattatagtgtttccagaagatggcattcatggattcaactttacaagaacatccatttatccatttttggacttcatgccgtctccccaggtggtcaggtggaacccatgcctggagcctcaccgcttcaatgacacagaggtgctccagcgcctgagttgtatggccatcaggggagatatgttcttggtggccaatcttgggacaaaggagccttgtcatagcagtgacccaaggtgcccaaaagatgggagataccagttcaacacaaatgtcgtgttcagcaataatggaacccttgttgaccgctaccgtaaacacaacctctactttgaggcagcattcgatgttcctcttaaagtggatctcatcacctttgataccccctttgctggcaggtttggcatcttcacatgctttgatatattgttctttgaccctgccatcagagtcctcagagactacaaggtgaagcatgttgtgtacccaactgcctggatgaaccagctcccactcttggcagcaattgagattcagaaagcttttgctgttgcctttggcatcaacgttctggcagctaatgtccaccacccagttctggggatgacaggaagtggcatacacacccctctggagtccttttggtaccatgacatggaaaatcccaaaagtcaccttataattgcccaggtggccaaaaatccagtgggtctcattggtgcagagaatgcaacaggtgaaacggacccatcccatagtaagtttttaaaaattttgtcaggcgatccgtactgtgagaaggatgctcaggaagtccactgtgatgaggccaccaagtggaacgtgaatgctcctcccacatttcactctgagatgatgtatgacaatttcaccctggtccctgtctggggaaaggaaggctatctccacgtctgttccaatggcctctgctgttatttactttacgagaggcccaccttatccaaagagctgtatgccctgggggtctttgatgggcttcacacagtacatggcacttactacatccaagtgtgtgccctggtcaggtgtgggggtcttggcttcgacacctgtggacaggaaatcacagaggccacggggatatttgagtttcacctgtggggcaacttcagtacttcctatatctttcctttgtttctgacctcagggatgaccctagaagtccctgaccagcttggctgggagaatgaccactatttcctgaggaaaagtaggctgtcctctgggctggtgacggcggctctctatgggcgcttgtatgagagggactaggaaaagtgtgtggtctgtggggcggactctggccatcatgttgacagccttgcacttccacaggctacaagccctgggaccatctttctgccttaagggcaggagcccacttctgtggcaccagattccaccctgggaactgtggaaaaagtaggagaggcagattccctcagtgtcttcctcttaaacctcaatcatcgagacattagggggtattttctgttcacatttatctttttcaagccacatcttcctctaacaaatctctcagtatgcgattggtctcaagctaaaacaaaaataaatgtcagtttatattttacacatccacaaa

SEQ ID NO: 426991 - DNA, 1975 bp, Homo sapiens
agaatgccagagggaggcgggactagcaggagattgctgcctatgcaaagcagatttgtggtctgcattatgtctggagccagaagtaagcttgctcttttcctctgcggctgttacgtggttgccctgggagcccacaccggggaggagagcgtggctgaccatcacgaggctgaatattatgtggctgccgtgtatgagcatccatccatcctgagtctgaaccctctggctctcatcagccgccaagaggccttggagctcatgaaccagaaccttgacatctatgaacagcaagtgatgactgcagcccaaaaggatgtacagattatagtgtttccagaagatggcattcatggattcaactttacaagaacatccatttatccatttttggacttcatgccgtctccccaggtggtcaggtggaacccatgcctggagcctcaccgcttcaatgacacagaggtgctccagcgcctgagttgtatggccatcaggggagatatgttcttggtggccaatcttgggacaaaggagccttgtcatagcagtgacccaaggtgcccaaaagatgggagataccagttcaacacaaatgtcgtgttcagcaataatggaacccttgttgaccgctaccgtaaacacaacctctactttgaggcagcattcgatgttcctcttaaagtggatctcatcacctttgataccccctttgctggcaggtttggcatcttcacatgctttgatatattgttctttgaccctgccatcagagtcctcagagactacaaggtgaagcatgttgtgtacccaactgcctggatgaaccagctcccactcttggcagcaattgagattcagaaagcttttgctgttgcctttggcatcaacgttctggcagctaatgtccaccacccagttctggggatgacaggaagtggcatacacacccctctggagtccttttggtaccatgacatggaaaatcccaaaagtcaccttataattgcccaggtggccaaaaatccagtgggtctcattggtgcagagaatgcaacaggtgaaacggacccatcccatagtaagtttttaaaaattttgtcaggcgatccgtactgtgagaaggatgctcaggaagtccactgtgatgaggccaccaagtggaacgtgaatgctcctcccacatttcactctgagatgatgtatgacaatttcaccctggtccctgtctggggaaaggaaggctatctccacgtctgttccaatggcctctgctgttatttactttacgagaggcccaccttatccaaagagctgtatgccctgggggtctttgatgggcttcacacagtacatggcacttactacatccaagtgtgtgccctggtcaggtgtgggggtcttggcttcgacacctgtggacaggaaatcacagaggccacggggatatttgagtttcacctgtggggcaacttcagtacttcctatatctttcctttgtttctgacctcagggatgaccctagaagtccctgaccagcttggctgggagaatgaccactatttcctgaggaaaagtaggctgtcctctgggctggtgacggcggctctctatgggcgcttgtatgagagggactaggaaaagtgtgtggtctgtggggcggactctggccatcatgttgacagccttgcacttccacaggctacaagccctgggaccatctttctgccttaagggcaggagcccacttctgtggcaccagattccaccctgggaactgtggaaaaagtaggagaggcagattccctcagtgtcttcctcttaaacctcaatcatcgagacattagggggtattttctgttcacatttatctttttcaagccacatcttcctctaacaaatctctcagtatgcgattggtctcaagctaaaacaaaaataaatgtcagtttatattttacacatccacaaa

SEQ ID NO: 426992 - DNA, 1728 bp, Homo sapiens
agaatgccagagggaggcgggactagcaggagattgctgcctatgcaaagcaggtaagaagccgaactctgaggcctctcgccattgtctccgagtcggccagctggagcgttttcggggctgtaaagggagaatggcgcatgcgcatattcagggcggaaggcgcgctaagagcagatttgtggtctgcattatgtctggagccagaagtaagcttgctcttttcctctgcggctgttacgtggttgccctgggagcccacaccggggaggagagcgtggctgaccatcacgaggctgaatattatgtggctgccgtgtatgagcatccatccatcctgagtctgaaccctctggctctcatcagccgccaagaggccttggagctcatgaaccagaaccttgacatctatgaacagcaagtgatgactgcagcccaaaaggatgtacagattatagtgtttccagaagatggcattcatggattcaactttacaagaacatccatttatccatttttggacttcatgccgtctccccaggtggtcaggtggaacccatgcctggagcctcaccgcttcaatgacacagaggtgctccagcgcctgagttgtatggccatcaggggagatatgttcttggtggccaatcttgggacaaaggagccttgtcatagcagtgacccaaggtgcccaaaagatgggagataccagttcaacacaaatgtcgtgttcagcaataatggaacccttgttgaccgctaccgtaaacacaacctctactttgaggcagcattcgatgttcctcttaaagtggatctcatcacctttgataccccctttgctggcaggtttggcatcttcacatgctttgatatattgttctttgaccctgccatcagagtcctcagagactacaaggtgaagcatgttgtgtacccaactgcctggatgaaccagctcccactcttggcagcaattgagattcagaaagcttttgctgttgcctttggcatcaacgttctggcagctaatgtccaccacccagttctggggatgacaggaagtggcatacacacccctctggagtccttttggtaccatgacatggaaaatcccaaaagtcaccttataattgcccaggtggccaaaaatccagtgggtctcattggtgcagagaatgcaacaggtgaaacggacggggatatttgagtttcacctgtggggcaacttcagtacttcctatatctttcctttgtttctgacctcagggatgaccctagaagtccctgaccagcttggctgggagaatgaccactatttcctgaggaaaagtaggctgtcctctgggctggtgacggcggctctctatgggcgcttgtatgagagggactaggaaaagtgtgtggtctgtggggcggactctggccatcatgttgacagccttgcacttccacaggctacaagccctgggaccatctttctgccttaagggcaggagcccacttctgtggcaccagattccaccctgggaactgtggaaaaagtaggagaggcagattccctcagtgtcttcctcttaaacctcaatcatcgagacattagggggtattttctgttcacatttatctttttcaagccacatcttcctctaacaaatctctcagtatgcgattggtctcaagctaaaacaaaaataaatgtcagtttatattttacacatccacaaa

SEQ ID NO: 426993 - DNA, 1336 bp, Homo sapiens
agaatgccagagggaggcgggactagcaggagattgctgcctatgcaaagcaggtaagaagccgaactctgaggcctctcgccattgtctccgagtcggccagctggagcgttttcggggctgtaaagggagaatggcgcatgcgcatattcagggcggaaggcgcgctaagagcagatttgtggtctgcattatgtctggagccagaagtaagcttgctcttttcctctgcggctgttacgtggttgccctgggagcccacaccggggaggagagcgtggctgaccatcacgaggctgaatattatgtggctgccgtgtatgagcatccatccatcctgagtctgaaccctctggctctcatcagccgccaagaggccttggagctcatgaaccagaaccttgacatctatgaacagcaagtgatgactgcagcccaaaaggatgtacagattatagtgtttccagaagatggcattcatggattcaactttacaagaacatccatttatccatttttggacttcatgccgtctccccaggtggtcaggtggaacccatgcctggagcctcaccgcttcaatgacacagaggtgattcctgcctttttcctcagtaggctgagggtacacagaggtgatctaagtcagggaccagaagctgtgacatgttaactaagattgataggagaccttaacatccccaaaatccaacccaaactcccaaagatccatgtgccacatgttcattccattaaagaatgtctgacgttacaaggcagttattcatctatggatctttccatttattaattacacaataaatacaggaatgtatacttaaaccaaaccaaaagtaaaaaaagaaaagttcatcttcaccacagcctgcacctcatcccatgcccttgcttagagaaactgccatcaacaatttgatgtgcattcagttgtattcttttctatgcatttcatagttattgacatcctcttttttttttttttttttgagatggagtcttactctgccacccaggctggagcgcagtggcgcgatctcagctcactgcaagctctgccttccgggttcatgccattctcctgcctcagcctcccgagtagctgggactacaggcacccaccaccacgcccggctaattttttttgtgtgtgtatttttagtagagatggggtttcaccatgttagccaggatggtctcgatctcctgaccttgtgatctgtctacctcggcctgccaaagtgctgggattacaggcatgagccactgtgcctggccttgacatcctctttttaagcatactatatgcttattcatt

SEQ ID NO: 426994 - DNA, 543 bp, Homo sapiens
agaatgccagagggaggcgggactagcaggagattgctgcctatgcaaagcaggtaagaagccgaactctgaggcctctcgccattgtctccgagtcggccagctggagcgttttcggggctgtaaagggagaatggcgcatgcgcatattcagggcggaaggcgcgctaagagcagatttgtggtctgcattatgtctggagccagaagtaagcttgctcttttcctctgcggactctggccatcatgttgacagccttgcacttccacaggctacaagccctgggaccatctttctgccttaagggcaggagcccacttctgtggcaccagattccaccctgggaactgtggaaaaagtaggagaggcagattccctcagtgtcttcctcttaaacctcaatcatcgagacattagggggtattttctgttcacatttatctttttcaagccacatcttcctctaacaaatctctcagtatgcgattggtctcaagctaaaacaaaaataaatgtcagtttatattttacacatccacaaa

SEQ ID NO: 426995 - DNA, 393 bp, Homo sapiens
agtaggagaggcagattccctcagtgtcttcctcttaaacctcaatcatcgagacattagggggtattttctgttcacatttatctttttcaagccacatcttcctctaacaaatctctcagtatgcgattggtctcaagctaaaacaaaaataaatgtcagtttatattttacacatccacaaagcagtggcttggggtttttttttttttttttatcttgttgatcaagtgacacccaggacatgtaaatatttcataagccttaaacatttcctgaggtaagaaacaagctctcaaagcaaaagctcaattagaaatggcccttgtggggaaccttcccattctggtcgaccagaactctagccagatgaaatggcaatgctagcgccac

SEQ ID NO: 426996 - DNA, 2013 bp, Homo sapiens
  misc_feature (3)..(3): n is a, c, g, or t
ggnagagggccgtgcccgcggagagagcgcggcgcgggaggccggcggccggccggctgcatggcgcgctgcgagaggctgcgcggagcggccctgcgcgacgtgctgggccgggcgcagggggtcctgttcgactgtgacggggtgctgtggaacggcgagcgcgccgtgccgggcgccccggagctgctggagcggctggcgcgggccggcaaggcggctctgtttgtgagcaacaacagccggcgcgcgcggcccgagctggccctgcgcttcgcgcgcctcggcttcggggggctgcgcgccgagcagctcttcagctccgcgctgtgcgccgcgcgcctgctgcgccagcgcctgcccgggcctccggacgcgccgggcgccgtgttcgtgctgggcggcgaggggctgcgcgccgagctgcgcgccgcggggctgcgcctggccggggacccgagcgcgggggacggcgcggccccgcgcgtgcgcgccgtgcttgtgggctacgacgagcacttctccttcgccaagctgagggaggcgtgcgcgcacctgcgcgaccccgagtgcctactcgtggccaccgaccgtgacccatggcacccgctgagcgacggcagccggacccctggcaccgggagcctggccgctgcagtggagacagcctcgggacgccaggccctggtggtgggcaagcccagcccctacatgttcgagtgcatcacggagaacttcagcatcgaccccgcacgcacgcttatggtgggtgaccgcctggagaccgacatcctctttggccaccgctgcggcatgaccactgtgctcacgctcacaggagtctcccgcctagaagaggcccaggcctacctagcggccggccagcacgacctcgtgccccattactatgtggagagcatcgcagacttgacagaggggttggaggactgagcccactgcacctgcagccacaggcccacccctccccactccctgatcccgtaggtggaggcgatgggtcacgagccatgttaagcacaaccggctccttggtccagttctgcaccggggtggggctgggacccggggaaggtttgagggcccttgcaaccccctcccagcagtggctgggcactctttgctgccccagaagctggtcccctatggattcatcttggcctgacccagccaggtggccttatttcttccctgtcacctcccctccttgaaatctgggccctggtgcctgctgaagattccctctatccctgagtacttagtcttctcccccttccctggggcttctagagctctctctgcccctcaggtcctggcccttgggtccttgtcaaccagaggtctagggaaccacaacccttattgtcctgggtggaccaatccaaaggctaagtgatagtgactcatcaatgttgggtcctgtggggtaccagtttaggttcctaagtaatagtgaccctttcacgtcctggagcccgagtggaccaatcggaagcctaagtgacgatgaccctcgcatgtcctaggtccctgggtggacccatcaggaccccaagtgatagtgacccagtggtcttttagatcctcagtagaacagtccagaagcctgagagacagtggccccttgataatctgggtctcacgggaccagctaggggtccaggtttcagtcagtaaataagagtggtccacgtcctaaagacacctctcctttacaaagacttgtgatgctctggggcttctgtggccaagccccaccctttcctggtcatggtacccgtacagcgttgatggccacagctcgaaggggggctttcgtgtccccctgtgcggtcagtgttttcagtaccacctctctcccgtgcccacttggctatttacttatttatttattgtgtgccagtgatggtgggtgggggctgggccttccccgccacctccacccctgttgtgacctgtccttccgtacttaataaagtgcgcgtgggagtgttc

SEQ ID NO: 426997 - DNA, 1952 bp, Homo sapiens
  misc_feature (3)..(3): n is a, c, g, or t
ggnagagggccgtgcccgcggagagagcgcggcgcgggaggccggcggccggccggctgcatggcgcgctgcgagaggctgcgcggagcggccctgcgcgacgtgctgggccgggcgcagggggtcctgttcgactgtgacggggtgctgtggaacggcgagcgcgccgtgccgggcgccccggagctgctggagcggctggcgcgggccggcaaggcggctctgtttgtgagcaacaacagccggcgcgcgcggcccgagctggccctgcgcttcgcgcgcctcggcttcggggggctgcgcgccgagcagctcttcagctccgcgctgtgcgccgcgcgcctgctgcgccagcgcctgcccgggcctccggacgcgccgggcgccgtgttcgtgctgggcggcgaggggctgcgcgccgagctgcgcgccgcggggctgcgcctggccggggacccgagcgcgggggacggcgcggccccgcgcgtgcgcgccgtgcttgtgggctacgacgagcacttctccttcgccaagctgagggaggcgtgcgcgcacctgcgcgaccccgagtgcctactcgtggccaccgaccgtgacccatggcacccgctgagcgacggcagccggacccctggcaccgggagcctggccgctgcagtggagacagcctcgggacgccaggccctggtggtgggcaagcccagcccctacatgttcgagtgcatcacggagaacttcagcatcgaccccgcacgcacgcttatggtgggtgaccgcctggagaccgacatcctctttggccaccgctgcggcatgaccactgtgctcacgctcacaggagtctcccgcctagaagaggcccaggcctacctagcggccggccagcacgacctcgtgccccattactatgtggagagcatcgcagacttgacagaggggttggaggactgagcccactgcacctgcagccacaggcccacccctccccactccctgatcccgtaggtggaggcgatgggtcacgagccatgttaagcacaaccggctccttggtccagttctgcaccggggtggggctgggacccggggaaggtttgagggcccttgcaaccccctcccagcagtggctgggcactctttgctgccccagaagctggtcccctatggattcatcttggcctgacccagccaggtggccttatttcttccctgtcacctcccctccttgaaatctgggccctggtgcctgctgaagattccctctatccctgagtacttagtcttctcccccttccctggggcttctagagctctctctgcccctcaggtcctggcccttgggtccttgtcaaccagaggtctagggaaccacaacccttattgtcctgggtggaccaatccaaaggctaagtgatagtgactcatcaatgttgggtcctgtggggtaccagtttaggttcctaagtaatagtgaccctttcacgtcctggagcccgagtggaccaatcggaagcctaagtgacgatgaccctcgcatgtcctaggtccctgggtggacccatcaggaccccaagtgatagtgacccagtggtcttttagatcctcagtagaacagtccaggtttcagtcagtaaataagagtggtccacgtcctaaagacacctctcctttacaaagacttgtgatgctctggggcttctgtggccaagccccaccctttcctggtcatggtacccgtacagcgttgatggccacagctcgaaggggggctttcgtgtccccctgtgcggtcagtgttttcagtaccacctctctcccgtgcccacttggctatttacttatttatttattgtgtgccagtgatggtgggtgggggctgggccttccccgccacctccacccctgttgtgacctgtccttccgtacttaataaagtgcgcgtgggagtgttc

SEQ ID NO: 426998 - DNA, 2377 bp, Homo sapiens
  misc_feature (3)..(3): n is a, c, g, or t
ggnagagggccgtgcccgcggagagagcgcggcgcgggaggccggcggccggccggctgcatggcgcgctgcgagaggctgcgcggagcggccctgcgcgacgtgctgggccgggcgcagggggtcctgttcgactgtgacggggtgctgtggaacggcgagcgcgccgtgccgggcgccccggagctgctggagcggctggcgcgggccggcaaggcggctctgtttgtgagcaacaacagccggcgcgcgcggcccgagctggccctgcgcttcgcgcgcctcggcttcggggggctgcgcgccgagcagctcttcagctccgcgctgtgcgccgcgcgcctgctgcgccagcgcctgcccgggcctccggacgcgccgggcgccgtgttcgtgctgggcggcgaggggctgcgcgccgagctgcgcgccgcggggctgcgcctggccggggacccgagcgcgggggacggcgcggccccgcgcgtgcgcgccgtgcttgtgggctacgacgagcacttctccttcgccaagctgagggaggcgtgcgcgcacctgcgcgaccccgagtgcctactcgtggccaccgaccgtgacccatggcacccgctgagcgacggcagccggacccctggcaccgggagcctggccgctgcagtggagacagcctcgggacgccaggccctggtggtgggcaagcccagcccctacatgttcgagtgcatcacggagaacttcagcatcgaccccgcacgcacgcttatggtgggtgaccgcctggagaccgacatcctctttggccaccgctgcggcatgaccactgtgctcacgctcacaggagtctcccgcctagaagaggcccaggcctacctagcggccggccagcacgacctcgtgccccattactatgtggagagcatcgcagacttgacagaggggttggaggactgagcccactgcacctgcagccacaggcccacccctccccactccctgatcccgtaggtggaggcgatgggtcacgagccatgttaagcacaaccggctccttggtccagttctgcaccggggtggggctgggacccggggaaggtttgagggcccttgcaaccccctcccagcagtggctgggcactctttgctgccccagaagctggtcccctatggattcatcttggcctgacccagccaggtggccttatttcttccctgtcacctcccctccttgaaatctgggccctggtgcctgctgaagattccctctatccctgagtacttagtcttctcccccttccctggggcttctagagctctctctgcccctcaggtcctggcccttgggtccttgtcaaccagaggtctagggaaccacaacccttattgtcctgggtggaccaatccaaaggctaagtgatagtgactcatcaatgttgggtcctgtggggtaccagtttaggttcctaagtaatagtgaccctttcacgtcctggagcccgagtggaccaatcggaagcctaagtgacgatgaccctcgcatgtcctaggtccctgggtggacccatcaggaccccaagtgatagtgacccagtggtcttttagatcctcagtagaacagtccagaagcctgagagacagtggccccttgataatctgggtctcacgggaccagctaggggtccaggtttcagtcagtaaataagagtggtccacgtcctaaagacacctctcctttacaaagacttgtgatgctctggggcttctgtggccaagccccaccctttcctggtcatggtacccgtacagcgttgatggccacagctcgaaggggggctttcgtgtccccctgtgcggtcagtgttttcagtaccacctctctcccgtgcccacttggctatttacttatttatttattgtgtgccagtgatggtgggtgggggctgggccttccccgccacctccacccctgttgtgacctgtccttccgtacttaataaagtgcgcgtgggagtgttcaaaaaaaaaaacaacacccgaaccccaaagcgcacacccccacacacccccaaccgcacagcaccaccacacaaaagggaggccggcgacacaaacaagcacaagccaggaggcgccaccacgaacaacgcagacacaacacaccggagcgacgcagagaacacaacagggcgcccccaacaaacacgacggccaagccacctacgcaaaagaggagagacaccggagaccggaggtagacagacacacgccggggcgcagggaacaaaaacacagcagcacacggccgactctttccgtgcagacgcacgaaccgccaaagctccgggaaggcacgacgaccaaaagaggcggacaaacggac

SEQ ID NO: 426999 - DNA, 2877 bp, Homo sapiens
cgcgccgtgcgttcgccctgcgatcccgctcactcttggcgccttcgcggaaggtgcgtccgagccatggccgctgccaacccgtgggacccggcgtccgcgcctaacggcgctgggctagtgctaggccacttcatagcttcggggatggtcaatcagaaaaacctggaaattgaactcctgaaactagaaaaagatacagcagatgttgttcatcctttctttttggagatgaagtcttgctatgttgcccaggctggtctcgaactcatggcctcaattctcccgtttcagtctcccaaaacactgcgattacagctcagaagtgtcatactctgcaaagcatgaataatcatttggaagcagtgctgaaagagaagagatcccttaggcaaagactgttgaaacccatgtgccaggaaaacttacctattgaagctgtttatcacagatatatggtacatttgctggagttggctgtgactttcattgagagattagaaacccaccttgaaacaattagaaatattcctcatttagctgcaaatctaaagaaaatgaaccaggctttagcaaagatggatatattggtgactgagacagaagaactggcagagaatatactcaagtggcgtaaacaacaaaacgaagtttcgtcttgtatccccaaaatattagctgaagaaagttatctttataaacatgatattataatgcctcctttaccttttacttctaaagttcatgtccaaactattaatgccaagtagtcatcaactttatttttgcttaattatgtgtagtcatatgaagtctatttctagttgactgtaacatgggtattaatagtctttgctgctggtaatactgaaagaacctgctttatattggagtatcaagatctcaggttcattaagaccaaactgacttttcctttgtttttcatatatttttattctacctttcagtaaaactagagaagctaaaaaatagccatgacaatttattaatataagtgaattaaccatttctcaggtgggaaattctctttttttaaaaatgtgtgtttatcgtctggtgtggtggctcacacctgtaatcctaacacttggggaggctgaggcgggcagatcacttaaacccaggagttcaagaccagcctgggtaacatggtgaaatcccatatctacaaaataaacaaaaaattagccgaccatggtggtgcatgcctgtagtcccagctattcgggaggctgaggtaagaggatcacctaagcctgtgaggtcatggttgcaatgagtcatgatcacgccactgcgctacagcctgggcgacacagtaagaccctgtctcaaaaaaaagaagtgtgtttctggccaggcacggtggctcacgcctgtaatcccagcactttgggaggcctaggtgggcagatcatgaggtcaggagttcgagaccagcctggccaacatggcgaaacacctgtctctactaaaaatacaaaaattaggccgggcgcagtggctcacacctgtaatcccaacactttgggaggccgacccagatgggtggatcacctgaggtcaggagtttgagaccagccttgacaacatggtgaaaccccatctctggtagaaatataaaaaattaaccgggcatggtggtggacgcctgtaatcccagctacttgggaggctgaggcagaataatcgcttgaacccaggaggcagaggttgcagtaagccaagatcgtgcctctgcactccaacctgggtgatggagcaagactccatctccaaaaaaataaaaaatacaaaaattagccaggcatggtagcatgtgcctgtaatcccagctactcaggaggctgaggcaggagaatcacttgaacccaggaggcagaggttgcagtgagcccagatcgtgccaccgcactctagcctgggcaacagagcaagactctgtcttaaaaaaaaaaaaaaaaggtgtttctgaattagaagggtcttcttgaatctgaaaatgtctatgatgattattcctgtgggaatgtcactaagtatgcagaaaagagtaacacagccagcctgacttatcctttgaaaggcctgattataaggtttgtcctcagctgttgcatctgggaacttagatatcagaaggtatcttagtctgttctgctgtcataacagaattacacaaactaagtattttataatgaacagaagtttatttggttgacaggtgtggaggctaggcagtccaagaacatggtgccagcatctagtgagggtcttgccatggcagaaggcaccacatggcaagtgagcatgagaaagatatatgggtctaaacttagccttttatcatgagcccactcccaagatagcagcactaattcattaatgagggcaaagccctccttacctaattactttttaaaggtctcataacacttttacaatgtcaattaaatttccaacacttgaactttgggggacatatttaaaccttaacaggagggctccactcactgaaaagagtcgttcatggtagctaacctgtggtttgtgctgaaaacctgctttcttcctgggagtctagaattttggtacatggtaggtagaaggtacctacgtgaccagcccccagtaaaaaccctgggcactgtatctctaacaagtttccctggtaaacaacatttctcacatgttgtcacaattcagttgctggtggaatgaaacaacagatatgtgtgactccactgttagaggactctggaagcttatacctggtttcccccagactttgcctctgtaccttttctctttgctgttttgcttcatatgcttttgctgtaataaatcatagctgtg

SEQ ID NO: 427000 - DNA, 897 bp, Homo sapiens
aaagaaaagaaaatggaatggggtttttttatctagggagaaaatgattaacattgaggtttctctaacattaagttggattccagataggattactgttgtctctttccatttttttatttggatgacaagttgcttaaagtgaaagagaaggacctttttttaatcactaatatttctatgaatgcaggaaggttgttattggctctctaggttgattataattcttatctcaaattaaaagtcctgattaaaggagaagaaaaggcactgtaaaccaatttaccttttaaaaaatggttgacttttttctttctctttcagatatatggtacatttgctggagttggctgtgactttcattgagagattagaaacccaccttgaaacaattagaaatattcctcatttagctgcaaatctaaagaaaatggtgagtattaatatagcaatcttcagttattttttactagaaacttagaggtgtgctctcccagtttagctttttaatagctaatattacgagctagttaatttttaaatcaagaagtattttcttggcctggcatggtagttcacacctgtaatccctgcactttgggaggccacaacgggtggatcacttgaggtcaggagttggagaccagcctggccaacatggtgaaactccatctctactgaaaatacaaaaattagctgggcatggtggtgcgtgcctgtaattccagctacccgggaggctgaggcaggagaactgcttgaacctgggaggcagaagttgcagtgagctgagatcgtgccagtgcactccatcctgggcgacagcaagactccatctcccattaaaaaaaaaaaaaaaaaagaagaagaagtgtttatttatttagaccttggatt

SEQ ID NO: 427001 - DNA, 1117 bp, Homo sapiens
cgcgccgtgcgttcgccctgcgatcccgctcactcttggcgccttcgcggaaggtgcgtccgagccatggccgctgccaacccgtgggacccggcgtccgcgcctaacggcgctgggctagtgctaggccacttcatagcttcggggatggtcaatcaggagatgttaaacatgtctaagaaaacagtttcttgttttgtgaacttcaccagactacagcagatcacaaatattcaagctgaaatctaccagaaaaacctggaaattgaactcctgaaactagaaaaagatacagcagatgttgttcatcctttctttttggagatgaagtcttgctatgttgcccaggctggtctcgaactcatggcctcaattctcccgtttcagtctcccaaaacactgcgattacagctcagaagtgtcatactctgcaaagcatgaataatcatttggaagcagtgctgaaagagaagagatcccttaggcaaagactgttgaaacccatgtgccaggaaaacttacctattgaagctgtttatcacagatatatggtacatttgctggagttggctgtgactttcattgagagattagaaacccaccttgaaacaattagaaatattcctcatttagctgcaaatctaaagaaaatggtgagtattaatatagcaatcttcagttattttttactagaaacttagaggtgtgctctcccagtttagctttttaatagctaatattacgagctagttaatttttaaatcaagaagtattttcttggcctggcatggtagttcacacctgtaatccctgcactttgggaggccacaacgggtggatcacttgaggtcaggagttggagaccagcctggccaacatggtgaaactccatctctactgaaaatacaaaaattagctgggcatggtggtgcgtgcctgtaattccagctacccgggaggctgaggcaggagaactgcttgaacctgggaggcagaagttgcagtgagctgagatcgtgccagtgcactccatcctgggcgacagcaagactccatctcccattaaaaaaaaaaaaaaaaaagaagaagaagtgtttatttatttagaccttggatt

SEQ ID NO: 427002 - DNA, 3959 bp, Homo sapiens
cgcgccgtgcgttcgccctgcgatcccgctcactcttggcgccttcgcggaaggtgcgtccgagccatggccgctgccaacccgtgggacccggcgtccgcgcctaacggcgctgggctagtgctaggccacttcatagcttcggggatggtcaatcaggagatgttaaacatgtctaagaaaacagtttcttgttttgtgaacttcaccagactacagcagatcacaaatattcaagctgaaatctaccagaaaaacctggaaattgaactcctgaaactagaaaaagatacagcagatgttgttcatcctttctttttggctcagaagtgtcatactctgcaaagcatgaataatcatttggaagcagtgctgaaagagaagagatcccttaggcaaagactgttgaaacccatgtgccaggaaaacttacctattgaagctgtttatcacagatatatggtacatttgctggagttggctgtgactttcattgagagattagaaacccaccttgaaacaattagaaatattcctcatttagctgcaaatctaaagaaaatgaaccaggctttagcaaagatggatatattggtgactgagacagaagaactggcagagaatatactcaagtggcgtaaacaacaaaacgaagtttcgtcttgtatccccaaaatattagctgaagaaagttatctttataaacatgatattataatgcctcctttaccttttacttctaaagttcatgtccaaactattaatgccaagtagtcatcaactttatttttgcttaattatgtgtagtcatatgaagtctatttctagttgactgtaacatgggtattaatagtctttgctgctggtaatactgaaagaacctgctttatattggagtatcaagatctcaggttcattaagaccaaactgacttttcctttgtttttcatatatttttattctacctttcagtaaaactagagaagctaaaaaatagccatgacaatttattaatataagtgaattaaccatttctcaggtgggaaattctctttttttaaaaatgtgtgtttatcgtctggtgtggtggctcacacctgtaatcctaacacttggggaggctgaggcgggcagatcacttaaacccaggagttcaagaccagcctgggtaacatggtgaaatcccatatctacaaaataaacaaaaaattagccgaccatggtggtgcatgcctgtagtcccagctattcgggaggctgaggtaagaggatcacctaagcctgtgaggtcatggttgcaatgagtcatgatcacgccactgcgctacagcctgggcgacacagtaagaccctgtctcaaaaaaaagaagtgtgtttctggccaggcacggtggctcacgcctgtaatcccagcactttgggaggcctaggtgggcagatcatgaggtcaggagttcgagaccagcctggccaacatggcgaaacacctgtctctactaaaaatacaaaaattaggccgggcgcagtggctcacacctgtaatcccaacactttgggaggccgacccagatgggtggatcacctgaggtcaggagtttgagaccagccttgacaacatggtgaaaccccatctctggtagaaatataaaaaattaaccgggcatggtggtggacgcctgtaatcccagctacttgggaggctgaggcagaataatcgcttgaacccaggaggcagaggttgcagtaagccaagatcgtgcctctgcactccaacctgggtgatggagcaagactccatctccaaaaaaataaaaaatacaaaaattagccaggcatggtagcatgtgcctgtaatcccagctactcaggaggctgaggcaggagaatcacttgaacccaggaggcagaggttgcagtgagcccagatcgtgccaccgcactctagcctgggcaacagagcaagactctgtcttaaaaaaaaaaaaaaaaggtgtttctgaattagaagggtcttcttgaatctgaaaatgtctatgatgattattcctgtgggaatgtcactaagtatgcagaaaagagtaacacagccagcctgacttatcctttgaaaggcctgattataaggtttgtcctcagctgttgcatctgggaacttagatatcagaaggtatcttagtctgttctgctgtcataacagaattacacaaactaagtattttataatgaacagaagtttatttggttgacaggtgtggaggctaggcagtccaagaacatggtgccagcatctagtgagggtcttgccatggcagaaggcaccacatggcaagtgagcatgagaaagatatatgggtctaaacttagccttttatcatgagcccactcccaagatagcagcactaattcattaatgagggcaaagccctccttacctaattactttttaaaggtctcataacacttttacaatgtcaattaaatttccaacacttgaactttgggggacatatttaaaccttaacaggagggctccactcactgaaaagagtcgttcatggtagctaacctgtggtttgtgctgaaaacctgctttcttcctgggagtctagaattttggtacatggtaggtagaaggtacctacgtgaccagcccccagtaaaaaccctgggcactgtatctctaacaagtttccctggtaaacaacatttctcacatgttgtcacaattcagttgctggtggaatgaaacaacagatatgtgtgactccactgttagaggactctggaagcttatacctggtttcccccagactttgcctctgtaccttttctctttgctgttttgcttcatatgcttttgctgtaataaatcatagctgtgtgatgatatgctgagtcttgtgaattctcctagcaaatcatggaacctggaggtagtcttggagaccctggcatacaaagcagttcctaagtgtttactggtagctgtaggaataggcaaagaagaaacagcaaagaaaaaggcacactgtggtataactttggaggtttaccttgcaaaatgctcagatattttacctatcagaggttattgtgcatataatagagagtgatatactaacaactgcctcaggatatactctttttaatcagtattgtaactaaccttggcttattttacttttagacttggggttctattttgctttaaaacatgtacatcagttttgttttttgttttgttcttttctttcctttttttttttttttttttaaagacaggatctcactctgtcacccaggttgctgagagtgtggtgtggcccaatcttgacctcactgcagccttgacctctcaggctcgggtgatcctcccgcctcagcctcccaagtagctgggactataggcacgcgccaccacgcctggctaattttgtattttctgtagagacagagttttgccatgttgttgaggctggtcttgaactcctgggttcaaacgaccctcccgcctcagcctccgaaagtgctgggagtacaggtgttagccactgcgcctggcctcattgtactccttaacacaagaagacttcaacaatgataagtagttgtttataaggaagcaggatcattaccaaaataaatcctgctaaaacaacaggaatcatgttttaaagcctagtttgctaatttttgctagtaggataagagtgatcgtaatatctcgaacattacatagacacttaaaacctttagttgtatttcatcaaaaatctgttcataccccacgttggtttcaaaacatactatgctttttcttcgtgttatttcctatattcatttttgtgtgtatgtgtatgtcacaaatattgatatgcctggttgtttatttttgttttctattatgcctttttcaaaatataaaaataaacttgtaatttctaactaaaaaaaaaaag

SEQ ID NO: 427003 - DNA, 2304 bp, Homo sapiens
cgcgccgtgcgttcgccctgcgatcccgctcactcttggcgccttcgcggaaggtgcgtccgagccatggccgctgccaacccgtgggacccggcgtccgcgcctaacggcgctgggctagtgctaggccacttcatagcttcggggatggtcaatcaggagatgttaaacatgtctaagaaaacagtttcttgttttgtgaacttcaccagactacagcagatcacaaatattcaagctgaaatctaccagaaaaacctggaaattgaactcctgaaactagaaaaagatacagcagatgttgttcatcctttctttttggctcagaagtgtcatactctgcaaagcatgaataatcatttggaagcagtgctgaaagagaagagatcccttaggcaaagactgttgaaacccatgtgccaggaaaacttacctattgaagctgtttatcacagatatatggtacatttgctggagttggctgtgactttcattgagagattagaaacccaccttgaaacaattagaaatattcctcatttagctgcaaatctaaagaaaatgaaccaggctttagcaaagatggatatattggtgactgagacagaagaactggcagagaatatactcaagtggcgtaaacaacaaaacgaagtttcgtcttgtatccccaaaatattagctgaagaaagttatctttataaacatgatattataatgcctcctttaccttttacttctaaagttcatgtccaaactattaatgccaagtagtcatcaactttatttttgcttaattatgtgtagtcatatgaagtctatttctagttgactgtaacatgggtattaatagtctttgctgctggtaatactgaaagaacctgctttatattggagtatcaagatctcaggttcattaagaccaaactgacttttcctttgtttttcatatatttttattctacctttcagtaaaactagagaagctaaaaaatagccatgacaatttattaatataagtgaattaaccatttctcaggtgggaaattctctttttttaaaaatgtgtgtttatcgtctggtgtggtggctcacacctgtaatcctaacacttggggaggctgaggcgggcagatcacttaaacccaggagttcaagaccagcctgggtaacatggtgaaatcccatatctacaaaataaacaaaaaattagccgaccatggtggtgcatgcctgtagtcccagctattcgggaggctgaggtaagaggatcacctaagcctgtgaggtcatggttgcaatgagtcatgatcacgccactgcgctacagcctgggcgacacagtaagaccctgtctcaaaaaaaagaagtgtgtttctggccaggcacggtggctcacgcctgtaatcccagcactttgggaggcctaggtgggcagatcatgaggtcaggagttcgagaccagcctggccaacatggcgaaacacctgtctctactaaaaatacaaaaattaggccgggcgcagtggctcacacctgtaatcccaacactttgggaggccgacccagatgggtggatcacctgaggtcaggagtttgagaccagccttgacaacatggtgaaaccccatctctggtagaaatataaaaaattaaccgggcatggtggtggacgcctgtaatcccagctacttgggaggctgaggcagaataatcgcttgaacccaggaggcagaggttgcagtaagccaagatcgtgcctctgcactccaacctgggtgatggagcaagactccatctccaaaaaaataaaaaatacaaaaattagccaggcatggtagcatgtgcctgtaatcccagagcctccgaaagtgctgggagtacaggtgttagccactgcgcctggcctcattgtactccttaacacaagaagacttcaacaatgataagtagttgtttataaggaagcaggatcattaccaaaataaatcctgctaaaacaacaggaatcatgttttaaagcctagtttgctaatttttgctagtaggataagagtgatcgtaatatctcgaacattacatagacacttaaaacctttagttgtatttcatcaaaaatctgttcataccccacgttggtttcaaaacatactatgctttttcttcgtgttatttcctatattcatttttgtgtgtatgtgtatgtcacaaatattgatatgcctggttgtttatttttgttttctattatgcctttttcaaaatataaaaataaacttgtaatttctaactaaaaaaaaaaag

SEQ ID NO: 427004 - DNA, 2881 bp, Homo sapiens
cgcgccgtgcgttcgccctgcgatcccgctcactcttggcgccttcgcggaaggtgcgtccgagccatggccgctgccaacccgtgggacccggcgtccgcgcctaacggcgctgggctagtgctaggccacttcatagcttcggggatggtcaatcaggagatgttaaacatgtctaagaaaacagtttcttgttttgtgaacttcaccagactacagcagatcacaaatattcaagctgaaatctaccagaaaaacctggaaattgaactcctgaaactagaaaaagatacagcagatgttgttcatcctttctttttggctcagaagtgtcatactctgcaaagcatgaataatcatttggaagcagtgctgaaagagaagagatcccttaggcaaagactgttgaaacccatgtgccaggaaaacttacctattgaagctgtttatcacagatatatggtacatttgctggagttggctgtgactttcattgagagattagaaacccaccttgaaacaattagaaatattcctcatttagctgcaaatctaaagaaaatgaaccaggctttagcaaagatggatatattggtgactgagacagaagaactggcagagaatatactcaagtggcgtaaacaacaaaacgaagtttcgtcttgtatccccaaaatattagctgaagaaagttatctttataaacatgatattataatgcctcctttaccttttacttctaaagttcatgtccaaactattaatgccaagtagtcatcaactttatttttgcttaattatgtgtagtcatatgaagtctatttctagttgactgtaacatgggtattaatagtctttgctgctggtaatactgaaagaacctgctttatattggagtatcaagatctcaggttcattaagaccaaactgacttttcctttgtttttcatatatttttattctacctttcagtaaaactagagaagctaaaaaatagccatgacaatttattaatataagtgaattaaccatttctcaggtgggaaattctctttttttaaaaatgtgtgtttatcgtctggtgtggtggctcacacctgtaatcctaacacttggggaggctgaggcgggcagatcacttaaacccaggagttcaagaccagcctgggtaacatggtgaaatcccatatctacaaaataaacaaaaaattagccgaccatggtggtgcatgcctgtagtcccagctattcgggaggctgaggtaagaggatcacctaagcctgtgaggtcatggttgcaatgagtcatgatcacgccactgcgctacagcctgggcgacacagtaagaccctgtctcaaaaaaaagaagtgtgtttctggccaggcacggtggctcacgcctgtaatcccagcactttgggaggcctaggtgggcagatcatgaggtcaggagttcgagaccagcctggccaacatggcgaaacacctgtctctactaaaaatacaaaaattaggccgggcgcagtggctcacacctgtaatcccaacactttgggaggccgacccagatgggtggatcacctgaggtcaggagtttgagaccagccttgacaacatggtgaaaccccatctctggtagaaatataaaaaattaaccgggcatggtggtggacgcctgtaatcccagctacttgggaggctgaggcagaataatcgcttgaacccaggaggcagaggttgcagtaagccaagatcgtgcctctgcactccaacctgggtgatggagcaagactccatctccaaaaaaataaaaaatacaaaaattagccaggcatggtagcatgtgcctgtaatcccagctactcaggaggctgaggcaggagaatcacttgaacccaggaggcagaggttgcagtgagcccagatcgtgccaccgcactctagcctgggcaacagagcaagactctgtcttaaaaaaaaaaaaaaaaggtgtttctgaattagaagggtcttcttgaatctgaaaatgtctatgatgattattcctgtgggaatgtcactaagtatgcagaaaagagtaacacagccagcctgacttatcctttgaaaggcctgattataaggtttgtcctcagctgttgcatctgggaacttagatatcagaaggtatcttagtctgttctgctgtcataacagaattacacaaactaagtattttataatgaacagaagtttatttggttgacaggtgtggaggctaggcagtccaagaacatggtgccagcatctagtgagggtcttgccatggcagaaggcaccacatggcaagtgagcatgagaaagatatatgggtctaaacttagccttttatcatgagcccactcccaagatagcagcactaattcattaatgagggcaaagccctccttacctaattactttttaaaggtctcataacacttttacaatgtcaattaaatttccaacacttgaactttgggggacatatttaaaccttaacaggagggctccactcactgaaaagagtcgttcatggtagctaacctgtggtttgtgctgaaaacctgctttcttcctgggagtctagaattttggtacatggtaggtagaaggtacctacgtgaccagcccccagtaaaaaccctgggcactgtatctctaacaagtttccctggtaaacaacatttctcacatgttgtcacaattcagttgctggtggaatgaaacaacagatatgtgtgactccactgttagaggactctggaagcttatacctggtttcccccagactttgcctctgtaccttttctctttgctgttttgcttcatatgcttttgctgtaataaatcatagctgtg

SEQ ID NO: 427005 - DNA, 3978 bp, Homo sapiens
cgcgccgtgcgttcgccctgcgatcccgctcactcttggcgccttcgcggaaggtgcgtccgagccatggccgctgccaacccgtgggacccggcgtccgcgcctaacggcgctgggctagtgctaggccacttcatagcttcggggatggtcaatcaggagatgttaaacatgtctaagaaaacagtttcttgttttgtgaacttcaccagactacagcagatcacaaatattcaagctgaaatctaccagagatgaagtcttgctatgttgcccaggctggtctcgaactcatggcctcaattctcccgtttcagtctcccaaaacactgcgattacagctcagaagtgtcatactctgcaaagcatgaataatcatttggaagcagtgctgaaagagaagagatcccttaggcaaagactgttgaaacccatgtgccaggaaaacttacctattgaagctgtttatcacagatatatggtacatttgctggagttggctgtgactttcattgagagattagaaacccaccttgaaacaattagaaatattcctcatttagctgcaaatctaaagaaaatgaaccaggctttagcaaagatggatatattggtgactgagacagaagaactggcagagaatatactcaagtggcgtaaacaacaaaacgaagtttcgtcttgtatccccaaaatattagctgaagaaagttatctttataaacatgatattataatgcctcctttaccttttacttctaaagttcatgtccaaactattaatgccaagtagtcatcaactttatttttgcttaattatgtgtagtcatatgaagtctatttctagttgactgtaacatgggtattaatagtctttgctgctggtaatactgaaagaacctgctttatattggagtatcaagatctcaggttcattaagaccaaactgacttttcctttgtttttcatatatttttattctacctttcagtaaaactagagaagctaaaaaatagccatgacaatttattaatataagtgaattaaccatttctcaggtgggaaattctctttttttaaaaatgtgtgtttatcgtctggtgtggtggctcacacctgtaatcctaacacttggggaggctgaggcgggcagatcacttaaacccaggagttcaagaccagcctgggtaacatggtgaaatcccatatctacaaaataaacaaaaaattagccgaccatggtggtgcatgcctgtagtcccagctattcgggaggctgaggtaagaggatcacctaagcctgtgaggtcatggttgcaatgagtcatgatcacgccactgcgctacagcctgggcgacacagtaagaccctgtctcaaaaaaaagaagtgtgtttctggccaggcacggtggctcacgcctgtaatcccagcactttgggaggcctaggtgggcagatcatgaggtcaggagttcgagaccagcctggccaacatggcgaaacacctgtctctactaaaaatacaaaaattaggccgggcgcagtggctcacacctgtaatcccaacactttgggaggccgacccagatgggtggatcacctgaggtcaggagtttgagaccagccttgacaacatggtgaaaccccatctctggtagaaatataaaaaattaaccgggcatggtggtggacgcctgtaatcccagctacttgggaggctgaggcagaataatcgcttgaacccaggaggcagaggttgcagtaagccaagatcgtgcctctgcactccaacctgggtgatggagcaagactccatctccaaaaaaataaaaaatacaaaaattagccaggcatggtagcatgtgcctgtaatcccagctactcaggaggctgaggcaggagaatcacttgaacccaggaggcagaggttgcagtgagcccagatcgtgccaccgcactctagcctgggcaacagagcaagactctgtcttaaaaaaaaaaaaaaaaggtgtttctgaattagaagggtcttcttgaatctgaaaatgtctatgatgattattcctgtgggaatgtcactaagtatgcagaaaagagtaacacagccagcctgacttatcctttgaaaggcctgattataaggtttgtcctcagctgttgcatctgggaacttagatatcagaaggtatcttagtctgttctgctgtcataacagaattacacaaactaagtattttataatgaacagaagtttatttggttgacaggtgtggaggctaggcagtccaagaacatggtgccagcatctagtgagggtcttgccatggcagaaggcaccacatggcaagtgagcatgagaaagatatatgggtctaaacttagccttttatcatgagcccactcccaagatagcagcactaattcattaatgagggcaaagccctccttacctaattactttttaaaggtctcataacacttttacaatgtcaattaaatttccaacacttgaactttgggggacatatttaaaccttaacaggagggctccactcactgaaaagagtcgttcatggtagctaacctgtggtttgtgctgaaaacctgctttcttcctgggagtctagaattttggtacatggtaggtagaaggtacctacgtgaccagcccccagtaaaaaccctgggcactgtatctctaacaagtttccctggtaaacaacatttctcacatgttgtcacaattcagttgctggtggaatgaaacaacagatatgtgtgactccactgttagaggactctggaagcttatacctggtttcccccagactttgcctctgtaccttttctctttgctgttttgcttcatatgcttttgctgtaataaatcatagctgtgtgatgatatgctgagtcttgtgaattctcctagcaaatcatggaacctggaggtagtcttggagaccctggcatacaaagcagttcctaagtgtttactggtagctgtaggaataggcaaagaagaaacagcaaagaaaaaggcacactgtggtataactttggaggtttaccttgcaaaatgctcagatattttacctatcagaggttattgtgcatataatagagagtgatatactaacaactgcctcaggatatactctttttaatcagtattgtaactaaccttggcttattttacttttagacttggggttctattttgctttaaaacatgtacatcagttttgttttttgttttgttcttttctttcctttttttttttttttttttaaagacaggatctcactctgtcacccaggttgctgagagtgtggtgtggcccaatcttgacctcactgcagccttgacctctcaggctcgggtgatcctcccgcctcagcctcccaagtagctgggactataggcacgcgccaccacgcctggctaattttgtattttctgtagagacagagttttgccatgttgttgaggctggtcttgaactcctgggttcaaacgaccctcccgcctcagcctccgaaagtgctgggagtacaggtgttagccactgcgcctggcctcattgtactccttaacacaagaagacttcaacaatgataagtagttgtttataaggaagcaggatcattaccaaaataaatcctgctaaaacaacaggaatcatgttttaaagcctagtttgctaatttttgctagtaggataagagtgatcgtaatatctcgaacattacatagacacttaaaacctttagttgtatttcatcaaaaatctgttcataccccacgttggtttcaaaacatactatgctttttcttcgtgttatttcctatattcatttttgtgtgtatgtgtatgtcacaaatattgatatgcctggttgtttatttttgttttctattatgcctttttcaaaatataaaaataaacttgtaatttctaactaaaaaaaaaaag

SEQ ID NO: 427006 - DNA, 1534 bp, Homo sapiens
cgcgccgtgcgttcgccctgcgatcccgctcactcttggcgccttcgcggaaggtgcgtccgagccatggccgctgccaacccgtgggacccggcgtccgcgcctaacggcgctgggctagtgctaggccacttcatagcttcggggatggtcaatcaggagatgttaaacatgtctaagaaaacagtttcttgttttgtgaacttcaccagactacagcagatcacaaatattcaagctgaaatctaccagaaaaacctggaaattgaactcctgaaactagaaaaagatacagcagatgttgttcatcctttctttttggctcagaagtgtcatactctgcaaagcatgaataatcatttggaagcagtgctgaaagagaagagatcccttaggcaaagactgttgaaacccatgtgccaggaaaacttacctattgaagctgtttatcacagatatatggtacatttgctggagttggctgtgactttcattgagagattagaaacccaccttgaaacaattagaaatattcctcatttagctgcaaatctaaagaaaatgaaccaggctttagcaaagatggatatattggtgactgagacagaagaactggcagagaatatactcaagtggcgtaaacaacaaaacgaagtttcgtcttgtatccccaaaatattagctgaagaaagttatctttataaacatgatattataatgcctcctttaccttttacttctaaagttcatgtccaaactattaatgccaagtagtcatcaactttatttttgcttaattatgtgtagtcatatgaagtctatttctagttgactgtaacatgggtattaatagtctttgctgctggtaatactgaaagaacctgctttatattggagtatcaagatctcaggttcattaagaccaaactgacttttcctttgtttttcatatatttttattctacctttcagtaaaactagagaagctaaaaaatagccatgacaatttattaatataagtgaattaaccatttctcaggtgggaaattctctttttttaaaaatgtgtgtttatcgtctggtgtggtggagcctccgaaagtgctgggagtacaggtgttagccactgcgcctggcctcattgtactccttaacacaagaagacttcaacaatgataagtagttgtttataaggaagcaggatcattaccaaaataaatcctgctaaaacaacaggaatcatgttttaaagcctagtttgctaatttttgctagtaggataagagtgatcgtaatatctcgaacattacatagacacttaaaacctttagttgtatttcatcaaaaatctgttcataccccacgttggtttcaaaacatactatgctttttcttcgtgttatttcctatattcatttttgtgtgtatgtgtatgtcacaaatattgatatgcctggttgtttatttttgttttctattatgcctttttcaaaatataaaaataaacttgtaatttctaactaaaaaaaaaaag

SEQ ID NO: 427007 - DNA, 3828 bp, Homo sapiens
aaagaaaagaaaatggaatggggtttttttatctagggagaaaatgattaacattgaggtttctctaacattaagttggattccagataggattactgttgtctctttccatttttttatttggatgacaagttgcttaaagtgaaagagaaggacctttttttaatcactaatatttctatgaatgcaggaaggttgttattggctctctaggttgattataattcttatctcaaattaaaagtcctgattaaaggagaagaaaaggcactgtaaaccaatttaccttttaaaaaatggttgacttttttctttctctttcagatatatggtacatttgctggagttggctgtgactttcattgagagattagaaacccaccttgaaacaattagaaatattcctcatttagctgcaaatctaaagaaaatgaaccaggctttagcaaagatggatatattggtgactgagacagaagaactggcagagaatatactcaagtggcgtaaacaacaaaacgaagtttcgtcttgtatccccaaaatattagctgaagaaagttatctttataaacatgatattataatgcctcctttaccttttacttctaaagttcatgtccaaactattaatgccaagtagtcatcaactttatttttgcttaattatgtgtagtcatatgaagtctatttctagttgactgtaacatgggtattaatagtctttgctgctggtaatactgaaagaacctgctttatattggagtatcaagatctcaggttcattaagaccaaactgacttttcctttgtttttcatatatttttattctacctttcagtaaaactagagaagctaaaaaatagccatgacaatttattaatataagtgaattaaccatttctcaggtgggaaattctctttttttaaaaatgtgtgtttatcgtctggtgtggtggctcacacctgtaatcctaacacttggggaggctgaggcgggcagatcacttaaacccaggagttcaagaccagcctgggtaacatggtgaaatcccatatctacaaaataaacaaaaaattagccgaccatggtggtgcatgcctgtagtcccagctattcgggaggctgaggtaagaggatcacctaagcctgtgaggtcatggttgcaatgagtcatgatcacgccactgcgctacagcctgggcgacacagtaagaccctgtctcaaaaaaaagaagtgtgtttctggccaggcacggtggctcacgcctgtaatcccagcactttgggaggcctaggtgggcagatcatgaggtcaggagttcgagaccagcctggccaacatggcgaaacacctgtctctactaaaaatacaaaaattaggccgggcgcagtggctcacacctgtaatcccaacactttgggaggccgacccagatgggtggatcacctgaggtcaggagtttgagaccagccttgacaacatggtgaaaccccatctctggtagaaatataaaaaattaaccgggcatggtggtggacgcctgtaatcccagctacttgggaggctgaggcagaataatcgcttgaacccaggaggcagaggttgcagtaagccaagatcgtgcctctgcactccaacctgggtgatggagcaagactccatctccaaaaaaataaaaaatacaaaaattagccaggcatggtagcatgtgcctgtaatcccagctactcaggaggctgaggcaggagaatcacttgaacccaggaggcagaggttgcagtgagcccagatcgtgccaccgcactctagcctgggcaacagagcaagactctgtcttaaaaaaaaaaaaaaaaggtgtttctgaattagaagggtcttcttgaatctgaaaatgtctatgatgattattcctgtgggaatgtcactaagtatgcagaaaagagtaacacagccagcctgacttatcctttgaaaggcctgattataaggtttgtcctcagctgttgcatctgggaacttagatatcagaaggtatcttagtctgttctgctgtcataacagaattacacaaactaagtattttataatgaacagaagtttatttggttgacaggtgtggaggctaggcagtccaagaacatggtgccagcatctagtgagggtcttgccatggcagaaggcaccacatggcaagtgagcatgagaaagatatatgggtctaaacttagccttttatcatgagcccactcccaagatagcagcactaattcattaatgagggcaaagccctccttacctaattactttttaaaggtctcataacacttttacaatgtcaattaaatttccaacacttgaactttgggggacatatttaaaccttaacaggagggctccactcactgaaaagagtcgttcatggtagctaacctgtggtttgtgctgaaaacctgctttcttcctgggagtctagaattttggtacatggtaggtagaaggtacctacgtgaccagcccccagtaaaaaccctgggcactgtatctctaacaagtttccctggtaaacaacatttctcacatgttgtcacaattcagttgctggtggaatgaaacaacagatatgtgtgactccactgttagaggactctggaagcttatacctggtttcccccagactttgcctctgtaccttttctctttgctgttttgcttcatatgcttttgctgtaataaatcatagctgtgtgatgatatgctgagtcttgtgaattctcctagcaaatcatggaacctggaggtagtcttggagaccctggcatacaaagcagttcctaagtgtttactggtagctgtaggaataggcaaagaagaaacagcaaagaaaaaggcacactgtggtataactttggaggtttaccttgcaaaatgctcagatattttacctatcagaggttattgtgcatataatagagagtgatatactaacaactgcctcaggatatactctttttaatcagtattgtaactaaccttggcttattttacttttagacttggggttctattttgctttaaaacatgtacatcagttttgttttttgttttgttcttttctttcctttttttttttttttttttaaagacaggatctcactctgtcacccaggttgctgagagtgtggtgtggcccaatcttgacctcactgcagccttgacctctcaggctcgggtgatcctcccgcctcagcctcccaagtagctgggactataggcacgcgccaccacgcctggctaattttgtattttctgtagagacagagttttgccatgttgttgaggctggtcttgaactcctgggttcaaacgaccctcccgcctcagcctccgaaagtgctgggagtacaggtgttagccactgcgcctggcctcattgtactccttaacacaagaagacttcaacaatgataagtagttgtttataaggaagcaggatcattaccaaaataaatcctgctaaaacaacaggaatcatgttttaaagcctagtttgctaatttttgctagtaggataagagtgatcgtaatatctcgaacattacatagacacttaaaacctttagttgtatttcatcaaaaatctgttcataccccacgttggtttcaaaacatactatgctttttcttcgtgttatttcctatattcatttttgtgtgtatgtgtatgtcacaaatattgatatgcctggttgtttatttttgttttctattatgcctttttcaaaatataaaaataaacttgtaatttctaactaaaaaaaaaaag

SEQ ID NO: 427008 - DNA, 3756 bp, Homo sapiens
tgcacatgtagtaaatggtcaatcatttttgaactgtagttagactgagtttgagatattgaaggtacatccagatagagattaccagtagtcttaaatgtgggcctgaattttaggaaggaagttaggtttagcaatataaattgagggtcatctgcattgagtgattattgaagacaaaagagttgaactcacaaagagtaggtttgtactgtaagaagtgggaaagcacagttttaaggagcttttgaagtaaggggctggaaaaagatcatgtgttaacctttggtatcagttactgatgatataatgaattaataagagacataatttctcctgtttcccttttcaaatgttacagaaccaggctttagcaaagatggatatattggtgactgagacagaagaactggcagagaatatactcaagtggcgtaaacaacaaaacgaagtttcgtcttgtatccccaaaatattagctgaagaaagttatctttataaacatgatattataatgcctcctttaccttttacttctaaagttcatgtccaaactattaatgccaagtagtcatcaactttatttttgcttaattatgtgtagtcatatgaagtctatttctagttgactgtaacatgggtattaatagtctttgctgctggtaatactgaaagaacctgctttatattggagtatcaagatctcaggttcattaagaccaaactgacttttcctttgtttttcatatatttttattctacctttcagtaaaactagagaagctaaaaaatagccatgacaatttattaatataagtgaattaaccatttctcaggtgggaaattctctttttttaaaaatgtgtgtttatcgtctggtgtggtggctcacacctgtaatcctaacacttggggaggctgaggcgggcagatcacttaaacccaggagttcaagaccagcctgggtaacatggtgaaatcccatatctacaaaataaacaaaaaattagccgaccatggtggtgcatgcctgtagtcccagctattcgggaggctgaggtaagaggatcacctaagcctgtgaggtcatggttgcaatgagtcatgatcacgccactgcgctacagcctgggcgacacagtaagaccctgtctcaaaaaaaagaagtgtgtttctggccaggcacggtggctcacgcctgtaatcccagcactttgggaggcctaggtgggcagatcatgaggtcaggagttcgagaccagcctggccaacatggcgaaacacctgtctctactaaaaatacaaaaattaggccgggcgcagtggctcacacctgtaatcccaacactttgggaggccgacccagatgggtggatcacctgaggtcaggagtttgagaccagccttgacaacatggtgaaaccccatctctggtagaaatataaaaaattaaccgggcatggtggtggacgcctgtaatcccagctacttgggaggctgaggcagaataatcgcttgaacccaggaggcagaggttgcagtaagccaagatcgtgcctctgcactccaacctgggtgatggagcaagactccatctccaaaaaaataaaaaatacaaaaattagccaggcatggtagcatgtgcctgtaatcccagctactcaggaggctgaggcaggagaatcacttgaacccaggaggcagaggttgcagtgagcccagatcgtgccaccgcactctagcctgggcaacagagcaagactctgtcttaaaaaaaaaaaaaaaaggtgtttctgaattagaagggtcttcttgaatctgaaaatgtctatgatgattattcctgtgggaatgtcactaagtatgcagaaaagagtaacacagccagcctgacttatcctttgaaaggcctgattataaggtttgtcctcagctgttgcatctgggaacttagatatcagaaggtatcttagtctgttctgctgtcataacagaattacacaaactaagtattttataatgaacagaagtttatttggttgacaggtgtggaggctaggcagtccaagaacatggtgccagcatctagtgagggtcttgccatggcagaaggcaccacatggcaagtgagcatgagaaagatatatgggtctaaacttagccttttatcatgagcccactcccaagatagcagcactaattcattaatgagggcaaagccctccttacctaattactttttaaaggtctcataacacttttacaatgtcaattaaatttccaacacttgaactttgggggacatatttaaaccttaacaggagggctccactcactgaaaagagtcgttcatggtagctaacctgtggtttgtgctgaaaacctgctttcttcctgggagtctagaattttggtacatggtaggtagaaggtacctacgtgaccagcccccagtaaaaaccctgggcactgtatctctaacaagtttccctggtaaacaacatttctcacatgttgtcacaattcagttgctggtggaatgaaacaacagatatgtgtgactccactgttagaggactctggaagcttatacctggtttcccccagactttgcctctgtaccttttctctttgctgttttgcttcatatgcttttgctgtaataaatcatagctgtgtgatgatatgctgagtcttgtgaattctcctagcaaatcatggaacctggaggtagtcttggagaccctggcatacaaagcagttcctaagtgtttactggtagctgtaggaataggcaaagaagaaacagcaaagaaaaaggcacactgtggtataactttggaggtttaccttgcaaaatgctcagatattttacctatcagaggttattgtgcatataatagagagtgatatactaacaactgcctcaggatatactctttttaatcagtattgtaactaaccttggcttattttacttttagacttggggttctattttgctttaaaacatgtacatcagttttgttttttgttttgttcttttctttcctttttttttttttttttttaaagacaggatctcactctgtcacccaggttgctgagagtgtggtgtggcccaatcttgacctcactgcagccttgacctctcaggctcgggtgatcctcccgcctcagcctcccaagtagctgggactataggcacgcgccaccacgcctggctaattttgtattttctgtagagacagagttttgccatgttgttgaggctggtcttgaactcctgggttcaaacgaccctcccgcctcagcctccgaaagtgctgggagtacaggtgttagccactgcgcctggcctcattgtactccttaacacaagaagacttcaacaatgataagtagttgtttataaggaagcaggatcattaccaaaataaatcctgctaaaacaacaggaatcatgttttaaagcctagtttgctaatttttgctagtaggataagagtgatcgtaatatctcgaacattacatagacacttaaaacctttagttgtatttcatcaaaaatctgttcataccccacgttggtttcaaaacatactatgctttttcttcgtgttatttcctatattcatttttgtgtgtatgtgtatgtcacaaatattgatatgcctggttgtttatttttgttttctattatgcctttttcaaaatataaaaataaacttgtaatttctaactaaaaaaaaaaag

SEQ ID NO: 427009 - DNA, 1355 bp, Homo sapiens
cgcgccgtgcgttcgccctgcgatcccgctcactcttggcgccttcgcggaaggtgcgtccgagccatggccgctgccaacccgtgggacccggcgtccgcgcctaacggcgctgggctagtgctaggccacttcatagcttcggggatggtcaatcaggagatgttaaacatgtctaagaaaacagtttcttgttttgtgaacttcaccagactacagcagatcacaaatattcaagctgaaatctaccagaaaaacctggaaattgaactcctgaaactagaaaaagatacagcagatgttgttcatcctttctttttggctcagaagtgtcatactctgcaaagcatgaataatcatttggaagcagtgctgaaagagaagagatcccttaggcaaagactgttgaaacccatgtgccaggaaaacttacctattgaagctgtttatcacagatatatggtacatttgctggagttggctgtgactttcattgagagattagaaacccaccttgaaacaattagaaatattcctcatttagctgcaaatctaaagaaaatgaaccaggctttagcaaagatggatatattggtgactgagacagaagaactggcagagaatatactcaagtggcgtaaacaacaaaacgaagtttcgtcttgtatccccaaaatattagctgaagaaagttatctttataaacatgatattataatgcctcctttaccttttacttctaaagttcatgtccaaactattaatgccaagtagtcatcaactttatttttgcttaattatgtgtagtcatatgaagtctatttctagttgactgtaacatgggtattaatagtctttgctgctggtaatactgaaagaacctgctttatattggagtatcaagatctcagagcctccgaaagtgctgggagtacaggtgttagccactgcgcctggcctcattgtactccttaacacaagaagacttcaacaatgataagtagttgtttataaggaagcaggatcattaccaaaataaatcctgctaaaacaacaggaatcatgttttaaagcctagtttgctaatttttgctagtaggataagagtgatcgtaatatctcgaacattacatagacacttaaaacctttagttgtatttcatcaaaaatctgttcataccccacgttggtttcaaaacatactatgctttttcttcgtgttatttcctatattcatttttgtgtgtatgtgtatgtcacaaatattgatatgcctggttgtttatttttgttttctattatgcctttttcaaaatataaaaataaacttgtaatttctaactaaaaaaaaaaag

SEQ ID NO: 427010 - DNA, 796 bp, Homo sapiens
atttgagcgataagtatataaaatccggttataaccccggcctttattcaaatattatattcgacccctcctcttttgaggagagctccccccatgattttcccccctcttgttcaacaaaaaatcgggtggtctactagaaaccacctttattgatccatcccttgcccctttctcttattactttcttttgtttccgccccccccctatcccccggtttttttttttttttttttttttttttttttttttttttttttttttttttttttttttttttttttttttcaagttttgccatgttgttgaggctggtcttgaactcctgggttcaaacgaccctcccgcctcagcctccgaaagtgctgggagtacaggtgttagccactgcgcctggcctcattgtactccttaacacaagaagacttcaacaatgataagtagttgtttataaggaagcaggatcattaccaaaataaatcctgctaaaacaacaggaatcatgttttaaagcctagtttgctaatttttgctagtaggataagagtgatcgtaatatctcgaacattacatagacacttaaaacctttagttgtatttcatcaaaaatctgttcataccccacgttggtttcaaaacatactatgctttttcttcgtgttatttcctatattcatttttgtgtgtatgtgtatgtcacaaatattgatatgcctggttgtttatttttgttttctattatgcctttttcaaaatataaaaataaacttgtaatttctaactaaaaaaaaaaag

SEQ ID NO: 427011 - DNA, 740 bp, Homo sapiens
cgcgccgtgcgttcgccctgcgatcccgctcactcttggcgccttcgcggaaggtgcgtccgagccatggccgctgccaacccgtgggacccggcgtccgcgcctaacggcgctgggctagtgctaggccacttcatagcttcggggatggtcaatcaggagatgttaaacatgtctaagaaaacagtttcttgttttgtgaacttcaccagactacagcagatcacaaatattcaagctgaaatctaccagaaaaacctggaaattgaactcctgaaactagaaaaagatacagcagatgttgttcatcctttctttttggctcagaagtgtcatactctgcaaagcatgaataatcatttggaagcagtgctgaaagagaagagatcccttaggcaaagactgttgaaacccatgtgccaggaaaacttacctattgaagctgtttatcacaggttagactgaaaagtagaaattaacagttacacctgttttctgagtttactttttgttttgcagttactttgtagcagaattcataaaacaattagtgattgtatttgttaacattattaatggtgatatattaaatcagaaagaaaatctttgcttttaaaccattatacctatggcaaaaaggaagaacttggccatcgtgttttgggaattataaattatgagtttaatgaaagaaattagatccataacatgtaacaataaaaactgtttgtatgtgaagt

SEQ ID NO: 427012 - DNA, 577 bp, Homo sapiens
cgcgccgtgcgttcgccctgcgatcccgctcactcttggcgccttcgcggaaggtgcgtccgagccatggccgctgccaacccgtgggacccggcgtccgcgcctaacggcgctgggctagtgctaggccacttcatagcttcggggatggtcaatcaggagatgttaaacatgtctaagaaaacagtttcttgttttgtgaacttcaccagactacagcagatcacaaatattcaagctgaaatctaccagaaaaacctggaaattgaactcctgaaactagaaaaagatacagcagatgttgttcatcctttctttttgggtggctcagacagtgtcatactgctgtatgcggggatctcgaacacgcagagaggacactgctcagctggctgctgatctgccggagggaatggctaagcccgtggatcttgcgggaggtgagactcggggttgagtcgaggtgaggcggggaaaaagattcagaactttcactgctcaggctgtccatgtcactgaggtcgaaggttactgccttcttggtgggggatcctctctgcgttaggggtaccgagct

SEQ ID NO: 427013 - DNA, 490 bp, Homo sapiens
aggaaggatagtttaggtcaacctgctacatcaatagattgggtaaggggaactctcatgggataaaataactaacattgttgagcacttgcgctaagcattttattagatgctctacatttatcatcttcatcaatcctcacatcagccctaggagatactattactgacatctttaataatgacttgatatttaatacattgatattcagttcaaaaattctaaccacaagtttctttcttctccatacctctctaggaacttggtctgcagaccatccagaggaataaaaaggttggccttagtagtcaaaaacaaagctgatagccagacacgttctgatttctgcccttgttccagctttgacgtattatctgttgccttatttctcattgcctcttctacttgtaaaatgcttttcactttctgtctaggttaaagctaaactgaatctatggctttaaataaattaagatcctaaactctcta

SEQ ID NO: 427014 - DNA, 4592 bp, Homo sapiens
ttatttgcacccgccccccgcccgcgtcggtctggggcttttgacttctccccgaacacatttcccctcccgtcgctgggtccctgcgatcgcccccagctggtggggctcgcggagctcaggggagcggggtcctctgcgccgctgcagcgcgagttaataaacagttaagtttggaagactctgcagacacgttgagggggagttaccaagcccaggcagcaaaaacatcctggcacattcctggggagtcctcagctgccagcatctgattagaaccatatctctcgccgggagtggccgcgcggctccgaagctcccggccggcggctatttaagcgaggcccgccgcatccgctgcgctgtagcctggaggctccgggcgcggggaagtcatgctcgcttcacggaggcaatagctagccggtgtctgtgggaggttatgtttatttgagacttctccatcgggatcgcctggtgtcaccaagtgtccactggtactgaggtttgctgcctgccttcttgccatgtctaacgaagtagaaacaagtgcaaccaatggtcagcccgaccaacaggccgcaccaaaagcaccctcaaagaaggaaaaaaagaaaggccctgaaaagacagatgaatatctcttagcaaggttcaaaggcgatggtgtaaaatataaggccaagctgattggcattgatgatgtgccagatgcaagaggggataaaatgagccaagactctatgatgaaactaaagggaatggcggcagctggtcggtctcagggacaacacaaacaaaggatctgggtcaacatttccctttctgggataaaaataattgatgagaaaactggggtaatagagcatgaacatccagtaaataagatttctttcattgcccgtgatgtgacagacaaccgggcatttggttacgtgtgtggaggagaaggccagcatcagttttttgccataaaaaccgggcaacaggctgaaccattagttgttgatcttaaagacctttttcaagttatctataatgtaaagaaaaaggaagaagaaaagaaaaagatagaggaagccagcaaagcagttgagaatgggagtgaggccctaatgattctagatgaccaaactaacaaactgaaatcgggtgttgaccagatggatttgtttggggacatgtctacacctcctgacctaaatagtccaacagaaagcaaagatatcctgttagtggatctaaactctgaaatcgacaccaatcagaattctttaagagaaaatccattcttaacaaacggcatcacctcctgttctcttcctcgaccaacgcctcaggcatccttcttgcctgaaaatgccttttctgccaatctcaacttctttcccacccctaatcctgatcctttccgtgacgatcctttcacacagccagaccaatcgacaccttcttcgtttgattctctcaaatctccagatcagaagaaagagaattcgagtagctcgtctactccgctgagtaatgggcccctgaatggtgatgttgactactttggtcagcaatttgaccagatctctaaccggactggcaaacaggaagctcaggcaggcccatggcccttttcaagttcgcaaacccagccagcagtgagaactcaaaatggggtatctgaaagagaacagaacggcttctctgtcaaatcctccccgaacccttttgtgggaagccctcccaaaggactgtccatacagaatggcgtaaagcaggacttggaaagctctgtccagtcctcaccacatgactccatagccattatcccacctccacaaagtaccaaaccaggaagaggcagaaggactgctaagtcttcagccaatgacttgcttgcatcagacatctttgctcctcccgtctcagaaccttcaggccaggcgtcacccacaggacaacctacagccctgcagcccaaccctctggatctcttcaaaacaagtgctcctgccccagtggggcccctggtgggtctaggtggtgtaactgtcacactccctcaggcaggaccatggaacacagcatctttggtcttcaatcagtccccttcaatggctccgggagccatgatgggtggtcaaccttcaggttttagtcagcccgtcatttttggtacaagtccagctgtttcaggttggaaccagccttcaccctttgcagcctcaactccccctccagtgcctgttgtctggggcccttctgcatctgtggcacccaatgcttggtcaacaacaagccctttggggaatccttttcagagcaatatttttccagctcctgctgtgtccactcagcccccatccatgcactcctctctcctggtcactcctcctcagccacctcccagagctggccctcccaaggacatctccagtgatgccttcactgccttagacccacttggggataaagagatcaaggatgtgaaagaaatgtttaaggatttccaactgcggcagccacctgctgtgcccgcgcggaagggagagcagacttcttctgggactttgagtgcctttgccagttatttcaacagcaaggttggcattcctcaggagaatgcagaccatgatgactttgatgctaatcaactattgaacaagatcaatgaaccaccaaagccagctcccagacaagtttccctgccagttaccaaatctactgacaatgcatttgagaaccctttctttaaagattcttttggttcatcacaagcctctgtggcttcttctcaacctgtatcttctgagatgtatagggatccatttggaaatccttttgcctaaattctgaacttggtctgcagaccatccagaggaataaaaaggttggccttagtagtcaaaaacaaagctgatagccagacacgttctgatttctgcccttgttccagctttgacgtattatctgttgccttatttctcattgcctcttctacttgtaaaatgcttttcactttctgtctaggttaaagctaaactgaatctatggctttaaataaattaagatcctaaactctctagcttaagtgtaaatgaagtacagtagtttccctactgaaccctgcctcttgtgtccctggaaccttctagaacacctgccttctaccctctggttgggagatgcagccaccacatcccttcatatcatactgttttgaataaattttcaaatccttattgttcagagttgtttgggggttctgtttcagagcataaaacctaaaggttatagtagaacaaggcaccttcttaaaagaaatcttgcttcagaccatcagttacagagaatttctaaagtaaaattgaagcaactacaacttctccttagacactttggaatctaaccacttaaggacctttttaaagagatagcttctcttctttctgaagatcaatttctcccaaggccaagattgtccttttctcccatttcttgctagctattgcaaatgagggaagaacattattcatctctcctccccttttttttctgattcttttttcagtcagttttgctcctgggttcaagtagtattaccaccctttcacaagcaacagactctcacagggcaaaaaaaaaaaaaaatctaatgattcacagacagatctggagcctctcttcattctcagtaattgctagtcccaagaactagaattgcaaatgggcacaacctatatccttcctgtggaagaggaggccactctcttgagctgaagttccagaagagcagttaatgttcaagagaaattgaactcaactcagcaacaaaggactctattttgaagagcaacatatcacaaagctaaatgtgattgtgccaaacacattaggtgcttatttggggtcatgctaggcctttatcaagtaactggaaaacttttcttgcagccacaatctcaatgtcgttagtaggaagataagaggggagaaaaagctgtagaacaaatgtttggggttaccattgaaaatctaatgtctgcaatatttttctcctcacaacttggaaacgttcccagttcattttcagtcctgttgtgagcacagttctgaagggtttattattgtcaaaataagttttgttttgttttgtttatgttgggtttttaatgttgtctcttgacccttaatgctcaggttcttgtgggagttaatcagccacatccaacgttaccttgagggggaagaagagggtgatgctcagaagctaaacaagacaggggccacatgaccctctattgattagccccaagtagaaagtcctgtggttttatgtttaatggtaatagttgatcatatatggcataattttctatcagcttcctactcagtcactataaacacagacttgaaatagtactttaaatgtccaaatacctaaatgtgctaaactggaggtaactatttctaggtagttgaatttttgaaagtcatgatcagccacacaactgttttgtacatacttattttctcatgcacttttctgtatgcaaataaagctataaatttactcatttcaataaactggagtggcagaa

SEQ ID NO: 427015 - DNA, 4644 bp, Homo sapiens
  misc_feature (4601)..(4601): n is a, c, g, or t
  misc_feature (4604)..(4604): n is a, c, g, or t
  misc_feature (4608)..(4609): n is a, c, g, or t
ttatttgcacccgccccccgcccgcgtcggtctggggcttttgacttctccccgaacacatttcccctcccgtcgctgggtccctgcgatcgcccccagctggtggggctcgcggagctcaggggagcggggtcctctgcgccgctgcagcgcgagttaataaacagttaagtttggaagactctgcagacacgttgagggggagttaccaagcccaggcagcaaaaacatcctggcacattcctggggagtcctcagctgccagcatctgattagaaccatatctctcgccgggagtggccgcgcggctccgaagctcccggccggcggctatttaagcgaggcccgccgcatccgctgcgctgtagcctggaggctccgggcgcggggaagtcatgctcgcttcacggaggcaatagctagccggtgtctgtgggaggttatgtttatttgagacttctccatcgggatcgcctggtgtcaccaagtgtccactggtactgaggtttgctgcctgccttcttgccatgtctaacgaagtagaaacaagtgcaaccaatggtcagcccgaccaacaggccgcaccaaaagcaccctcaaagaaggaaaaaaagaaaggccctgaaaagacagatgaatatctcttagcaaggttcaaaggcgatggtgtaaaatataaggccaagctgattggcattgatgatgtgccagatgcaagaggggataaaatgagccaagactctatgatgaaactaaagggaatggcggcagctggtcggtctcagggacaacacaaacaaaggatctgggtcaacatttccctttctgggataaaaataattgatgagaaaactggggtaatagagcatgaacatccagtaaataagatttctttcattgcccgtgatgtgacagacaaccgggcatttggttacgtgtgtggaggagaaggccagcatcagttttttgccataaaaaccgggcaacaggctgaaccattagttgttgatcttaaagacctttttcaagttatctataatgtaaagaaaaaggaagaagaaaagaaaaagatagaggaagccagcaaagcagttgagaatgggagtgaggccctaatgattctagatgaccaaactaacaaactgaaatcgggtgttgaccagatggatttgtttggggacatgtctacacctcctgacctaaatagtccaacagaaagcaaagatatcctgttagtggatctaaactctgaaatcgacaccaatcagaattctttaagagaaaatccattcttaacaaacggcatcacctcctgttctcttcctcgaccaacgcctcaggcatccttcttgcctgaaaatgccttttctgccaatctcaacttctttcccacccctaatcctgatcctttccgtgacgatcctttcacacagccagaccaatcgacaccttcttcgtttgattctctcaaatctccagatcagaagaaagagaattcgagtagctcgtctactccgctgagtaatgggcccctgaatggtgatgttgactactttggtcagcaatttgaccagatctctaaccggactggcaaacaggaagctcaggcaggcccatggcccttttcaagttcgcaaacccagccagcagtgagaactcaaaatggggtatctgaaagagaacagaacggcttctctgtcaaatcctccccgaacccttttgtgggaagccctcccaaaggactgtccatacagaatggcgtaaagcaggacttggaaagctctgtccagtcctcaccacatgactccatagccattatcccacctccacaaagtaccaaaccaggaagaggcagaaggactgctaagtcttcagccaatgacttgcttgcatcagacatctttgctcctcccgtctcagaaccttcaggccaggcgtcacccacaggacaacctacagccctgcagcccaaccctctggatctcttcaaaacaagtgctcctgccccagtggggcccctggtgggtctaggtggtgtaactgtcacactccctcaggcaggaccatggaacacagcatctttggtcttcaatcagtccccttcaatggctccgggagccatgatgggtggtcaaccttcaggttttagtcagcccgtcatttttggtacaagtccagctgtttcaggttggaaccagccttcaccctttgcagcctcaactccccctccagtgcctgttgtctggggcccttctgcatctgtggcacccaatgcttggtcaacaacaagccctttggggaatccttttcagagcaatatttttccagctcctgctgtgtccactcagcccccatccatgcactcctctctcctggtcactcctcctcagccacctcccagagctggccctcccaaggacatctccagtgatgccttcactgccttagacccacttggggataaagagatcaaggatgtgaaagaaatgtttaaggatttccaactgcggcagccacctgctgtgcccgcgcggaagggagagcagacttcttctgggactttgagtgcctttgccagttatttcaacagcaaggttggcattcctcaggagaatgcagaccatgatgactttgatgctaatcaactattgaacaagatcaatgaaccaccaaagccagctcccagacaagtttccctgccagttaccaaatctactgacaatgcatttgagaaccctttctttaaagattcttttggttcatcacaagcctctgtggcttcttctcaacctgtatcttctgagatgtatagggatccatttggaaatccttttgcctaaattctgaacttggtctgcagaccatccagaggaataaaaaggttggccttagtagtcaaaaacaaagctgatagccagacacgttctgatttctgcccttgttccagctttgacgtattatctgttgccttatttctcattgcctcttctacttgtaaaatgcttttcactttctgtctaggttaaagctaaactgaatctatggctttaaataaattaagatcctaaactctctagcttaagtgtaaatgaagtacagtagtttccctactgaaccctgcctcttgtgtccctggaaccttctagaacacctgccttctaccctctggttgggagatgcagccaccacatcccttcatatcatactgttttgaataaattttcaaatccttattgttcagagttgtttgggggttctgtttcagagcataaaacctaaaggttatagtagaacaaggcaccttcttaaaagaaatcttgcttcagaccatcagttacagagaatttctaaagtaaaattgaagcaactacaacttctccttagacactttggaatctaaccacttaaggacctttttaaagagatagcttctcttctttctgaagatcaatttctcccaaggccaagattgtccttttctcccatttcttgctagctattgcaaatgagggaagaacattattcatctctcctccccttttttttctgattcttttttcagtcagttttgctcctgggttcaagtagtattaccaccctttcacaagcaacagactctcacagggcaaaaaaaaaaaaaaatctaatgattcacagacagatctggagcctctcttcattctcagtaattgctagtcccaagaactagaattgcaaatgggcacaacctatatccttcctgtggaagaggaggccactctcttgagctgaagttccagaagagcagttaatgttcaagagaaattgaactcaactcagcaacaaaggactctattttgaagagcaacatatcacaaagctaaatgtgattgtgccaaacacattaggtgcttatttggggtcatgctaggcctttatcaagtaactggaaaacttttcttgcagccacaatctcaatgtcgttagtaggaagataagaggggagaaaaagctgtagaacaaatgtttggggttaccattgaaaatctaatgtctgcaatatttttctcctcacaacttggaaacgttcccagttcattttcagtcctgttgtgagcacagttctgaagggtttattattgtcaaaataagttttgttttgttttgtttatgttgggtttttaatgttgtctcttgacccttaatgctcaggttcttgtgggagttaatcagccacatccaacgttaccttgagggggaagaagagggtgatgctcagaagctaaacaagacaggggccacatgaccctctattgattagccccaagtagaaagtcctgtggttttatgtttaatggtaatagttgatcatatatggcataattttctatcagcttcctactcagtcactataaacacagacttgaaatagtactttaaatgtccaaatacctaaatgtgctaaactggaggtaactatttctaggtagttgaatttttgaaagtcatgatcagccacacaactgttttgtacatacttattttctcatgcacttttctgtatgcaaataaagctataaatttactcatttcaataaactggagtggcagaaaaaaaaacncanaacnnacaaaaacaaaaaaccacaaaaaccagaacaaagg

SEQ ID NO: 427016 - DNA, 4326 bp, Homo sapiens
ttatttgcacccgccccccgcccgcgtcggtctggggcttttgacttctccccgaacacatttcccctcccgtcgctgggtccctgcgatcgcccccagctggtggggctcgcggagctcaggggagcggggtcctctgcgccgctgcagcgcgagttaataaacagttaagtttggaagactctgcagacacgttgagggggagttaccaagcccaggcagcaaaaacatcctggcacattcctggggagtcctcagctgccagcatctgattagaaccatatctctcgccgggagtggccgcgcggctccgaagctcccggccggcggctatttaagcgaggcccgccgcatccgctgcgctgtagcctggaggctccgggcgcggggaagtcatgctcgcttcacggaggcaatagctagccggtgtctgtgggaggttatgtttatttgagacttctccatcgggatcgcctggtgtcaccaagtgtccactggtactgaggtttgctgcctgccttcttgccatgtctaacgaagtagaaacaagtgcaaccaatggtcagcccgaccaacaggccgcaccaaaagcaccctcaaagaaggaaaaaaagaaaggccctgaaaagacagatgaatatctcttagcaaggttcaaaggcgatggtgtaaaatataaggccaagctgattggcattgatgatgtgccagatgcaagaggggataaaatgagccaagactctatgatgaaactaaagggaatggcggcagctggtcggtctcagggacaacacaaacaaaggatctgggtcaacatttccctttctgggataaaaataattgatgagaaaactggggtaatagagcatgaacatccagtaaataagatttctttcattgcccgtgatgtgacagacaaccgggcatttggttacgtgtgtggaggagaaggccagcatcagttttttgccataaaaaccgggcaacaggctgaaccattagttgttgatcttaaagacctttttcaagttatctataatgtaaagaaaaaggaagaagaaaagaaaaagatagaggaagccagcaaagcagttgagaatgggagtgaggccctaatgattctagatgaccaaactaacaaactgaaatcgggtgttgaccagatggatttgtttggggacatgtctacacctcctgacctaaatagtccaacagaaagcaaagatatcctgttagtggatctaaactctgaaatcgacaccaatcagaattctttaagagaaaatccattcttaacaaacggcatcacctcctgttctcttcctcgaccaacgcctcaggcatccttcttgcctgaaaatgccttttctgccaatctcaacttctttcccacccctaatcctgatcctttccgtgacgatcctttcacacagccagaccaatcgacaccttcttcgtttgattctctcaaatctccagatcagaagaaagagaattcgagtagctcgtctactccgctgagtaatgggcccctgaatggtgatgttgactactttggtcagcaatttgaccagatctctaaccggactggcaaacaggaagctcaggcaggcccatggcccttttcaagttcgcaaacccagccagcagtgagaactcaaaatggggtatctgaaagagaacagaacggcttctctgtcaaatcctccccgaacccttttgtgggaagccctcccaaaggactgtccatacagaatggcgtaaagcaggacttggaaagctctgtccagtcctcaccacatgactccatagccattatcccacctccacaaagtaccaaaccaggaagaggcagaaggactgctaagtcttcagccaatgacttgcttgcatcagacatctttgctcctcccgtctcagaaccttcaggccaggcgtcacccacaggacaacctacagccctgcagcccaaccctctggatctcttcaaaacaagtgctcctgccccagtggggcccctggtgggtctaggtggtgtaactgtcacactccctcaggcaggaccatggaacacagcatctttggtcttcaatcagtccccttcaatggctccgggagccatgatgggtggtcaaccttcaggttttagtcagcccgtcatttttggtacaagtccagctgtttcaggttggaaccagccttcaccctttgcagcctcaactccccctccagtgcctgttgtctggggcccttctgcatctgtggcacccaatgcttggtcaacaacaagccctttggggaatccttttcagagcaatatttttccagctcctgctgtgtccactcagcccccatccatgcactcctctctcctggtcactcctcctcagccacctcccagagctggccctcccaaggacatctccagtgatgccttcactgccttagacccacttggggataaagagatcaaggatgtgaaagaaatgtttaaggatttccaactgcggcagccacctgctgtgcccgcgcggaagggagagcagacttcttctgggactttgagtgcctttgccagttatttcaacagcaaggttggcattcctcaggagaatgcagaccatgatgactttgatgctaatcaactattgaacaagatcaatgaaccaccaaagccagctcccagacaagtttccctgccagttaccaaatctactgacaatgcatttgagaaccctttctttaaagattcttttggttcatcacaagcctctgtggcttcttctcaacctgtatcttctgagatgtatagggatccatttggaaatccttttgcctaaattctgaacttggtctgcagaccatccagaggaataaaaaggttggccttagtagtcaaaaacaaagctgatagccagacacgttctgatttctgcccttgttccagctttgacgtattatctgttgccttatttctcattgcctcttctacttgtaaaatgcttttcactttctgtctaggttaaagctaaactgaatctatggctttaaataaattaagatcctaaactctctagcttaagtgtaaatgaagtacagtagtttccctactgaaccctgcctcttgtgtccctggaaccttctagaacacctgccttctaccctctggttgggagatgcagccaccacatcccttcatatcatactgttttgaataaattttcaaatccttattgttcagagttgtttgggggttctgtttcagagcataaaacctaaaggttatagtagaacaaggcaccttcttaaaagaaatcttgcttcagaccatcagttacagagaatttctaaagtaaaattgaagcaactacaacttctccttagacactttggaatctaaccacttaaggacctttttaaagagatagcttctcttctttctgaagatcaatttctcccaaggccaagattgtccttttctcccatttcttgctagctattgcaaatgagggaagaacattattcatctctcctccccttttttttctgattcttttttcagtcagttttgctcctgggttcaagtagtattaccaccctttcacaagcaacagactctcacagggcaaaaaaaaaaaaaaatctaatgattcacagacagatctggagcctctcttcattctcagtaattgctagtcccaagaactagaattgcaaatgggcacaacctatatccttcctgtggaagaggaggccactctcttgagctgaagttccagaagagcagttaatgttcaagagaaattgaactcaactcagcaacaaaggactctattttgaagagcaacatatcacaaagctaaatgtgattgtgccaaacacattaggtgcttatttggggtcatgctaggcctttatcaagtaactggaaaacttttcttgcagccacaatctcaatgtcgttagtaggaagataagagggtgatgctcagaagctaaacaagacaggggccacatgaccctctattgattagccccaagtagaaagtcctgtggttttatgtttaatggtaatagttgatcatatatggcataattttctatcagcttcctactcagtcactataaacacagacttgaaatagtactttaaatgtccaaatacctaaatgtgctaaactggaggtaactatttctaggtagttgaatttttgaaagtcatgatcagccacacaactgttttgtacatacttattttctcatgcacttttctgtatgcaaataaagctataaatttactcatttcaataaactggagtggcagaa

SEQ ID NO: 427017 - DNA, 4529 bp, Homo sapiens
ttatttgcacccgccccccgcccgcgtcggtctggggcttttgacttctccccgaacacatttcccctcccgtcgctgggtccctgcgatcgcccccagctggtggggctcgcggagctcaggggagcggggtcctctgcgccgctgcagcgcgagttaataaacagttaagtttggaagactctgcagacacgttgagggggagttaccaagcccaggcagcaaaaacatcctggcacattcctggggagtcctcagctgccagcatctgattagaaccatatctctcgccgggagtggccgcgcggctccgaagctcccggccggcggctatttaagcgaggcccgccgcatccgctgcgctgtagcctggaggctccgggcgcggggaagtcatgctcgcttcacggaggcaatagctagccggtgtctgtgggaggttatgtttatttgagacttctccatcgggatcgcctggtgtcaccaagtgtccactggtactgaggtttgctgcctgccttcttgccatgtctaacgaagtagaaacaagtgcaaccaatggtcagcccgaccaacaggccgcaccaaaagcaccctcaaagaaggaaaaaaagaaaggccctgaaaagacagatgaatatctcttagcaaggttcaaaggcgatggtgtaaaatataaggccaagctgattggcattgatgatgtgccagatgcaagaggggataaaatgagccaagactctatgatgaaactaaagggaatggcggcagctggtcggtctcagggacaacacaaacaaaggatctgggtcaacatttccctttctgggataaaaataattgatgagaaaactggggtaatagagcatgaacatccagtaaataagatttctttcattgcccgtgatgtgacagacaaccgggcatttggttacgtgtgtggaggagaaggccagcatcagttttttgccataaaaaccgggcaacaggctgaaccattagttgttgatcttaaagacctttttcaagttatctataatgtaaagaaaaaggaagaagaaaagaaaaagatagaggaagccagcaaagcagttgagaatgggagtgaggccctaatgattctagatgaccaaactaacaaactgaaatcggaaagcaaagatatcctgttagtggatctaaactctgaaatcgacaccaatcagaattctttaagagaaaatccattcttaacaaacggcatcacctcctgttctcttcctcgaccaacgcctcaggcatccttcttgcctgaaaatgccttttctgccaatctcaacttctttcccacccctaatcctgatcctttccgtgacgatcctttcacacagccagaccaatcgacaccttcttcgtttgattctctcaaatctccagatcagaagaaagagaattcgagtagctcgtctactccgctgagtaatgggcccctgaatggtgatgttgactactttggtcagcaatttgaccagatctctaaccggactggcaaacaggaagctcaggcaggcccatggcccttttcaagttcgcaaacccagccagcagtgagaactcaaaatggggtatctgaaagagaacagaacggcttctctgtcaaatcctccccgaacccttttgtgggaagccctcccaaaggactgtccatacagaatggcgtaaagcaggacttggaaagctctgtccagtcctcaccacatgactccatagccattatcccacctccacaaagtaccaaaccaggaagaggcagaaggactgctaagtcttcagccaatgacttgcttgcatcagacatctttgctcctcccgtctcagaaccttcaggccaggcgtcacccacaggacaacctacagccctgcagcccaaccctctggatctcttcaaaacaagtgctcctgccccagtggggcccctggtgggtctaggtggtgtaactgtcacactccctcaggcaggaccatggaacacagcatctttggtcttcaatcagtccccttcaatggctccgggagccatgatgggtggtcaaccttcaggttttagtcagcccgtcatttttggtacaagtccagctgtttcaggttggaaccagccttcaccctttgcagcctcaactccccctccagtgcctgttgtctggggcccttctgcatctgtggcacccaatgcttggtcaacaacaagccctttggggaatccttttcagagcaatatttttccagctcctgctgtgtccactcagcccccatccatgcactcctctctcctggtcactcctcctcagccacctcccagagctggccctcccaaggacatctccagtgatgccttcactgccttagacccacttggggataaagagatcaaggatgtgaaagaaatgtttaaggatttccaactgcggcagccacctgctgtgcccgcgcggaagggagagcagacttcttctgggactttgagtgcctttgccagttatttcaacagcaaggttggcattcctcaggagaatgcagaccatgatgactttgatgctaatcaactattgaacaagatcaatgaaccaccaaagccagctcccagacaagtttccctgccagttaccaaatctactgacaatgcatttgagaaccctttctttaaagattcttttggttcatcacaagcctctgtggcttcttctcaacctgtatcttctgagatgtatagggatccatttggaaatccttttgcctaaattctgaacttggtctgcagaccatccagaggaataaaaaggttggccttagtagtcaaaaacaaagctgatagccagacacgttctgatttctgcccttgttccagctttgacgtattatctgttgccttatttctcattgcctcttctacttgtaaaatgcttttcactttctgtctaggttaaagctaaactgaatctatggctttaaataaattaagatcctaaactctctagcttaagtgtaaatgaagtacagtagtttccctactgaaccctgcctcttgtgtccctggaaccttctagaacacctgccttctaccctctggttgggagatgcagccaccacatcccttcatatcatactgttttgaataaattttcaaatccttattgttcagagttgtttgggggttctgtttcagagcataaaacctaaaggttatagtagaacaaggcaccttcttaaaagaaatcttgcttcagaccatcagttacagagaatttctaaagtaaaattgaagcaactacaacttctccttagacactttggaatctaaccacttaaggacctttttaaagagatagcttctcttctttctgaagatcaatttctcccaaggccaagattgtccttttctcccatttcttgctagctattgcaaatgagggaagaacattattcatctctcctccccttttttttctgattcttttttcagtcagttttgctcctgggttcaagtagtattaccaccctttcacaagcaacagactctcacagggcaaaaaaaaaaaaaaatctaatgattcacagacagatctggagcctctcttcattctcagtaattgctagtcccaagaactagaattgcaaatgggcacaacctatatccttcctgtggaagaggaggccactctcttgagctgaagttccagaagagcagttaatgttcaagagaaattgaactcaactcagcaacaaaggactctattttgaagagcaacatatcacaaagctaaatgtgattgtgccaaacacattaggtgcttatttggggtcatgctaggcctttatcaagtaactggaaaacttttcttgcagccacaatctcaatgtcgttagtaggaagataagaggggagaaaaagctgtagaacaaatgtttggggttaccattgaaaatctaatgtctgcaatatttttctcctcacaacttggaaacgttcccagttcattttcagtcctgttgtgagcacagttctgaagggtttattattgtcaaaataagttttgttttgttttgtttatgttgggtttttaatgttgtctcttgacccttaatgctcaggttcttgtgggagttaatcagccacatccaacgttaccttgagggggaagaagagggtgatgctcagaagctaaacaagacaggggccacatgaccctctattgattagccccaagtagaaagtcctgtggttttatgtttaatggtaatagttgatcatatatggcataattttctatcagcttcctactcagtcactataaacacagacttgaaatagtactttaaatgtccaaatacctaaatgtgctaaactggaggtaactatttctaggtagttgaatttttgaaagtcatgatcagccacacaactgttttgtacatacttattttctcatgcacttttctgtatgcaaataaagctataaatttactcatttcaataaactggagtggcagaa

SEQ ID NO: 427018 - DNA, 5101 bp, Homo sapiens
ttatttgcacccgccccccgcccgcgtcggtctggggcttttgacttctccccgaacacatttcccctcccgtcgctgggtccctgcgatcgcccccagctggtggggctcgcggagctcaggggagcggggtcctctgcgccgctgcagcgcgagttaataaacagttaagtttggaagactctgcagacacgttgagggggagttaccaagcccaggcagcaaaaacatcctggcacattcctggggagtcctcagctgccagcatctgattagaaccatatctctcgccgggagtggccgcgcggctccgaagctcccggccggcggctatttaagcgaggcccgccgcatccgctgcgctgtagcctggaggctccgggcgcggggaagtcatgctcgcttcacggaggcaatagctagccggtgtctgtgggaggttatgtttatttgagacttctccatcgggatcgcctggtgtcaccaagtgtccactggtactgaggtttgctgcctgccttcttgccatgtctaacgaagtagaaacaagtgcaaccaatggtcagcccgaccaacaggccgcaccaaaagcaccctcaaagaaggaaaaaaagaaaggccctgaaaagacagatgaatatctcttagcaaggttcaaaggcgatggtgtaaaatataaggccaagctgattggcattgatgatgtgccagatgcaagaggggataaaatgagccaagactctatgatgaaactaaagggaatggcggcagctggtcggtctcagggacaacacaaacaaaggatctgggtcaacatttccctttctgggataaaaataattgatgagaaaactggggtaatagagcatgaacatccagtaaataagatttctttcattgcccgtgatgtgacagacaaccgggcatttggttacgtgtgtggaggagaaggccagcatcagttttttgccataaaaaccgggcaacaggtgagctctaagtcttgacatagacctggggacttgtcctctgtggacattggagtgtctgtcactcaactaaaagatttactggaaataattggatgtaagagggctaaataataattccgagaatgactatttttattggcctatggaatcttttaaaaatgtcattgatagctatgcactgctgtgtgccacaggattgtgagaatggaccttcttataaagtgaatactgacttcacaacagtggtgaattattctcaggaaccttaaaggacttcaaatatgatcatgatacctcttgttttgtctaaatacttattaaccctgctgtcttttatatacctaagggtgaggattgggttggtggtgatcccctataagccagcagagggtagtaaggcgttttaagattaaaaaaaatcccagtatgaattataattgatagcagacaaaggaaataaaatactaaaattaaaatactgataacagtgctttcccttactgcaggctgaaccattagttgttgatcttaaagacctttttcaagttatctataatgtaaagaaaaaggaagaagaaaagaaaaagatagaggaagccagcaaagcagttgagaatgggagtgaggccctaatgattctagatgaccaaactaacaaactgaaatcgggtgttgaccagatggatttgtttggggacatgtctacacctcctgacctaaatagtccaacagaaagcaaagatatcctgttagtggatctaaactctgaaatcgacaccaatcagaattctttaagagaaaatccattcttaacaaacggcatcacctcctgttctcttcctcgaccaacgcctcaggcatccttcttgcctgaaaatgccttttctgccaatctcaacttctttcccacccctaatcctgatcctttccgtgacgatcctttcacacagccagaccaatcgacaccttcttcgtttgattctctcaaatctccagatcagaagaaagagaattcgagtagctcgtctactccgctgagtaatgggcccctgaatggtgatgttgactactttggtcagcaatttgaccagatctctaaccggactggcaaacaggaagctcaggcaggcccatggcccttttcaagttcgcaaacccagccagcagtgagaactcaaaatggggtatctgaaagagaacagaacggcttctctgtcaaatcctccccgaacccttttgtgggaagccctcccaaaggactgtccatacagaatggcgtaaagcaggacttggaaagctctgtccagtcctcaccacatgactccatagccattatcccacctccacaaagtaccaaaccaggaagaggcagaaggactgctaagtcttcagccaatgacttgcttgcatcagacatctttgctcctcccgtctcagaaccttcaggccaggcgtcacccacaggacaacctacagccctgcagcccaaccctctggatctcttcaaaacaagtgctcctgccccagtggggcccctggtgggtctaggtggtgtaactgtcacactccctcaggcaggaccatggaacacagcatctttggtcttcaatcagtccccttcaatggctccgggagccatgatgggtggtcaaccttcaggttttagtcagcccgtcatttttggtacaagtccagctgtttcaggttggaaccagccttcaccctttgcagcctcaactccccctccagtgcctgttgtctggggcccttctgcatctgtggcacccaatgcttggtcaacaacaagccctttggggaatccttttcagagcaatatttttccagctcctgctgtgtccactcagcccccatccatgcactcctctctcctggtcactcctcctcagccacctcccagagctggccctcccaaggacatctccagtgatgccttcactgccttagacccacttggggataaagagatcaaggatgtgaaagaaatgtttaaggatttccaactgcggcagccacctgctgtgcccgcgcggaagggagagcagacttcttctgggactttgagtgcctttgccagttatttcaacagcaaggttggcattcctcaggagaatgcagaccatgatgactttgatgctaatcaactattgaacaagatcaatgaaccaccaaagccagctcccagacaagtttccctgccagttaccaaatctactgacaatgcatttgagaaccctttctttaaagattcttttggttcatcacaagcctctgtggcttcttctcaacctgtatcttctgagatgtatagggatccatttggaaatccttttgcctaaattctgaacttggtctgcagaccatccagaggaataaaaaggttggccttagtagtcaaaaacaaagctgatagccagacacgttctgatttctgcccttgttccagctttgacgtattatctgttgccttatttctcattgcctcttctacttgtaaaatgcttttcactttctgtctaggttaaagctaaactgaatctatggctttaaataaattaagatcctaaactctctagcttaagtgtaaatgaagtacagtagtttccctactgaaccctgcctcttgtgtccctggaaccttctagaacacctgccttctaccctctggttgggagatgcagccaccacatcccttcatatcatactgttttgaataaattttcaaatccttattgttcagagttgtttgggggttctgtttcagagcataaaacctaaaggttatagtagaacaaggcaccttcttaaaagaaatcttgcttcagaccatcagttacagagaatttctaaagtaaaattgaagcaactacaacttctccttagacactttggaatctaaccacttaaggacctttttaaagagatagcttctcttctttctgaagatcaatttctcccaaggccaagattgtccttttctcccatttcttgctagctattgcaaatgagggaagaacattattcatctctcctccccttttttttctgattcttttttcagtcagttttgctcctgggttcaagtagtattaccaccctttcacaagcaacagactctcacagggcaaaaaaaaaaaaaaatctaatgattcacagacagatctggagcctctcttcattctcagtaattgctagtcccaagaactagaattgcaaatgggcacaacctatatccttcctgtggaagaggaggccactctcttgagctgaagttccagaagagcagttaatgttcaagagaaattgaactcaactcagcaacaaaggactctattttgaagagcaacatatcacaaagctaaatgtgattgtgccaaacacattaggtgcttatttggggtcatgctaggcctttatcaagtaactggaaaacttttcttgcagccacaatctcaatgtcgttagtaggaagataagaggggagaaaaagctgtagaacaaatgtttggggttaccattgaaaatctaatgtctgcaatatttttctcctcacaacttggaaacgttcccagttcattttcagtcctgttgtgagcacagttctgaagggtttattattgtcaaaataagttttgttttgttttgtttatgttgggtttttaatgttgtctcttgacccttaatgctcaggttcttgtgggagttaatcagccacatccaacgttaccttgagggggaagaagagggtgatgctcagaagctaaacaagacaggggccacatgaccctctattgattagccccaagtagaaagtcctgtggttttatgtttaatggtaatagttgatcatatatggcataattttctatcagcttcctactcagtcactataaacacagacttgaaatagtactttaaatgtccaaatacctaaatgtgctaaactggaggtaactatttctaggtagttgaatttttgaaagtcatgatcagccacacaactgttttgtacatacttattttctcatgcacttttctgtatgcaaataaagctataaatttactcatttcaataaactggagtggcagaa

SEQ ID NO: 427019 - DNA, 3509 bp, Homo sapiens
tggctggatgaggccggggtaatcggccgaggtatgatctagatgaccaaactaacaaactgaaatcgggtgttgaccagatggatttgtttggggacatgtctacacctcctgacctaaatagtccaacagaaagcaaagatatcctgttagtggatctaaactctgaaatcgacaccaatcagaattctttaagagaaaatccattcttaacaaacggcatcacctcctgttctcttcctcgaccaacgcctcaggcatccttcttgcctgaaaatgccttttctgccaatctcaacttctttcccacccctaatcctgatcctttccgtgacgatcctttcacacagccagaccaatcgacaccttcttcgtttgattctctcaaatctccagatcagaagaaagagaattcgagtagctcgtctactccgctgagtaatgggcccctgaatggtgatgttgactactttggtcagcaatttgaccagatctctaaccggactggcaaacaggaagctcaggcaggcccatggcccttttcaagttcgcaaacccagccagcagtgagaactcaaaatggggtatctgaaagagaacagaacggcttctctgtcaaatcctccccgaacccttttgtgggaagccctcccaaaggactgtccatacagaatggcgtaaagcaggacttggaaagctctgtccagtcctcaccacatgactccatagccattatcccacctccacaaagtaccaaaccaggaagaggcagaaggactgctaagtcttcagccaatgacttgcttgcatcagacatctttgctcctcccgtctcagaaccttcaggccaggcgtcacccacaggacaacctacagccctgcagcccaaccctctggatctcttcaaaacaagtgctcctgccccagtggggcccctggtgggtctaggtggtgtaactgtcacactccctcaggcaggaccatggaacacagcatctttggtcttcaatcagtccccttcaatggctccgggagccatgatgggtggtcaaccttcaggttttagtcagcccgtcatttttggtacaagtccagctgtttcaggttggaaccagccttcaccctttgcagcctcaactccccctccagtgcctgttgtctggggcccttctgcatctgtggcacccaatgcttggtcaacaacaagccctttggggaatccttttcagagcaatatttttccagctcctgctgtgtccactcagcccccatccatgcactcctctctcctggtcactcctcctcagccacctcccagagctggccctcccaaggacatctccagtgatgccttcactgccttagacccacttggggataaagagatcaaggatgtgaaagaaatgtttaaggatttccaactgcggcagccacctgctgtgcccgcgcggaagggagagcagacttcttctgggactttgagtgcctttgccagttatttcaacagcaaggttggcattcctcaggagaatgcagaccatgatgactttgatgctaatcaactattgaacaagatcaatgaaccaccaaagccagctcccagacaagtttccctgccagttaccaaatctactgacaatgcatttgagaaccctttctttaaagattcttttggttcatcacaagcctctgtggcttcttctcaacctgtatcttctgagatgtatagggatccatttggaaatccttttgcctaaattctgaacttggtctgcagaccatccagaggaataaaaaggttggccttagtagtcaaaaacaaagctgatagccagacacgttctgatttctgcccttgttccagctttgacgtattatctgttgccttatttctcattgcctcttctacttgtaaaatgcttttcactttctgtctaggttaaagctaaactgaatctatggctttaaataaattaagatcctaaactctctagcttaagtgtaaatgaagtacagtagtttccctactgaaccctgcctcttgtgtccctggaaccttctagaacacctgccttctaccctctggttgggagatgcagccaccacatcccttcatatcatactgttttgaataaattttcaaatccttattgttcagagttgtttgggggttctgtttcagagcataaaacctaaaggttatagtagaacaaggcaccttcttaaaagaaatcttgcttcagaccatcagttacagagaatttctaaagtaaaattgaagcaactacaacttctccttagacactttggaatctaaccacttaaggacctttttaaagagatagcttctcttctttctgaagatcaatttctcccaaggccaagattgtccttttctcccatttcttgctagctattgcaaatgagggaagaacattattcatctctcctccccttttttttctgattcttttttcagtcagttttgctcctgggttcaagtagtattaccaccctttcacaagcaacagactctcacagggcaaaaaaaaaaaaaaatctaatgattcacagacagatctggagcctctcttcattctcagtaattgctagtcccaagaactagaattgcaaatgggcacaacctatatccttcctgtggaagaggaggccactctcttgagctgaagttccagaagagcagttaatgttcaagagaaattgaactcaactcagcaacaaaggactctattttgaagagcaacatatcacaaagctaaatgtgattgtgccaaacacattaggtgcttatttggggtcatgctaggcctttatcaagtaactggaaaacttttcttgcagccacaatctcaatgtcgttagtaggaagataagaggggagaaaaagctgtagaacaaatgtttggggttaccattgaaaatctaatgtctgcaatatttttctcctcacaacttggaaacgttcccagttcattttcagtcctgttgtgagcacagttctgaagggtttattattgtcaaaataagttttgttttgttttgtttatgttgggtttttaatgttgtctcttgacccttaatgctcaggttcttgtgggagttaatcagccacatccaacgttaccttgagggggaagaagagggtgatgctcagaagctaaacaagacaggggccacatgaccctctattgattagccccaagtagaaagtcctgtggttttatgtttaatggtaatagttgatcatatatggcataattttctatcagcttcctactcagtcactataaacacagacttgaaatagtactttaaatgtccaaatacctaaatgtgctaaactggaggtaactatttctaggtagttgaatttttgaaagtcatgatcagccacacaactgttttgtacatacttattttctcatgcacttttctgtatgcaaataaagctataaatttactcatttcaataaactggagtggcagaa

SEQ ID NO: 427020 - DNA, 3536 bp, Homo sapiens
  misc_feature (40)..(40): n is a, c, g, or t
  misc_feature (144)..(144): n is a, c, g, or t
gggatgaggaacgtcactcctcttcgtaaatcccaacccnatatcatggtttcccatttcactcgggataaaatacaaccactttaacctgccctacataccctacttgatctggcccctggctagccactctacactcctganctaaatagtccacagaaagcaaagatatcctgttagtggatctaaactctgaaatcgacaccaatcagaattctttaagagaaaatccattcttaacaaacggcatcacctcctgttctcttcctcgaccaacgcctcaggcatccttcttgcctgaaaatgccttttctgccaatctcaacttctttcccacccctaatcctgatcctttccgtgacgatcctttcacacagccagaccaatcgacaccttcttcgtttgattctctcaaatctccagatcagaagaaagagaattcgagtagctcgtctactccgctgagtaatgggcccctgaatggtgatgttgactactttggtcagcaatttgaccagatctctaaccggactggcaaacaggaagctcaggcaggcccatggcccttttcaagttcgcaaacccagccagcagtgagaactcaaaatggggtatctgaaagagaacagaacggcttctctgtcaaatcctccccgaacccttttgtgggaagccctcccaaaggactgtccatacagaatggcgtaaagcaggacttggaaagctctgtccagtcctcaccacatgactccatagccattatcccacctccacaaagtaccaaaccaggaagaggcagaaggactgctaagtcttcagccaatgacttgcttgcatcagacatctttgctcctcccgtctcagaaccttcaggccaggcgtcacccacaggacaacctacagccctgcagcccaaccctctggatctcttcaaaacaagtgctcctgccccagtggggcccctggtgggtctaggtggtgtaactgtcacactccctcaggcaggaccatggaacacagcatctttggtcttcaatcagtccccttcaatggctccgggagccatgatgggtggtcaaccttcaggttttagtcagcccgtcatttttggtacaagtccagctgtttcaggttggaaccagccttcaccctttgcagcctcaactccccctccagtgcctgttgtctggggcccttctgcatctgtggcacccaatgcttggtcaacaacaagccctttggggaatccttttcagagcaatatttttccagctcctgctgtgtccactcagcccccatccatgcactcctctctcctggtcactcctcctcagccacctcccagagctggccctcccaaggacatctccagtgatgccttcactgccttagacccacttggggataaagagatcaaggatgtgaaagaaatgtttaaggatttccaactgcggcagccacctgctgtgcccgcgcggaagggagagcagacttcttctgggactttgagtgcctttgccagttatttcaacagcaaggttggcattcctcaggagaatgcagaccatgatgactttgatgctaatcaactattgaacaagatcaatgaaccaccaaagccagctcccagacaagtttccctgccagttaccaaatctactgacaatgcatttgagaaccctttctttaaagattcttttggttcatcacaagcctctgtggcttcttctcaacctgtatcttctgagatgtatagggatccatttggaaatccttttgcctaaattctgaacttggtctgcagaccatccagaggaataaaaaggttggccttagtagtcaaaaacaaagctgatagccagacacgttctgatttctgcccttgttccagctttgacgtattatctgttgccttatttctcattgcctcttctacttgtaaaatgcttttcactttctgtctaggttaaagctaaactgaatctatggctttaaataaattaagatcctaaactctctagcttaagtgtaaatgaagtacagtagtttccctactgaaccctgcctcttgtgtccctggaaccttctagaacacctgccttctaccctctggttgggagatgcagccaccacatcccttcatatcatactgttttgaataaattttcaaatccttattgttcagagttgtttgggggttctgtttcagagcataaaacctaaaggttatagtagaacaaggcaccttcttaaaagaaatcttgcttcagaccatcagttacagagaatttctaaagtaaaattgaagcaactacaacttctccttagacactttggaatctaaccacttaaggacctttttaaagagatagcttctcttctttctgaagatcaatttctcccaaggccaagattgtccttttctcccatttcttgctagctattgcaaatgagggaagaacattattcatctctcctccccttttttttctgattcttttttcagtcagttttgctcctgggttcaagtagtattaccaccctttcacaagcaacagactctcacagggcaaaaaaaaaaaaaaatctaatgattcacagacagatctggagcctctcttcattctcagtaattgctagtcccaagaactagaattgcaaatgggcacaacctatatccttcctgtggaagaggaggccactctcttgagctgaagttccagaagagcagttaatgttcaagagaaattgaactcaactcagcaacaaaggactctattttgaagagcaacatatcacaaagctaaatgtgattgtgccaaacacattaggtgcttatttggggtcatgctaggcctttatcaagtaactggaaaacttttcttgcagccacaatctcaatgtcgttagtaggaagataagaggggagaaaaagctgtagaacaaatgtttggggttaccattgaaaatctaatgtctgcaatatttttctcctcacaacttggaaacgttcccagttcattttcagtcctgttgtgagcacagttctgaagggtttattattgtcaaaataagttttgttttgttttgtttatgttgggtttttaatgttgtctcttgacccttaatgctcaggttcttgtgggagttaatcagccacatccaacgttaccttgagggggaagaagagggtgatgctcagaagctaaacaagacaggggccacatgaccctctattgattagccccaagtagaaagtcctgtggttttatgtttaatggtaatagttgatcatatatggcataattttctatcagcttcctactcagtcactataaacacagacttgaaatagtactttaaatgtccaaatacctaaatgtgctaaactggaggtaactatttctaggtagttgaatttttgaaagtcatgatcagccacacaactgttttgtacatacttattttctcatgcacttttctgtatgcaaataaagctataaatttactcatttcaataaactggagtggcagaa

SEQ ID NO: 427021 - DNA, 4231 bp, Homo sapiens
ttatttgcacccgccccccgcccgcgtcggtctggggcttttgacttctccccgaacacatttcccctcccgtcgctgggtccctgcgatcgcccccagctggtggggctcgcggagctcaggggagcggggtcctctgcgccgctgcagcgcgagttaataaacagttaagtttggaagactctgcagacacgttgagggggagttaccaagcccaggcagcaaaaacatcctggcacattcctggggagtcctcagctgccagcatctgattagaaccatatctctcgccgggagtggccgcgcggctccgaagctcccggccggcggctatttaagcgaggcccgccgcatccgctgcgctgtagcctggaggctccgggcgcggggaagtcatgctcgcttcacggaggcaatagctagccggtgtctgtgggaggttatgtttatttgagacttctccatcgggatcgcctggtgtcaccaagtgtccactggtactgaggtttgctgcctgccttcttgccatgtctaacgaagtagaaacaagtgcaaccaatggtcagcccgaccaacaggccgcaccaaaagcaccctcaaagaaggaaaaaaagaaaggccctgaaaagacagatgaatatctcttagcaaggttcaaaggcgatggtgtaaaatataaggccaagctgattggcattgatgatgtgccagatgcaagaggggataaaatgagccaagactctatgatgaaactaaagggaatggcggcagctggtcggtctcagggacaacacaaacaaaggatctgggtcaacatttccctttctgggataaaaataattgatgagaaaactggggtaatagagcatgaacatccagtaaataagatttctttcattgcccgtgatgtgacagacaaccgggcatttggttacgtgtgtggaggagaaggccagcatcagttttttgccataaaaaccgggcaacaggctgaaccattagttgttgatcttaaagacctttttcaagttatctataatgtaaagaaaaaggaagaagaaaagaaaaagatagaggaagccagcaaagcagttgagaatgggagtgaggccctaatgattctagatgaccaaactaacaaactgaaatcgggtgttgaccagatggatttgtttggggacatgtctacacctcctgacctaaatagtccaacagaaagcaaagatatcctgttagtggatctaaactctgaaatcgacaccaatcagaattctttaagagaaaatccattcttaacaaacggcatcacctcctgttctcttcctcgaccaacgcctcaggcatccttcttgcctgaaaatgccttttctgccaatctcaacttctttcccacccctaatcctgatcctttccgtgacgatcctttcacacagccagaccaatcgacaccttcttcgtttgattctctcaaatctccagatcagaagaaagagaattcgagtagctcgtctactccgctgagtaatgggcccctgaatggtgatgttgactactttggtcagcaatttgaccagatctctaaccggactggcaaacaggaagctcaggcaggcccatggcccttttcaagttcgcaaacccagccagcagtgagaactcaaaatggggtatctgaaagagaacagaacggcttctctgtcaaatcctccccgaacccttttgtgggaagccctcccaaaggactgtccatacagaatggcgtaaagcaggacttggaaagctctgtccagtcctcaccacatgactccatagccattatcccacctccacaaagtaccaaaccaggaagaggcagaaggactgctaaggtgaattgtcttctccacatatccattagcagagtgcatgttcggtaccaaagggtggtgtgatgcaagctctctttcctgctgctctcgtagtttcctgtgttgctgtgaaatagaaggtgggataaggcactttggttctccaggagtactttcctcagccacctcccagagctggccctcccaaggacatctccagtgatgccttcactgccttagacccacttggggataaagagatcaaggatgtgaaagaaatgtttaaggatttccaactgcggcagccacctgctgtgcccgcgcggaagggagagcagacttcttctgggactttgagtgcctttgccagttatttcaacagcaaggttggcattcctcaggagaatgcagaccatgatgactttgatgctaatcaactattgaacaagatcaatgaaccaccaaagccagctcccagacaagtttccctgccagttaccaaatctactgacaatgcatttgagaaccctttctttaaagattcttttggttcatcacaagcctctgtggcttcttctcaacctgtatcttctgagatgtatagggatccatttggaaatccttttgcctaaattctgaacttggtctgcagaccatccagaggaataaaaaggttggccttagtagtcaaaaacaaagctgatagccagacacgttctgatttctgcccttgttccagctttgacgtattatctgttgccttatttctcattgcctcttctacttgtaaaatgcttttcactttctgtctaggttaaagctaaactgaatctatggctttaaataaattaagatcctaaactctctagcttaagtgtaaatgaagtacagtagtttccctactgaaccctgcctcttgtgtccctggaaccttctagaacacctgccttctaccctctggttgggagatgcagccaccacatcccttcatatcatactgttttgaataaattttcaaatccttattgttcagagttgtttgggggttctgtttcagagcataaaacctaaaggttatagtagaacaaggcaccttcttaaaagaaatcttgcttcagaccatcagttacagagaatttctaaagtaaaattgaagcaactacaacttctccttagacactttggaatctaaccacttaaggacctttttaaagagatagcttctcttctttctgaagatcaatttctcccaaggccaagattgtccttttctcccatttcttgctagctattgcaaatgagggaagaacattattcatctctcctccccttttttttctgattcttttttcagtcagttttgctcctgggttcaagtagtattaccaccctttcacaagcaacagactctcacagggcaaaaaaaaaaaaaaatctaatgattcacagacagatctggagcctctcttcattctcagtaattgctagtcccaagaactagaattgcaaatgggcacaacctatatccttcctgtggaagaggaggccactctcttgagctgaagttccagaagagcagttaatgttcaagagaaattgaactcaactcagcaacaaaggactctattttgaagagcaacatatcacaaagctaaatgtgattgtgccaaacacattaggtgcttatttggggtcatgctaggcctttatcaagtaactggaaaacttttcttgcagccacaatctcaatgtcgttagtaggaagataagaggggagaaaaagctgtagaacaaatgtttggggttaccattgaaaatctaatgtctgcaatatttttctcctcacaacttggaaacgttcccagttcattttcagtcctgttgtgagcacagttctgaagggtttattattgtcaaaataagttttgttttgttttgtttatgttgggtttttaatgttgtctcttgacccttaatgctcaggttcttgtgggagttaatcagccacatccaacgttaccttgagggggaagaagagggtgatgctcagaagctaaacaagacaggggccacatgaccctctattgattagccccaagtagaaagtcctgtggttttatgtttaatggtaatagttgatcatatatggcataattttctatcagcttcctactcagtcactataaacacagacttgaaatagtactttaaatgtccaaatacctaaatgtgctaaactggaggtaactatttctaggtagttgaatttttgaaagtcatgatcagccacacaactgttttgtacatacttattttctcatgcacttttctgtatgcaaataaagctataaatttactcatttcaataaactggagtggcagaa

SEQ ID NO: 427022 - DNA, 3354 bp, Homo sapiens
  misc_feature (20)..(20): n is a, c, g, or t
tgaatgagctggtacctctngatgcaagtgtccatggtggtggtataaaattctcgagcttatctcctcttttaaatactgagtaaatacataagctttttctaagcttatgtatttactattaccactatgatctcagctttatttaagagcaatttaaaatgcagttcccataggtgtctttttttacctctcctaagaatatacaggcttgcctggattaagaccctatgatctctatgtagactgacttaaaatccaatggaatgaacaaaaatatttaggatgcttattggtagttgccccttttacacacttgctcccccaacttcaagcatttagcgatgagaccagaccaatgtgagtgtgtaaaggaatatagtagatttcactttgcaagtcctaggtagtgtcagacactaagactcagtagtccgtccgttgtaggaatctgtgtctttttttggaggactctttttctgtagtagtagttgttgttgttcatctgtcaagaaaaaagttttcctttttgtggctctcaaattggggtatagggtaggagacaaaatgaggctgtatttcactgttagtgagtaactaaggcttctccctccctccctgtcctgtcagtcttcagccaatgacttgcttgcatcagacatctttgctcctcccgtctcagaaccttcaggccaggcgtcacccacaggacaacctacagccctgcagcccaaccctctggatctcttcaaaacaagtgctcctgccccagtggggcccctggtgggtctaggtggtgtaactgtcacactccctcaggcaggaccatggaacacagcatctttggtcttcaatcagtccccttcaatggctccgggagccatgatgggtggtcaaccttcaggttttagtcagcccgtcatttttggtacaagtccagctgtttcaggttggaaccagccttcaccctttgcagcctcaactccccctccagtgcctgttgtctggggcccttctgcatctgtggcacccaatgcttggtcaacaacaagccctttggggaatccttttcagagcaatatttttccagctcctgctgtgtccactcagcccccatccatgcactcctctctcctggtcactcctcctcagccacctcccagagctggccctcccaaggacatctccagtgatgccttcactgccttagacccacttggggataaagagatcaaggatgtgaaagaaatgtttaaggatttccaactgcggcagccacctgctgtgcccgcgcggaagggagagcagacttcttctgggactttgagtgcctttgccagttatttcaacagcaaggttggcattcctcaggagaatgcagaccatgatgactttgatgctaatcaactattgaacaagatcaatgaaccaccaaagccagctcccagacaagtttccctgccagttaccaaatctactgacaatgcatttgagaaccctttctttaaagattcttttggttcatcacaagcctctgtggcttcttctcaacctgtatcttctgagatgtatagggatccatttggaaatccttttgcctaaattctgaacttggtctgcagaccatccagaggaataaaaaggttggccttagtagtcaaaaacaaagctgatagccagacacgttctgatttctgcccttgttccagctttgacgtattatctgttgccttatttctcattgcctcttctacttgtaaaatgcttttcactttctgtctaggttaaagctaaactgaatctatggctttaaataaattaagatcctaaactctctagcttaagtgtaaatgaagtacagtagtttccctactgaaccctgcctcttgtgtccctggaaccttctagaacacctgccttctaccctctggttgggagatgcagccaccacatcccttcatatcatactgttttgaataaattttcaaatccttattgttcagagttgtttgggggttctgtttcagagcataaaacctaaaggttatagtagaacaaggcaccttcttaaaagaaatcttgcttcagaccatcagttacagagaatttctaaagtaaaattgaagcaactacaacttctccttagacactttggaatctaaccacttaaggacctttttaaagagatagcttctcttctttctgaagatcaatttctcccaaggccaagattgtccttttctcccatttcttgctagctattgcaaatgagggaagaacattattcatctctcctccccttttttttctgattcttttttcagtcagttttgctcctgggttcaagtagtattaccaccctttcacaagcaacagactctcacagggcaaaaaaaaaaaaaaatctaatgattcacagacagatctggagcctctcttcattctcagtaattgctagtcccaagaactagaattgcaaatgggcacaacctatatccttcctgtggaagaggaggccactctcttgagctgaagttccagaagagcagttaatgttcaagagaaattgaactcaactcagcaacaaaggactctattttgaagagcaacatatcacaaagctaaatgtgattgtgccaaacacattaggtgcttatttggggtcatgctaggcctttatcaagtaactggaaaacttttcttgcagccacaatctcaatgtcgttagtaggaagataagaggggagaaaaagctgtagaacaaatgtttggggttaccattgaaaatctaatgtctgcaatatttttctcctcacaacttggaaacgttcccagttcattttcagtcctgttgtgagcacagttctgaagggtttattattgtcaaaataagttttgttttgttttgtttatgttgggtttttaatgttgtctcttgacccttaatgctcaggttcttgtgggagttaatcagccacatccaacgttaccttgagggggaagaagagggtgatgctcagaagctaaacaagacaggggccacatgaccctctattgattagccccaagtagaaagtcctgtggttttatgtttaatggtaatagttgatcatatatggcataattttctatcagcttcctactcagtcactataaacacagacttgaaatagtactttaaatgtccaaatacctaaatgtgctaaactggaggtaactatttctaggtagttgaatttttgaaagtcatgatcagccacacaactgttttgtacatacttattttctcatgcacttttctgtatgcaaataaagctataaatttactcatttcaataaactggagtggcagaa

SEQ ID NO: 427023 - DNA, 3498 bp, Homo sapiens
cgcgaggtcatcaacgtttatccattttgaatgcttctatgcttcgtatatcgctctgtctatatttttgatcttcgttgaatttggaaaagccctgcggagagttcttgtgattccctttgtacttccctgacactaacacatgccctgcacacccatcatgttgcatcagtgtccatggtggtggtataaaattctcgagcttatctcctcttttaaatactgagtaaatacataagctttttctaagcttatgtatttactattaccactatgatctcagctttatttaagagcaatttaaaatgcagttcccataggtgtctttttttacctctcctaagaatatacaggcttgcctggattaagaccctatgatctctatgtagactgacttaaaatccaatggaatgaacaaaaatatttaggatgcttattggtagttgccccttttacacacttgctcccccaacttcaagcatttagcgatgagaccagaccaatgtgagtgtgtaaaggaatatagtagatttcactttgcaagtcctaggtagtgtcagacactaagactcagtagtccgtccgttgtaggaatctgtgtctttttttggaggactctttttctgtagtagtagttgttgttgttcatctgtcaagaaaaaagttttcctttttgtggctctcaaattggggtatagggtaggagacaaaatgaggctgtatttcactgttagtgagtaactaaggcttctccctccctccctgtcctgtcagtcttcagccaatgacttgcttgcatcagacatctttgctcctcccgtctcagaaccttcaggccaggcgtcacccacaggacaacctacagccctgcagcccaaccctctggatctcttcaaaacaagtgctcctgccccagtggggcccctggtgggtctaggtggtgtaactgtcacactccctcaggcaggaccatggaacacagcatctttggtcttcaatcagtccccttcaatggctccgggagccatgatgggtggtcaaccttcaggttttagtcagcccgtcatttttggtacaagtccagctgtttcaggttggaaccagccttcaccctttgcagcctcaactccccctccagtgcctgttgtctggggcccttctgcatctgtggcacccaatgcttggtcaacaacaagccctttggggaatccttttcagagcaatatttttccagctcctgctgtgtccactcagcccccatccatgcactcctctctcctggtcactcctcctcagccacctcccagagctggccctcccaaggacatctccagtgatgccttcactgccttagacccacttggggataaagagatcaaggatgtgaaagaaatgtttaaggatttccaactgcggcagccacctgctgtgcccgcgcggaagggagagcagacttcttctgggactttgagtgcctttgccagttatttcaacagcaaggttggcattcctcaggagaatgcagaccatgatgactttgatgctaatcaactattgaacaagatcaatgaaccaccaaagccagctcccagacaagtttccctgccagttaccaaatctactgacaatgcatttgagaaccctttctttaaagattcttttggttcatcacaagcctctgtggcttcttctcaacctgtatcttctgagatgtatagggatccatttggaaatccttttgcctaaattctgaacttggtctgcagaccatccagaggaataaaaaggttggccttagtagtcaaaaacaaagctgatagccagacacgttctgatttctgcccttgttccagctttgacgtattatctgttgccttatttctcattgcctcttctacttgtaaaatgcttttcactttctgtctaggttaaagctaaactgaatctatggctttaaataaattaagatcctaaactctctagcttaagtgtaaatgaagtacagtagtttccctactgaaccctgcctcttgtgtccctggaaccttctagaacacctgccttctaccctctggttgggagatgcagccaccacatcccttcatatcatactgttttgaataaattttcaaatccttattgttcagagttgtttgggggttctgtttcagagcataaaacctaaaggttatagtagaacaaggcaccttcttaaaagaaatcttgcttcagaccatcagttacagagaatttctaaagtaaaattgaagcaactacaacttctccttagacactttggaatctaaccacttaaggacctttttaaagagatagcttctcttctttctgaagatcaatttctcccaaggccaagattgtccttttctcccatttcttgctagctattgcaaatgagggaagaacattattcatctctcctccccttttttttctgattcttttttcagtcagttttgctcctgggttcaagtagtattaccaccctttcacaagcaacagactctcacagggcaaaaaaaaaaaaaaatctaatgattcacagacagatctggagcctctcttcattctcagtaattgctagtcccaagaactagaattgcaaatgggcacaacctatatccttcctgtggaagaggaggccactctcttgagctgaagttccagaagagcagttaatgttcaagagaaattgaactcaactcagcaacaaaggactctattttgaagagcaacatatcacaaagctaaatgtgattgtgccaaacacattaggtgcttatttggggtcatgctaggcctttatcaagtaactggaaaacttttcttgcagccacaatctcaatgtcgttagtaggaagataagaggggagaaaaagctgtagaacaaatgtttggggttaccattgaaaatctaatgtctgcaatatttttctcctcacaacttggaaacgttcccagttcattttcagtcctgttgtgagcacagttctgaagggtttattattgtcaaaataagttttgttttgttttgtttatgttgggtttttaatgttgtctcttgacccttaatgctcaggttcttgtgggagttaatcagccacatccaacgttaccttgagggggaagaagagggtgatgctcagaagctaaacaagacaggggccacatgaccctctattgattagccccaagtagaaagtcctgtggttttatgtttaatggtaatagttgatcatatatggcataattttctatcagcttcctactcagtcactataaacacagacttgaaatagtactttaaatgtccaaatacctaaatgtgctaaactggaggtaactatttctaggtagttgaatttttgaaagtcatgatcagccacacaactgttttgtacatacttattttctcatgcacttttctgtatgcaaataaagctataaatttactcatttcaataaactggagtggcagaa

SEQ ID NO: 427024 - DNA, 4538 bp, Homo sapiens
ttatttgcacccgccccccgcccgcgtcggtctggggcttttgacttctccccgaacacatttcccctcccgtcgctgggtccctgcgatcgcccccagctggtggggctcgcggagctcaggggagcggggtcctctgcgccgctgcagcgcgagttaataaacagttaagtttggaagactctgcagacacgttgagggggagttaccaagcccaggcagcaaaaacatcctggcacattcctggggagtcctcagctgccagcatctgattagaaccatatctctcgccgggagtggccgcgcggctccgaagctcccggccggcggctatttaagcgaggcccgccgcatccgctgcgctgtagcctggaggctccgggcgcggggaagtcatgctcgcttcacggaggcaatagctagccggtgtctgtgggaggttatgtttatttgagacttctccatcgggatcgcctggtgtcaccaagtgtccactggtactgaggtttgctgcctgccttcttgccatgtctaacgaagtagaaacaagtgcaaccaatggtcagcccgaccaacaggccgcaccaaaagcaccctcaaagaaggaaaaaaagaaaggccctgaaaagacagatgaatatctcttagcaaggttcaaaggcgatggtgtaaaatataaggccaagctgattggcattgatgatgtgccagatgcaagaggggataaaatgagccaagactctatgatgaaactaaagggaatggcggcagctggtcggtctcagggacaacacaaacaaaggatctgggtcaacatttccctttctgggataaaaataattgatgagaaaactggggtaatagagcatgaacatccagtaaataagatttctttcattgcccgtgatgtgacagacaaccgggcatttggttacgtgtgtggaggagaaggccagcatcagttttttgccataaaaaccgggcaacaggctgaaccattagttgttgatcttaaagacctttttcaagttatctataatgtaaagaaaaaggaagaagaaaagaaaaagatagaggaagccagcaaagcagttgagaatgggagtgaggccctaatgattctagatgaccaaactaacaaactgaaatcgggtgttgaccagatggatttgtttggggacatgtctacacctcctgacctaaatagtccaacagaaagcaaagatatcctgttagtggatctaaactctgaaatcgacaccaatcagaattctttaagagaaaatccattcttaacaaacggcatcacctcctgttctcttcctcgaccaacgcctcaggcatccttcttgcctgaaaatgccttttctgccaatctcaacttctttcccacccctaatcctgatcctttccgtgacgatcctttcacacagccagaccaatcgacaccttcttcgtttgattctctcaaatctccagatcagaagaaagagaattcgagtagctcgtctactccgctgagtaatgggcccctgaatggtgatgttgactactttggtcagcaatttgaccagatctctaaccggactggcaaacaggaagctcaggcaggcccatggcccttttcaagttcgcaaacccagccagcagtgagaactcaaaatggggtatctgaaagagaacagaacggcttctctgtcaaatcctccccgaacccttttgtgggaagccctcccaaaggactgtccatacagaatggcgtaaagcaggacttggaaagctctgtccagtcctcaccacatgactccatagccattatcccacctccacaaagtaccaaaccaggaagaggcagaaggactgctaagtcttcagccaatgacttgcttgcatcagacatctttgctcctcccgtctcagaaccttcaggccaggcgtcacccacaggacaacctacagccctgcagcccaaccctctggatctcttcaaaacaagtgctcctgccccagtggggcccctggtgggtctaggtggtgtaactgtcacactccctcaggcaggaccatggaacacagcatctttggtcttcaatcagtccccttcaatggctccgggagccatgatgggtggtcaaccttcaggttttagtcagcccgtcatttttggtacaagtccagctgtttcaggttggaaccagccttcaccctttgcagcctcaactccccctccagtgcctgttgtctggggcccttctgcatctgtggcacccaatgcttggtcaacaacaagccctttggggaatccttttcagagcaatatttttccagctcctgctgtgtccactcagcccccatccatgcactcctctctcctggtcactcctcctcagccacctcccagagctggccctcccaaggacatctccagtgatgccttcactgccttagacccacttggggataaagagatcaaggatgtgaaagaaatgtttaaggatttccaactgcggcagccacctgctgtgcccgcgcggaagggagagcagacttcttctgggactttgagtgcctttgccagttatttcaacagcaaggttggcattcctcaggagaatgcagaccatgatgactttgatgctaatcaactattgaacaagatcaatgaaccaccaaagccagctcccagacaagtttccctgccagttaccaaatctactgacaatgcatttgagaaccctttctttaaagattcttttggttcatcacaagcctctgtggcttcttctcaacctgtatcttctgagatgtatagggatccatttggaaatccttttgcctaaattctgaacttggtctgcagaccatccagaggaataaaaaggttggccttagtagtcaaaaacaaagctgatagccagacacgttctgatttctgcccttgttccagctttgacgtattatctgttgccttatttctcattgcctcttctacttgtaaaatgcttttcactttctgtctaggttaaagctaaactgaatctatggctttaaataaattaagatcctaaactctctagcttaagtgtaaatgaagtacagtagtttccctactgaaccctgcctcttgtgtccctggaaccttctagaacacctgccttctaccctctggttgggagatgcagccaccacatcccttcatatcatactgttttgaataaattttcaaagttatagtagaacaaggcaccttcttaaaagaaatcttgcttcagaccatcagttacagagaatttctaaagtaaaattgaagcaactacaacttctccttagacactttggaatctaaccacttaaggacctttttaaagagatagcttctcttctttctgaagatcaatttctcccaaggccaagattgtccttttctcccatttcttgctagctattgcaaatgagggaagaacattattcatctctcctccccttttttttctgattcttttttcagtcagttttgctcctgggttcaagtagtattaccaccctttcacaagcaacagactctcacagggcaaaaaaaaaaaaaaatctaatgattcacagacagatctggagcctctcttcattctcagtaattgctagtcccaagaactagaattgcaaatgggcacaacctatatccttcctgtggaagaggaggccactctcttgagctgaagttccagaagagcagttaatgttcaagagaaattgaactcaactcagcaacaaaggactctattttgaagagcaacatatcacaaagctaaatgtgattgtgccaaacacattaggtgcttatttggggtcatgctaggcctttatcaagtaactggaaaacttttcttgcagccacaatctcaatgtcgttagtaggaagataagaggggagaaaaagctgtagaacaaatgtttggggttaccattgaaaatctaatgtctgcaatatttttctcctcacaacttggaaacgttcccagttcattttcagtcctgttgtgagcacagttctgaagggtttattattgtcaaaataagttttgttttgttttgtttatgttgggtttttaatgttgtctcttgacccttaatgctcaggttcttgtgggagttaatcagccacatccaacgttaccttgagggggaagaagagggtgatgctcagaagctaaacaagacaggggccacatgaccctctattgattagccccaagtagaaagtcctgtggttttatgtttaatggtaatagttgatcatatatggcataattttctatcagcttcctactcagtcactataaacacagacttgaaatagtactttaaatgtccaaatacctaaatgtgctaaactggaggtaactatttctaggtagttgaatttttgaaagtcatgatcagccacacaactgttttgtacatacttattttctcatgcacttttctgtatgcaaataaagctataaatttactcatttcaataaactggagtggcagaa

SEQ ID NO: 427025 - DNA, 2285 bp, Homo sapiens
tttctgaggactgacccaatgctgccctctagtgataaatcttaaaagggctgccatgagctattgaaatgtgatgactggtgactcttggagggctgtgtaataaggcgtcatccatgtcccatcagcttaaaatgaggggattctgaatctcttccacttcagataaatatgcatggctttctcttccgagaaggataataattattggggtacctagtatttggtgttgatttttgttccactgatgtaaatttcaaaagtatagaactaaacttcaaaaataagctgactcggggactggcctatatttggggaaagcttgtctactgattgcctggattttttaccttctagaaccaccaaagccagctcccagacaagtttccctgccagttaccaaatctactgacaatgcatttgagaaccctttctttaaagattcttttggttcatcacaagcctctgtggcttcttctcaacctgtatcttctgagatgtatagggatccatttggaaatccttttgcctaaattctgaacttggtctgcagaccatccagaggaataaaaaggttggccttagtagtcaaaaacaaagctgatagccagacacgttctgatttctgcccttgttccagctttgacgtattatctgttgccttatttctcattgcctcttctacttgtaaaatgcttttcactttctgtctaggttaaagctaaactgaatctatggctttaaataaattaagatcctaaactctctagcttaagtgtaaatgaagtacagtagtttccctactgaaccctgcctcttgtgtccctggaaccttctagaacacctgccttctaccctctggttgggagatgcagccaccacatcccttcatatcatactgttttgaataaattttcaaatccttattgttcagagttgtttgggggttctgtttcagagcataaaacctaaaggttatagtagaacaaggcaccttcttaaaagaaatcttgcttcagaccatcagttacagagaatttctaaagtaaaattgaagcaactacaacttctccttagacactttggaatctaaccacttaaggacctttttaaagagatagcttctcttctttctgaagatcaatttctcccaaggccaagattgtccttttctcccatttcttgctagctattgcaaatgagggaagaacattattcatctctcctccccttttttttctgattcttttttcagtcagttttgctcctgggttcaagtagtattaccaccctttcacaagcaacagactctcacagggcaaaaaaaaaaaaaaatctaatgattcacagacagatctggagcctctcttcattctcagtaattgctagtcccaagaactagaattgcaaatgggcacaacctatatccttcctgtggaagaggaggccactctcttgagctgaagttccagaagagcagttaatgttcaagagaaattgaactcaactcagcaacaaaggactctattttgaagagcaacatatcacaaagctaaatgtgattgtgccaaacacattaggtgcttatttggggtcatgctaggcctttatcaagtaactggaaaacttttcttgcagccacaatctcaatgtcgttagtaggaagataagaggggagaaaaagctgtagaacaaatgtttggggttaccattgaaaatctaatgtctgcaatatttttctcctcacaacttggaaacgttcccagttcattttcagtcctgttgtgagcacagttctgaagggtttattattgtcaaaataagttttgttttgttttgtttatgttgggtttttaatgttgtctcttgacccttaatgctcaggttcttgtgggagttaatcagccacatccaacgttaccttgagggggaagaagagggtgatgctcagaagctaaacaagacaggggccacatgaccctctattgattagccccaagtagaaagtcctgtggttttatgtttaatggtaatagttgatcatatatggcataattttctatcagcttcctactcagtcactataaacacagacttgaaatagtactttaaatgtccaaatacctaaatgtgctaaactggaggtaactatttctaggtagttgaatttttgaaagtcatgatcagccacacaactgttttgtacatacttattttctcatgcacttttctgtatgcaaataaagctataaatttactcatttcaataaactggagtggcagaa

SEQ ID NO: 427026 - DNA, 1930 bp, Homo sapiens
gtgctcgcttcggcagcacatatactaaaattggaacgatacagagaagattagcatggcccctgcgcaaggatgacacgcaaattcgtgaagcgttccatatttttcctctgtggcttcttctcaacctgtatcttctgagatgtatagggatccatttggaaatccttttgcctaaattctgaacttggtctgcagaccatccagaggaataaaaaggttggccttagtagtcaaaaacaaagctgatagccagacacgttctgatttctgcccttgttccagctttgacgtattatctgttgccttatttctcattgcctcttctacttgtaaaatgcttttcactttctgtctaggttaaagctaaactgaatctatggctttaaataaattaagatcctaaactctctagcttaagtgtaaatgaagtacagtagtttccctactgaaccctgcctcttgtgtccctggaaccttctagaacacctgccttctaccctctggttgggagatgcagccaccacatcccttcatatcatactgttttgaataaattttcaaatccttattgttcagagttgtttgggggttctgtttcagagcataaaacctaaaggttatagtagaacaaggcaccttcttaaaagaaatcttgcttcagaccatcagttacagagaatttctaaagtaaaattgaagcaactacaacttctccttagacactttggaatctaaccacttaaggacctttttaaagagatagcttctcttctttctgaagatcaatttctcccaaggccaagattgtccttttctcccatttcttgctagctattgcaaatgagggaagaacattattcatctctcctccccttttttttctgattcttttttcagtcagttttgctcctgggttcaagtagtattaccaccctttcacaagcaacagactctcacagggcaaaaaaaaaaaaaaatctaatgattcacagacagatctggagcctctcttcattctcagtaattgctagtcccaagaactagaattgcaaatgggcacaacctatatccttcctgtggaagaggaggccactctcttgagctgaagttccagaagagcagttaatgttcaagagaaattgaactcaactcagcaacaaaggactctattttgaagagcaacatatcacaaagctaaatgtgattgtgccaaacacattaggtgcttatttggggtcatgctaggcctttatcaagtaactggaaaacttttcttgcagccacaatctcaatgtcgttagtaggaagataagaggggagaaaaagctgtagaacaaatgtttggggttaccattgaaaatctaatgtctgcaatatttttctcctcacaacttggaaacgttcccagttcattttcagtcctgttgtgagcacagttctgaagggtttattattgtcaaaataagttttgttttgttttgtttatgttgggtttttaatgttgtctcttgacccttaatgctcaggttcttgtgggagttaatcagccacatccaacgttaccttgagggggaagaagagggtgatgctcagaagctaaacaagacaggggccacatgaccctctattgattagccccaagtagaaagtcctgtggttttatgtttaatggtaatagttgatcatatatggcataattttctatcagcttcctactcagtcactataaacacagacttgaaatagtactttaaatgtccaaatacctaaatgtgctaaactggaggtaactatttctaggtagttgaatttttgaaagtcatgatcagccacacaactgttttgtacatacttattttctcatgcacttttctgtatgcaaataaagctataaatttactcatttcaataaactggagtggcagaa

SEQ ID NO: 427027 - DNA, 1940 bp, Homo sapiens
gtttgattggctgattggcctatgacctaagcgatttttaaaagaattttggaagtcttcattgcgatttttttcttatgactgtaactgtatttattgactagatgattttatcttcttaggtggcttcttctcaacctgtatcttctgagatgtatagggatccatttggaaatccttttgcctaaattctgaacttggtctgcagaccatccagaggaataaaaaggttggccttagtagtcaaaaacaaagctgatagccagacacgttctgatttctgcccttgttccagctttgacgtattatctgttgccttatttctcattgcctcttctacttgtaaaatgcttttcactttctgtctaggttaaagctaaactgaatctatggctttaaataaattaagatcctaaactctctagcttaagtgtaaatgaagtacagtagtttccctactgaaccctgcctcttgtgtccctggaaccttctagaacacctgccttctaccctctggttgggagatgcagccaccacatcccttcatatcatactgttttgaataaattttcaaatccttattgttcagagttgtttgggggttctgtttcagagcataaaacctaaaggttatagtagaacaaggcaccttcttaaaagaaatcttgcttcagaccatcagttacagagaatttctaaagtaaaattgaagcaactacaacttctccttagacactttggaatctaaccacttaaggacctttttaaagagatagcttctcttctttctgaagatcaatttctcccaaggccaagattgtccttttctcccatttcttgctagctattgcaaatgagggaagaacattattcatctctcctccccttttttttctgattcttttttcagtcagttttgctcctgggttcaagtagtattaccaccctttcacaagcaacagactctcacagggcaaaaaaaaaaaaaaatctaatgattcacagacagatctggagcctctcttcattctcagtaattgctagtcccaagaactagaattgcaaatgggcacaacctatatccttcctgtggaagaggaggccactctcttgagctgaagttccagaagagcagttaatgttcaagagaaattgaactcaactcagcaacaaaggactctattttgaagagcaacatatcacaaagctaaatgtgattgtgccaaacacattaggtgcttatttggggtcatgctaggcctttatcaagtaactggaaaacttttcttgcagccacaatctcaatgtcgttagtaggaagataagaggggagaaaaagctgtagaacaaatgtttggggttaccattgaaaatctaatgtctgcaatatttttctcctcacaacttggaaacgttcccagttcattttcagtcctgttgtgagcacagttctgaagggtttattattgtcaaaataagttttgttttgttttgtttatgttgggtttttaatgttgtctcttgacccttaatgctcaggttcttgtgggagttaatcagccacatccaacgttaccttgagggggaagaagagggtgatgctcagaagctaaacaagacaggggccacatgaccctctattgattagccccaagtagaaagtcctgtggttttatgtttaatggtaatagttgatcatatatggcataattttctatcagcttcctactcagtcactataaacacagacttgaaatagtactttaaatgtccaaatacctaaatgtgctaaactggaggtaactatttctaggtagttgaatttttgaaagtcatgatcagccacacaactgttttgtacatacttattttctcatgcacttttctgtatgcaaataaagctataaatttactcatttcaataaactggagtggcagaa

SEQ ID NO: 427028 - DNA, 3076 bp, Homo sapiens
ttatttgcacccgccccccgcccgcgtcggtctggggcttttgacttctccccgaacacatttcccctcccgtcgctgggtccctgcgatcgcccccagctggtggggctcgcggagctcaggggagcggggtcctctgcgccgctgcagcgcgagttaataaacagttaagtttggaagactctgcagacacgttgagggggagttaccaagcccaggcagcaaaaacatcctggcacattcctggggagtcctcagctgccagcatctgattagaaccatatctctcgccgggagtggccgcgcggctccgaagctcccggccggcggctatttaagcgaggcccgccgcatccgctgcgctgtagcctggaggctccgggcgcggggaagtcatgctcgcttcacggaggcaatagctagccggtgtctgtgggaggttatgtttatttgagacttctccatcgggatcgcctggtgtcaccaagtgtccactggtactgaggtttgctgcctgccttcttgccatgtctaacgaagtagaaacaagtgcaaccaatggtcagcccgaccaacaggccgcaccaaaagcaccctcaaagaaggaaaaaaagaaaggccctgaaaagacagatgaatatctcttagcaaggttcaaaggcgatggtgtaaaatataaggccaagctgattggcattgatgatgtgccagatgcaagaggggataaaatgagccaagactctatgatgaaactaaagggaatggcggcagctggtcggtctcagggacaacacaaacaaaggatctgggtcaacatttccctttctgggataaaaataattgatgagaaaactggggtaatagagcatgaacatccagtaaataagatttctttcattgcccgtgatgtgacagacaaccgggcatttggttacgtgtgtggaggagaaggccagcatcagttttttgccataaaaaccgggcaacaggctgaaccattagttgttgatcttaaagacctttttcaagttatctataatgtaaagaaaaaggaagaagaaaagaaaaagatagaggaagccagcaaagcagttgagaatgggagtgaggccctaatgattctagatgaccaaactaacaaactgaaatcgggtgttgaccagatggatttgtttggggacatgtctacacctcctgacctaaatagtccaacagaaagcaaagatatcctgttagtggatctaaactctgaaatcgacaccaatcagaattctttaagagaaaatccattcttaacaaacggcatcacctcctgttctcttcctcgaccaacgcctcaggcatccttcttgcctgaaaatgccttttctgccaatctcaacttctttcccacccctaatcctgatcctttccgtgacgatcctttcacacagccagaccaatcgacaccttcttcgtttgattctctcaaatctccagatcagaagaaagagaattcgagtagctcgtctactccgctgagtaatgggcccctgaatggtgatgttgactactttggtcagcaatttgaccagatctctaaccggactggcaaacaggaagctcaggcaggcccatggcccttttcaagttcgcaaacccagccagcagtgagaactcaaaatggggtatctgaaagagaacagaacggcttctctgtcaaatcctccccgaacccttttgtgggaagccctcccaaaggactgtccatacagaatggcgtaaagcaggacttggaaagctctgtccagtcctcaccacatgactccatagccattatcccacctccacaaagtaccaaaccaggaagaggcagaaggactgctaagtcttcagccaatgacttgcttgcatcagacatctttgctcctcccgtctcagaaccttcaggccaggcgtcacccacaggacaacctacagccctgcagcccaaccctctggatctcttcaaaacaagtgctcctgccccagtggggcccctggtgggtctaggtggtgtaactgtcacactccctcaggcaggaccatggaacacagcatctttggtcttcaatcagtccccttcaatggctccgggagccatgatgggtggtcaaccttcaggttttagtcagcccgtcatttttggtacaagtccagctgtttcaggttggaaccagccttcaccctttgcagcctcaactccccctccagtgcctgttgtctggggcccttctgcatctgtggcacccaatgcttggtcaacaacaagccctttggggaatccttttcagagcaatatttttccagctcctgctgtgtccactcagcccccatccatgcactcctctctcctggtcactcctcctcagccacctcccagagctggccctcccaaggacatctccagtgatgccttcactgccttagacccacttggggataaagagatcaaggatgtgaaagaaatgtttaaggatttccaactgcggcagccacctgctgtgcccgcgcggaagggagagcagacttcttctgggactttgagtgcctttgccagttatttcaacagcaaggttggcattcctcaggagaatgcagaccatgatgactttgatgctaatcaactattgaacaagatcaatgaaccaccaaagccagctcccagacaagtttccctgccagttaccaaatctactgacaatgcatttgagaaccctttctttaaagattcttttggttcatcacaagcctctgtggcttcttctcaacctgtatcttctgagatgtatagggatccatttggaaatccttttgcctaaattctgaacttggtctgcagaccatccagaggaataaaaaggttggccttagtagtcaaaaacaaagctgatagccagacacgttctgatttctgcccttgttccagctttgacgtattatctgttgccttatttctcattgcctcttctacttgtaaaatgcttttcactttctgtctaggttaaagctaaactgaatctatggctttaaataaattaagatcctaaactctcta

SEQ ID NO: 427029 - DNA, 2006 bp, Homo sapiens
aggaaggatagtttaggtcaacctgctacatcaatagattgggtaaggggaactctcatgggataaaataactaacattgttgagcacttgcgctaagcattttattagatgctctacatttatcatcttcatcaatcctcacatcagccctaggagatactattactgacatctttaataatgacttgatatttaatacattgatattcagttcaaaaattctaaccacaagtttctttcttctccatacctctctaggaacttggtctgcagaccatccagaggaataaaaaggttggccttagtagtcaaaaacaaagctgatagccagacacgttctgatttctgcccttgttccagctttgacgtattatctgttgccttatttctcattgcctcttctacttgtaaaatgcttttcactttctgtctaggttaaagctaaactgaatctatggctttaaataaattaagatcctaaactctctagcttaagtgtaaatgaagtacagtagtttccctactgaaccctgcctcttgtgtccctggaaccttctagaacacctgccttctaccctctggttgggagatgcagccaccacatcccttcatatcatactgttttgaataaattttcaaatccttattgttcagagttgtttgggggttctgtttcagagcataaaacctaaaggttatagtagaacaaggcaccttcttaaaagaaatcttgcttcagaccatcagttacagagaatttctaaagtaaaattgaagcaactacaacttctccttagacactttggaatctaaccacttaaggacctttttaaagagatagcttctcttctttctgaagatcaatttctcccaaggccaagattgtccttttctcccatttcttgctagctattgcaaatgagggaagaacattattcatctctcctccccttttttttctgattcttttttcagtcagttttgctcctgggttcaagtagtattaccaccctttcacaagcaacagactctcacagggcaaaaaaaaaaaaaaatctaatgattcacagacagatctggagcctctcttcattctcagtaattgctagtcccaagaactagaattgcaaatgggcacaacctatatccttcctgtggaagaggaggccactctcttgagctgaagttccagaagagcagttaatgttcaagagaaattgaactcaactcagcaacaaaggactctattttgaagagcaacatatcacaaagctaaatgtgattgtgccaaacacattaggtgcttatttggggtcatgctaggcctttatcaagtaactggaaaacttttcttgcagccacaatctcaatgtcgttagtaggaagataagaggggagaaaaagctgtagaacaaatgtttggggttaccattgaaaatctaatgtctgcaatatttttctcctcacaacttggaaacgttcccagttcattttcagtcctgttgtgagcacagttctgaagggtttattattgtcaaaataagttttgttttgttttgtttatgttgggtttttaatgttgtctcttgacccttaatgctcaggttcttgtgggagttaatcagccacatccaacgttaccttgagggggaagaagagggtgatgctcagaagctaaacaagacaggggccacatgaccctctattgattagccccaagtagaaagtcctgtggttttatgtttaatggtaatagttgatcatatatggcataattttctatcagcttcctactcagtcactataaacacagacttgaaatagtactttaaatgtccaaatacctaaatgtgctaaactggaggtaactatttctaggtagttgaatttttgaaagtcatgatcagccacacaactgttttgtacatacttattttctcatgcacttttctgtatgcaaataaagctataaatttactcatttcaataaactggagtggcagaa

SEQ ID NO: 427030 - DNA, 1720 bp, Homo sapiens
acttgtaaaatgcttgtcactttcagtttagctttaacctagacagaaagtgaaaagcattttacaagtagaagaggcaatgagaaataaggcaacagataatacgtcaaagctggaacaagggcagaaatcagaacgtttctgtctaggttaaagctaaactgaatctatggctttaaataaattaagatcctaaactctctagcttaagtgtaaatgaagtacagtagtttccctactgaaccctgcctcttgtgtccctggaaccttctagaacacctgccttctaccctctggttgggagatgcagccaccacatcccttcatatcatactgttttgaataaattttcaaatccttattgttcagagttgtttgggggttctgtttcagagcataaaacctaaaggttatagtagaacaaggcaccttcttaaaagaaatcttgcttcagaccatcagttacagagaatttctaaagtaaaattgaagcaactacaacttctccttagacactttggaatctaaccacttaaggacctttttaaagagatagcttctcttctttctgaagatcaatttctcccaaggccaagattgtccttttctcccatttcttgctagctattgcaaatgagggaagaacattattcatctctcctccccttttttttctgattcttttttcagtcagttttgctcctgggttcaagtagtattaccaccctttcacaagcaacagactctcacagggcaaaaaaaaaaaaaaatctaatgattcacagacagatctggagcctctcttcattctcagtaattgctagtcccaagaactagaattgcaaatgggcacaacctatatccttcctgtggaagaggaggccactctcttgagctgaagttccagaagagcagttaatgttcaagagaaattgaactcaactcagcaacaaaggactctattttgaagagcaacatatcacaaagctaaatgtgattgtgccaaacacattaggtgcttatttggggtcatgctaggcctttatcaagtaactggaaaacttttcttgcagccacaatctcaatgtcgttagtaggaagataagaggggagaaaaagctgtagaacaaatgtttggggttaccattgaaaatctaatgtctgcaatatttttctcctcacaacttggaaacgttcccagttcattttcagtcctgttgtgagcacagttctgaagggtttattattgtcaaaataagttttgttttgttttgtttatgttgggtttttaatgttgtctcttgacccttaatgctcaggttcttgtgggagttaatcagccacatccaacgttaccttgagggggaagaagagggtgatgctcagaagctaaacaagacaggggccacatgaccctctattgattagccccaagtagaaagtcctgtggttttatgtttaatggtaatagttgatcatatatggcataattttctatcagcttcctactcagtcactataaacacagacttgaaatagtactttaaatgtccaaatacctaaatgtgctaaactggaggtaactatttctaggtagttgaatttttgaaagtcatgatcagccacacaactgttttgtacatacttattttctcatgcacttttctgtatgcaaataaagctataaatttactcatttcaataaactggagtggcagaa

SEQ ID NO: 427031 - DNA, 3114 bp, Homo sapiens
ttatttgcacccgccccccgcccgcgtcggtctggggcttttgacttctccccgaacacatttcccctcccgtcgctgggtccctgcgatcgcccccagctggtggggctcgcggagctcaggggagcggggtcctctgcgccgctgcagcgcgagttaataaacagttaagtttggaagactctgcagacacgttgagggggagttaccaagcccaggcagcaaaaacatcctggcacattcctggggagtcctcagctgccagcatctgattagaaccatatctctcgccgggagtggccgcgcggctccgaagctcccggccggcggctatttaagcgaggcccgccgcatccgctgcgctgtagcctggaggctccgggcgcggggaagtcatgctcgcttcacggaggcaatagctagccggtgtctgtgggaggttatgtttatttgagacttctccatcgggatcgcctggtgtcaccaagtgtccactggtactgaggtttgctgcctgccttcttgccatgtctaacgaagtagaaacaagtgcaaccaatggtcagcccgaccaacaggccgcaccaaaagcaccctcaaagaaggaaaaaaagaaaggccctgaaaagacagatgaatatctcttagcaaggttcaaaggcgatggtgtaaaatataaggccaagctgattggcattgatgatgtgccagatgcaagaggggataaaatgagccaagactctatgatgaaactaaagggaatggcggcagctggtcggtctcagggacaacacaaacaaaggatctgggtcaacatttccctttctgggataaaaataattgatgagaaaactggggtaatagagcatgaacatccagtaaataagatttctttcattgcccgtgatgtgacagacaaccgggcatttggttacgtgtgtggaggagaaggccagcatcagttttttgccataaaaaccgggcaacaggctgaaccattagttgttgatcttaaagacctttttcaagttatctataatgtaaagaaaaaggaagaagaaaagaaaaagatagaggaagccagcaaagcagttgagaatgggagtgaggccctaatgattctagatgaccaaactaacaaactgaaatcgggtgttgaccagatggatttgtttggggacatgtctacacctcctgacctaaatagtccaacagaaagcaaagatatcctgttagtggatctaaactctgaaatcgacaccaatcagaattctttaagagaaaatccattcttaacaaacggcatcacctcctgttctcttcctcgaccaacgcctcaggcatccttcttgcctgaaaatgccttttctgccaatctcaacttctttcccacccctaatcctgatcctttccgtgacgatcctttcacacagccagaccaatcgacaccttcttcgtttgattctctcaaatctccagatcagaagaaagagaattcgagtagctcgtctactccgctgagtaatgggcccctgaatggtgatgttgactactttggtcagcaatttgaccagatctctaaccggactggcaaacaggaagctcaggcaggcccatggcccttttcaagttcgcaaacccagccagcagtgagaactcaaaatggggtatctgaaagagaacagaacggcttctctgtcaaatcctccccgaacccttttgtgggaagccctcccaaaggactgtccatacagaatggcgtaaagcaggacttggaaagctctgtccagtcctcaccacatgactccatagccattatcccacctccacaaagtaccaaaccaggaagaggcagaaggactgctaagtcttcagccaatgacttgcttgcatcagacatctttgctcctcccgtctcagaaccttcaggccaggcgtcacccacaggacaacctacagccctgcagcccaaccctctggatctcttcaaaacaagtgctcctgccccagtggggcccctggtgggtctaggtggtgtaactgtcacactccctcaggcaggaccatggaacacagcatctttggtcttcaatcagtccccttcaatggctccgggagccatgatgggtggtcaaccttcaggttttagtcagcccgtcatttttggtacaagtccagctgtttcaggttggaaccagccttcaccctttgcagcctcaactccccctccagtgcctgttgtctggggcccttctgcatctgtggcacccaatgcttggtcaacaacaagccctttggggaatccttttcagagcaatatttttccagctcctgctgtgtccactcagcccccatccatgcactcctctctcctggtcactcctcctcagccacctcccagagctggccctcccaaggacatctccagtgatgccttcactgccttagacccacttggggataaagagatcaaggatgtgaaagaaatgtttaaggatttccaactgcggcagccacctgctgtgcccgcgcggaagggagagcagacttcttctgggactttgagtgcctttgccagttatttcaacagcaaggttggcattcctcaggagaatgcagaccatgatgactttgatgctaatcaactattgaacaagatcaatgaaccaccaaagccagctcccagacaagtttccctgccagttaccaaatctactgacaatgcatttgagaaccctttctttaaagattcttttggttcatcacaagcctctgtggcttcttctcaacctgtatcttctgagatgtatagggatccatttggaaatccttttgcctaaattctgtaagtagaagatcctaataagcctgtctcaggggtttttgtgagaaagggtgacatggaataaagagtgaaattttaattttagaattgggaagagggtaaatatctataatttaggagtaatcgacaggaaaatctctactgagatcattcaataatgactaggctgggcacttaagaatagaattcctaaacacatcaaaaaatagtaatatacccttggggatgtggatttttatcttattccatgttcttggtttttcagttct

SEQ ID NO: 427032 - DNA, 2979 bp, Homo sapiens
  misc_feature (1)..(1): n is a, c, g, or t
  misc_feature (1874)..(1874): n is a, c, g, or t
ngagatggtgccactgcactccagcctgggcgacagaacgagactctgtctcaaacaaacaaacttaaaactgtactcaggactatgtttaatattatatataaatatggtctatctgaaaatttggcttctatatgtattgtctattcttcccaatagggcaatggatacatttttatggttaggcacttctaatctgcactccctggcttttattttttttctctctatgagattcatattaattctaggaaatatacaggacaaccaagtttaaatccagtaactctactcaaaccttatattgatatgaaaaggggaggggaacggagggcagaaataatatacaagacttattcttgccttatgcctgtgaaccataggcatacttgtttgtgtatttaactccctttcactatgaatatgaagatcactgaatatgtatctttctttttagatagaggaagccagcaaagcagttgaggtaaaattgcatctttacttcttgttaatcatgtgtgtgacatgcgtaagcccctgttttctacctgcccaaccactctcgccacctcgcttattactatgtgtttatgacttctctgatcatgaaagatgtttagttaaaagatgataccaaaaccattgctgcttagcagactaatagagtggacaaatacattttatagacaaagctcaactaaatccttaaatatttgctatcttttcagaatgggagtgaggccctaatgattctagatgaccaaactaacaaactgaaatcgggtgttgaccagatggatttgtttggggacatgtctacacctcctgacctaaatagtccaacagtaagtgtttgtttttaaatttgcaatgtaataaaatgacatctataactcaaattggcaataaccagaaatcttaagcatctcattgaaacttggaaggtgactgttgatttttgcaaatgaagtgtcaatggtttttagaataaatgtgaatcttaagtcaccatgggaacctatccacactaattcagttatattaatattgcttacagattaaacctgaacaataagtcagcaatgtagtccttcttggtatcacttaggattagaaggaggaggtgaataatagtccttgaataagcctacttgaagaaagtatgactgttagatggttaatcataaagcctcctggcctcttcatttcttttgcattctgtctgttgcaatttagcagcataaatttggtgtgaagtaagatttaaaacaaacaagtggctcagttatattccaccaaagcttgtccttgttagaaagctgcccattctcataggattttataccatatccagtctgctcaatattgaatgatctgtaacaaccctgtaagaacagaacagtattttcctttataaattaaaaaaaaatggtggttcagggaaaaaaaaagaagaaaaaaaaataaaaaggaaagaggtccagattcaagacttaggcccaagtcttcagaccttccaaaacatacctctaatgaaaatgtccatgacattttgaatgacttcttgcaacttcttttatttatgtaacagtttcctgagcacctgctatttgcaaggcatagcagtaagatgcacaacatcaatgacatcatggaatttactctccggcagggagaccaacattaaaactaatcacatcgttagtaattgatgttactacagggtatttatctagttcagattcaggtaatgcttctgcaggagtgagtttctagatttgaacataaaagatgagaaggcaataaacagacaaaaagagaattagtctagaataatggggggaaatgtctagaaaggactctcttgtatcagnaaattatcatggaagcctatgtgaccaaggttacaggagttgaagcaatggatcaaagattggataaaattctcccttcagacttctgcagagaatttgaggcctgtgaatccttactgcataaaactttcaggtcaaatgagatggagaggagcagggacttcatgcattcttctctgaccctaaccatatgagtatcacaatgcatggtagcattctaaaatgcctttaagagagaagcctgtttaatattcattttagcagtgagccctaactcacttgcctatagaacctttcattcttcataatttttgttatagttctgaggataaactttttaaagtactagactagattatcctgacaggtccatcctaactctgaggtccttttgatttgtagtcaactttgtgctctcctccattagtgatgttttctcaaataaatcagtatctgaacacttacttcccaagtataaatgacattcaaacaagtaatattcaaagagagcaaagcactcaagatatgaagtggaattccactggaataggcaaggaagtactgcctatataatctacttctgtagacttctagaatgttctaaaaaaggaaatggaaaacaacatggataatcttcagtctcatttttattagactttatgaagtctaagaattttttatttataggaattcaagttttagttaaactaacaataaagtaataaataccatcaaaatatatactctctgataaccaaaagaaggctaacagatctaattatgtgctggttaggctttgacatgttcttatctattgactctatagtcataggtcaaaaatagatttatctctacttggtaaagccagcatgtttaaaaatattcaactctttcaacaattgctctgaaatatgtaaagagagaaagaaatctaaattacctagactttattattggtcctagatggttgtcactcccctcaaatttatacagaaaagttttatgagtttcaaataatgctcatgttgcaaactatgtggtatcccctagaacagaatttttattggcaagccccttgagcattatccttccacactgcatctca

SEQ ID NO: 427033 - DNA, 1371 bp, Homo sapiens
ttatttgcacccgccccccgcccgcgtcggtctggggcttttgacttctccccgaacacatttcccctcccgtcgctgggtccctgcgatcgcccccagctggtggggctcgcggagctcaggggagcggggtcctctgcgccgctgcagcgcgagttaataaacagttaagtttggaagactctgcagacacgttgagggggagttaccaagcccaggcagcaaaaacatcctggcacattcctggggagtcctcagctgccagcatctgattagaaccatatctctcgccgggagtggccgcgcggctccgaagctcccggccggcggctatttaagcgaggcccgccgcatccgctgcgctgtagcctggaggctccgggcgcggggaagtcatgctcgcttcacggaggcaatagctagccggtgtctgtgggaggttatgtttatttgagacttctccatcgggatcgcctggtgtcaccaagtgtccactggtactgaggtttgctgcctgccttcttgccatgtctaacgaagtagaaacaagtgcaaccaatggtcagcccgaccaacaggccgcaccaaaagcaccctcaaagaaggaaaaaaagaaaggccctgaaaagacagatgaatatctcttagcaaggttcaaaggcgatggtgtaaaatataaggccaagctgattggcattgatgatgtgccagatgcaagaggggataaaatgagccaagactctatgatgaaactaaagggaatggcggcagctggtcggtctcagggacaacacaaacaaaggatctgggtcaacatttccctttctgggataaaaataattgatgagaaaactggggtaatagagcatgaacatccagtaaataagatttctttcattgcccgtgatgtgacagacaaccgggcatttggttacgtgtgtggaggagaaggccagcatcagttttttgccataaaaaccgggcaacaggctgaaccattagttgttgatcttaaagacctttttcaagttatctataatgtaaagaaaaaggaagaagaaaagaaaaagatagaggaagccagcaaagcagttgagaatgggagtgaggccctaatgattctagatgaccaaactaacaaactgaaatcgggtgttgaccagatggatttgtttggggacatgtctacacctcctgacctaaatagtccaacaggtgactattcagaagtctaacattgtggctcctgtttggtgtcctaagaacttcttctgaagtatttgaaaacgagaactctaccagctgtgaacactcaactgttctaacccagaggtggctcaaaacaaataaataaatattgaaatcacaagc

SEQ ID NO: 427034 - DNA, 527 bp, Homo sapiens
aggcttccgttgcccaacacccaggcttcaggcattacttcaaggcaaccagggcagtgcctgccaggatgctgctggtgcccaggccagagccgtggggcagctcagaccaggtgtgcagctcaggttcttgtgggagttaatcagccacatccaacgttaccttgagggggaagaagagggtgatgctcagaagctaaacaagacaggggccacatgaccctctattgattagccccaagtagaaagtcctgtggttttatgtttaatggtaatagttgatcatatatggcataattttctatcagcttcctactcagtcactataaacacagacttgaaatagtactttaaatgtccaaatacctaaatgtgctaaactggaggtaactatttctaggtagttgaatttttgaaagtcatgatcagccacacaactgttttgtacatacttattttctcatgcacttttctgtatgcaaataaagctataaatttactcatttcaataaactggagtggcagaa

SEQ ID NO: 427035 - DNA, 1025 bp, Homo sapiens
  misc_feature (20)..(20): n is a, c, g, or t
  misc_feature (1001)..(1002): n is a, c, g, or t
tgaatgagctggtacctctngatgcaagtgtccatggtggtggtataaaattctcgagcttatctcctcttttaaatactgagtaaatacataagctttttctaagcttatgtatttactattaccactatgatctcagctttatttaagagcaatttaaaatgcagttcccataggtgtctttttttacctctcctaagaatatacaggcttgcctggattaagaccctatgatctctatgtagactgacttaaaatccaatggaatgaacaaaaatatttaggatgcttattggtagttgccccttttacacacttgctcccccaacttcaagcatttagcgatgagaccagaccaatgtgagtgtgtaaaggaatatagtagatttcactttgcaagtcctaggtagtgtcagacactaagactcagtagtccgtccgttgtaggaatctgtgtctttttttggaggactctttttctgtagtagtagttgttgttgttcatctgtcaagaaaaaagttttcctttttgtggctctcaaattggggtatagggtaggagacaaaatgaggctgtatttcactgttagtgagtaactaaggcttctccctccctccctgtcctgtcagtcttcagccaatgacttgcttgcatcagacatctttgctcctcccgtctcagaaccttcaggccaggcgtcacccacaggacaacctacagccctgcagcccaaccctctggatctcttcaaaacaagtgctcctgccccagtggggcccctggtgggtctaggtggtgtaactgtcacactccctcaggcaggaccatggaacacagcatctttggtcttcaatcagtccccttcaatggctccgggagccatgatgggtggtcaaccttcaggttttagtcagcccgtcatttttggtacaagtccagctgtttcaggttggaaccagccttcaccctttgcagcctcaactccccttttccagagctnnggatcctagatcgaccagcaaca

SEQ ID NO: 427036 - DNA, 912 bp, Homo sapiens
  misc_feature (20)..(20): n is a, c, g, or t
tgaatgagctggtacctctngatgcaagtgtccatggtggtggtataaaattctcgagcttatctcctcttttaaatactgagtaaatacataagctttttctaagcttatgtatttactattaccactatgatctcagctttatttaagagcaatttaaaatgcagttcccataggtgtctttttttacctctcctaagaatatacaggcttgcctggattaagaccctatgatctctatgtagactgacttaaaatccaatggaatgaacaaaaatatttaggatgcttattggtagttgccccttttacacacttgctcccccaacttcaagcatttagcgatgagaccagaccaatgtgagtgtgtaaaggaatatagtagatttcactttgcaagtcctaggtagtgtcagacactaagactcagtagtccgtccgttgtaggaatctgtgtctttttttggaggactctttttctgtagtagtagttgttgttgttcatctgtcaagaaaaaagttttcctttttgtggctctcaaattggggtatagggtaggagacaaaatgaggctgtatttcactgttagtgagtaactaaggcttctccctccctccctgtcctgtcagtcttcagccaatgacttgcttgcatcagacatctttgctcctcccgtctcagaaccttcaggccaggcgtcacccacaggacaacctacagccctgcagcccaaccctctggatctcttcaaaacaagtgctcctgccccagtggggcccctggtgggtctaggtaggtgcctagagataaaattaagtatgactcttttgcttttgctcataaaatgatgatgcatcggaagagatttcatactcccagagggttttacagcataagatttgagcatccca

SEQ ID NO: 427037 - DNA, 759 bp, Homo sapiens
ttatttgcacccgccccccgcccgcgtcggtctggggcttttgacttctccccgaacacatttcccctcccgtcgctgggtccctgcgatcgcccccagctggtggggctcgcggagctcaggggagcggggtcctctgcgccgctgcagcgcgagttaataaacagttaagtttggaagactctgcagacacgttgagggggagttaccaagcccaggcagcaaaaacatcctggcacattcctggggagtcctcagctgccagcatctgattagaaccatatctctcgccgggagtggccgcgcggctccgaagctcccggccggcggctatttaagcgaggcccgccgcatccgctgcgctgtagcctggaggctccgggcgcggggaagtcatgctcgcttcacggaggcaatagctagccggtgagtagcttcgaaacccttcttccctctggctccattttttttttaaagatctccttctctcctttgctccccctctctcacccccccgccccccgctacccttctttgagtacagaccttgggctgtggggaatcttagaaatgagaccctgtgcttggggaaaccagcagttttgtggcctgacatctgaggaatgcttccgcggaatgtatttacctttcgaatccgactccagatgcccagcttgtgacatttaacaaacgcctccttttgtgtcgtgtgtgtgtgtgtgtgtgtgtgtgtgtgtgtgtgtgtgtgtgtgtgtgtgt

SEQ ID NO: 427038 - DNA, 189 bp, Homo sapiens
taactaagggatgccctggttcaacgtcttctatgccgtcttgctgtcccggatgaaaagtgccgaatcctctcatcgatggcagatcaagtcgaaaacaaagctgactgactttgaaaattttaatattaaaaccattgtaggatgtttttaaaaattcaacttctcttgtttttccaccctcatcag

SEQ ID NO: 427039 - DNA, 296 bp, Homo sapiens
catattcccatacgtttcccataacgctgtcaattttgtacttctaacagtttattttctccccacctcaactccatacacagttgattgtggaacatgattttgctcaaaggaagtaagaataagacaggacagaatattacatacatgatcagttgtagtataatcaggatttatattacttaaattttggagagtctagagcatatttggtcataattagaactagcattcttcatcctgtattcctttcttttctcaggccctgaaaagacagatgaatatctcttagcaag

SEQ ID NO: 427040 - DNA, 4354 bp, Homo sapiens
cgatctgactacgcggctcgatctgactacgcggctcgatctgactacgcggctcgatctggccgcgcggctccgaagctcccggccggcggctatttaagcgaggcccgccgcatccgctgcgctgtagcctggaggctccgggcgcggggaagtcatgctcgcttcacggaggcaatagctagccggtgtctgtgggaggttatgtttatttgagacttctccatcgggatcgcctggtgtcaccaagtgtccactggtactgaggtttgctgcctgccttcttgccatgtctaacgaagtagaaacaagtgcaaccaatggtcagcccgaccaacaggccgcaccaaaagcaccctcaaagaaggaaaaaaagaaaggccctgaaaagacagatgaatatctcttagcaaggttcaaaggcgatggtgtaaaatataaggccaagctgattggcattgatgatgtgccagatgcaagaggggataaaatgagccaagactctatgatgaaactaaagggaatggcggcagctggtcggtctcagggacaacacaaacaaaggatctgggtcaacatttccctttctgggataaaaataattgatgagaaaactggggtaatagagcatgaacatccagtaaataagatttctttcattgcccgtgatgtgacagacaaccgggcatttggttacgtgtgtggaggagaaggccagcatcagttttttgccataaaaaccgggcaacaggctgaaccattagttgttgatcttaaagacctttttcaagttatctataatgtaaagaaaaaggaagaagaaaagaaaaagatagaggaagccagcaaagcagttgagaatgggagtgaggccctaatgattctagatgaccaaactaacaaactgaaatcgggtgttgaccagatggatttgtttggggacatgtctacacctcctgacctaaatagtccaacagaaagcaaagatatcctgttagtggatctaaactctgaaatcgacaccaatcagaattctttaagagaaaatccattcttaacaaacggcatcacctcctgttctcttcctcgaccaacgcctcaggcatccttcttgcctgaaaatgccttttctgccaatctcaacttctttcccacccctaatcctgatcctttccgtgacgatcctttcacacagccagaccaatcgacaccttcttcgtttgattctctcaaatctccagatcagaagaaagagaattcgagtagctcgtctactccgctgagtaatgggcccctgaatggtgatgttgactactttggtcagcaatttgaccagatctctaaccggactggcaaacaggaagctcaggcaggcccatggcccttttcaagttcgcaaacccagccagcagtgagaactcaaaatggggtatctgaaagagaacagaacggcttctctgtcaaatcctccccgaacccttttgtgggaagccctcccaaaggactgtccatacagaatggcgtaaagcaggacttggaaagctctgtccagtcctcaccacatgactccatagccattatcccacctccacaaagtaccaaaccaggaagaggcagaaggactgctaagtcttcagccaatgacttgcttgcatcagacatctttgctcctcccgtctcagaaccttcaggccaggcgtcacccacaggacaacctacagccctgcagcccaaccctctggatctcttcaaaacaagtgctcctgccccagtggggcccctggtgggtctaggtggtgtaactgtcacactccctcaggcaggaccatggaacacagcatctttggtcttcaatcagtccccttcaatggctccgggagccatgatgggtggtcaaccttcaggttttagtcagcccgtcatttttggtacaagtccagctgtttcaggttggaaccagccttcaccctttgcagcctcaactccccctccagtgcctgttgtctggggcccttctgcatctgtggcacccaatgcttggtcaacaacaagccctttggggaatccttttcagagcaatatttttccagctcctgctgtgtccactcagcccccatccatgcactcctctctcctggtcactcctcctcagccacctcccagagctggccctcccaaggacatctccagtgatgccttcactgccttagacccacttggggataaagagatcaaggatgtgaaagaaatgtttaaggatttccaactgcggcagccacctgctgtgcccgcgcggaagggagagcagacttcttctgggactttgagtgcctttgccagttatttcaacagcaaggttggcattcctcaggagaatgcagaccatgatgactttgatgctaatcaactattgaacaagatcaatgaaccaccaaagccagctcccagacaagtttccctgccagttaccaaatctactgacaatgcatttgagaaccctttctttaaagattcttttggttcatcacaagcctctgtggcttcttctcaacctgtatcttctgagatgtatagggatccatttggaaatccttttgcctaaattctgaacttggtctgcagaccatccagaggaataaaaaggttggccttagtagtcaaaaacaaagctgatagccagacacgttctgatttctgcccttgttccagctttgacgtattatctgttgccttatttctcattgcctcttctacttgtaaaatgcttttcactttctgtctaggttaaagctaaactgaatctatggctttaaataaattaagatcctaaactctctagcttaagtgtaaatgaagtacagtagtttccctactgaaccctgcctcttgtgtccctggaaccttctagaacacctgccttctaccctctggttgggagatgcagccaccacatcccttcatatcatactgttttgaataaattttcaaatccttattgttcagagttgtttgggggttctgtttcagagcataaaacctaaaggttatagtagaacaaggcaccttcttaaaagaaatcttgcttcagaccatcagttacagagaatttctaaagtaaaattgaagcaactacaacttctccttagacactttggaatctaaccacttaaggacctttttaaagagatagcttctcttctttctgaagatcaatttctcccaaggccaagattgtccttttctcccatttcttgctagctattgcaaatgagggaagaacattattcatctctcctccccttttttttctgattcttttttcagtcagttttgctcctgggttcaagtagtattaccaccctttcacaagcaacagactctcacagggcaaaaaaaaaaaaaaatctaatgattcacagacagatctggagcctctcttcattctcagtaattgctagtcccaagaactagaattgcaaatgggcacaacctatatccttcctgtggaagaggaggccactctcttgagctgaagttccagaagagcagttaatgttcaagagaaattgaactcaactcagcaacaaaggactctattttgaagagcaacatatcacaaagctaaatgtgattgtgccaaacacattaggtgcttatttggggtcatgctaggcctttatcaagtaactggaaaacttttcttgcagccacaatctcaatgtcgttagtaggaagataagaggggagaaaaagctgtagaacaaatgtttggggttaccattgaaaatctaatgtctgcaatatttttctcctcacaacttggaaacgttcccagttcattttcagtcctgttgtgagcacagttctgaagggtttattattgtcaaaataagttttgttttgttttgtttatgttgggtttttaatgttgtctcttgacccttaatgctcaggttcttgtgggagttaatcagccacatccaacgttaccttgagggggaagaagagggtgatgctcagaagctaaacaagacaggggccacatgaccctctattgattagccccaagtagaaagtcctgtggttttatgtttaatggtaatagttgatcatatatggcataattttctatcagcttcctactcagtcactataaacacagacttgaaatagtactttaaatgtccaaatacctaaatgtgctaaactggaggtaactatttctaggtagttgaatttttgaaagtcatgatcagccacacaactgttttgtacatacttattttctcatgcacttttctgtatgcaaataaagctataaatttactcatttcaataaactggagtggcagaa

SEQ ID NO: 427041 - DNA, 4824 bp, Homo sapiens
ttatttgcacccgccccccgcccgcgtcggtctggggcttttgacttctccccgaacacatttcccctcccgtcgctgggtccctgcgatcgcccccagctggtggggctcgcggagctcaggggagcggggtcctctgcgccgctgcagcgcgagttaataaacagttaagtttggaagactctgcagacacgttgagggggagttaccaagcccaggcagcaaaaacatcctggcacattcctggggagtcctcagctgccagcatctgattagaaccatatctctcgccgggagtggccgcgcggctccgaagctcccggccggcggctatttaagcgaggcccgccgcatccgctgcgctgtagcctggaggctccgggcgcggggaagtcatgctcgcttcacggaggcaatagctagccggtgtctgtgggaggttatgtttatttgagacttctccatcgggatcgcctggtgtcaccaagtgtccactggtactgaggtttgctgcctgccttcttgccatgtctaacgaagtagaaacaagtgcaaccaatggtcagcccgaccaacaggccgcaccaaaagcaccctcaaagaaggaaaaaaagaaaggccctgaaaagacagatgaatatctcttagcaaggttcaaaggcgatggtgtaaaatataaggccaagctgattggcattgatgatgtgccagatgcaagaggggataaaatgagccaagactctatgatgaaactaaagggaatggcggcagctggtcggtctcagggacaacacaaacaaaggatctgggtcaacatttccctttctgggataaaaataattgatgagaaaactggggtaatagagcatgaacatccagtaaataagatttctttcattgcccgtgatgtgacagacaaccgggcatttggttacgtgtgtggaggagaaggccagcatcagttttttgccataaaaaccgggcaacaggctgaaccattagttgttgatcttaaagacctttttcaagttatctataatgtaaagaaaaaggaagaagaaaagaaaaagatagaggaagccagcaaagcagttgagaatgggagtgaggccctaatgattctagatgaccaaactaacaaactgaaatcgggtgttgaccagatggatttgtttggggacatgtctacacctcctgacctaaatagtccaacagaaagcaaagatatcctgttagtggatctaaactctgaaatcgacaccaatcagaattctttaagagaaaatccattcttaacaaacggcatcacctcctgttctcttcctcgaccaacgcctcaggcatccttcttgcctgaaaatgccttttctgccaatctcaacttctttcccacccctaatcctgatcctttccgtgacgatcctttcacacagccagaccaatcgacaccttcttcgtttgattctctcaaatctccagatcagaagaaagagaattcgagtagctcgtctactccgctgagtaatgggcccctgaatggtgatgttgactactttggtcagcaatttgaccagatctctaaccggactggcaaacaggaagctcaggcaggcccatggcccttttcaagttcgcaaacccagccagcagtgagaactcaaaatggggtatctgaaagagaacagaacggcttctctgtcaaatcctccccgaacccttttgtgggaagccctcccaaaggactgtccatacagaatggcgtaaagcaggacttggaaagctctgtccagtcctcaccacatgactccatagccattatcccacctccacaaagtaccaaaccaggaagaggcagaaggactgctaagtcttcagccaatgacttgcttgcatcagacatctttgctcctcccgtctcagaaccttcaggccaggcgtcacccacaggacaacctacagccctgcagcccaaccctctggatctcttcaaaacaagtgctcctgccccagtggggcccctggtgggtctaggtggtgtaactgtcacactccctcaggcaggaccatggaacacagcatctttggtcttcaatcagtccccttcaatggctccgggagccatgatgggtggtcaaccttcaggttttagtcagcccgtcatttttggtacaagtccagctgtttcaggttggaaccagccttcaccctttgcagcctcaactccccctccagtgcctgttgtctggggcccttctgcatctgtggcacccaatgcttggtcaacaacaagccctttggggaatccttttcagagcaatatttttccagctcctgctgtgtccactcagcccccatccatgcactcctctctcctggtcactcctcctcagccacctcccagagctggccctcccaaggacatctccagtgatgccttcactgccttagacccacttggggataaagagatcaaggatgtgaaagaaatgtttaaggatttccaactgcggcagccacctgctgtgcccgcgcggaagggagagcagacttcttctgggactttgagtgcctttgccagttatttcaacagcaaggttggcattcctcaggagaatgcagaccatgatgactttgatgctaatcaactattgaacaagatcaatgaaccaccaaagccagctcccagacaagtttccctgccagttaccaaatctactgacaatgcatttgagaaccctttctttaaagattcttttggttcatcacaagcctctgtggcttcttctcaacctgtatcttctgagatgtatagggatccatttggaaatccttttgcctaaattctgaacttggtctgcagaccatccagaggaataaaaaggttggccttagtagtcaaaaacaaagctgatagccagacacgttctgatttctgcccttgttccagctttgacgtattatctgttgccttatttctcattgcctcttctacttgtaaaatgcttttcactttctgtctaggttaaagctaaactgaatctatggctttaaataaattaagatcctaaactctctagcttaagtgtaaatgaagtacagtagtttccctactgaaccctgcctcttgtgtccctggaaccttctagaacacctgccttctaccctctggttgggagatgcagccaccacatcccttcatatcatactgttttgaataaattttcaaatccttattgttcagagttgtttgggggttctgtttcagagcataaaacctaaaggttatagtagaacaaggcaccttcttaaaagaaatcttgcttcagaccatcagttacagagaatttctaaagtaaaattgaagcaactacaacttctccttagacactttggaatctaaccacttaaggacctttttaaagagatagcttctcttctttctgaagatcaatttctcccaaggccaagattgtccttttctcccatttcttgctagctattgcaaatgagggaagaacattattcatctctcctccccttttttttctgattcttttttcagtcagttttgctcctgggttcaagtagtattaccaccctttcacaagcaacagactctcacagggcaaaaaaaaaaaaaaatctaatgattcacagacagatctggagcctctcttcattctcagtaattgctagtcccaagaactagaattgcaaatgggcacaacctatatccttcctgtggaagaggaggccactctcttgagctgaagttccagaagagcagttaatgttcaagagaaattgaactcaactcagcaacaaaggactctattttgaagagcaacatatcacaaagctaaatgtgattgtgccaaacacattaggtgcttatttggggtcatgctaggcctttatcaagtaactggaaaacttttcttgcagccacaatctcaatgtcgttagtaggaagataagaggggagaaaaagctgtagaacaaatgtttggggttaccattgaaaatctaatgtctgcaatatttttctcctcacaacttggaaacgttcccagttcattttcagtcctgttgtgagcacagttctgaagggtttattattgtcaaaataagttttgttttgttttgtttatgttgggtttttaatgttgtctcttgacccttaatgctcaggttcttgtgggagttaatcagccacatccaacgttaccttgagggggaagaagagggtgatgctcagaagctaaacaagacaggggccacatgaccctctattgattagccccaagtagaaagtcctgtggttttatgtttaatggtaatagttgatcatatatggcataattttctatcagcttcctactcagtcactataaacacagacttgaaatagtactttaaatgtccaaatacctaaatgtgctaaactggaggtaactatttctaggtagttgaatttttgaaagtcatgatcagccacacaactgttttgtacatacttattttctcatgcacttttctgtatgcaaataaagctataaatttactcatttcaataaactggagtggcagaaaaatcacaaacatctataacaatgttataaacccaagtgctgtcttgatgactgcatgaatataactggaatggaaacattaaagctgtaaagtgtaaatggctttgggagatagaactctcataagcctttaccataccactttgagaggcggcaaggactataatgaagactaaaactgcctatctccttatcctacagatacagtcagcagactagtgctgtggatcag

SEQ ID NO: 427042 - DNA, 4658 bp, Homo sapiens
aatttatcaatgtgaataagatacaggtcataactctactctagtcactgcctttatagttaagcaattttccgaagaactgaaatttataatgcccaatctcaaatggcatttgcagtcttaccaggcttaacattcaatttatttctgttttgcaataatgcctagcaagttttcgatccctatctttaatacttgctttttatgtgaaagttctaataaaaactgcttagctagataatcattaaatgttaccagatatcaagtgcttaaagaaaaaactaataggcacacatgttccattttggaaactacaaaggaaacactcctacccactcccctgctttcagtcttcagtctaatacagcaggagaaggaacaaaatgagtccaaagaactacaaaagaaagtcactagttgtaagcctattctggcataaagtctgggtctgctgtgttctgatctcaatatgcctctaaactctgcctacaggtgtctgtgggaggttatgtttatttgagacttctccatcgggatcgcctggtgtcaccaagtgtccactggtactgaggtttgctgcctgccttcttgccatgtctaacgaagtagaaacaagtgcaaccaatggtcagcccgaccaacaggccgcaccaaaagcaccctcaaagaaggaaaaaaagaaaggccctgaaaagacagatgaatatctcttagcaaggttcaaaggcgatggtgtaaaatataaggccaagctgattggcattgatgatgtgccagatgcaagaggggataaaatgagccaagactctatgatgaaactaaagggaatggcggcagctggtcggtctcagggacaacacaaacaaaggatctgggtcaacatttccctttctgggataaaaataattgatgagaaaactggggtaatagagcatgaacatccagtaaataagatttctttcattgcccgtgatgtgacagacaaccgggcatttggttacgtgtgtggaggagaaggccagcatcagttttttgccataaaaaccgggcaacaggctgaaccattagttgttgatcttaaagacctttttcaagttatctataatgtaaagaaaaaggaagaagaaaagaaaaagatagaggaagccagcaaagcagttgagaatgggagtgaggccctaatgattctagatgaccaaactaacaaactgaaatcgggtgttgaccagatggatttgtttggggacatgtctacacctcctgacctaaatagtccaacagaaagcaaagatatcctgttagtggatctaaactctgaaatcgacaccaatcagaattctttaagagaaaatccattcttaacaaacggcatcacctcctgttctcttcctcgaccaacgcctcaggcatccttcttgcctgaaaatgccttttctgccaatctcaacttctttcccacccctaatcctgatcctttccgtgacgatcctttcacacagccagaccaatcgacaccttcttcgtttgattctctcaaatctccagatcagaagaaagagaattcgagtagctcgtctactccgctgagtaatgggcccctgaatggtgatgttgactactttggtcagcaatttgaccagatctctaaccggactggcaaacaggaagctcaggcaggcccatggcccttttcaagttcgcaaacccagccagcagtgagaactcaaaatggggtatctgaaagagaacagaacggcttctctgtcaaatcctccccgaacccttttgtgggaagccctcccaaaggactgtccatacagaatggcgtaaagcaggacttggaaagctctgtccagtcctcaccacatgactccatagccattatcccacctccacaaagtaccaaaccaggaagaggcagaaggactgctaagtcttcagccaatgacttgcttgcatcagacatctttgctcctcccgtctcagaaccttcaggccaggcgtcacccacaggacaacctacagccctgcagcccaaccctctggatctcttcaaaacaagtgctcctgccccagtggggcccctggtgggtctaggtggtgtaactgtcacactccctcaggcaggaccatggaacacagcatctttggtcttcaatcagtccccttcaatggctccgggagccatgatgggtggtcaaccttcaggttttagtcagcccgtcatttttggtacaagtccagctgtttcaggttggaaccagccttcaccctttgcagcctcaactccccctccagtgcctgttgtctggggcccttctgcatctgtggcacccaatgcttggtcaacaacaagccctttggggaatccttttcagagcaatatttttccagctcctgctgtgtccactcagcccccatccatgcactcctctctcctggtcactcctcctcagccacctcccagagctggccctcccaaggacatctccagtgatgccttcactgccttagacccacttggggataaagagatcaaggatgtgaaagaaatgtttaaggatttccaactgcggcagccacctgctgtgcccgcgcggaagggagagcagacttcttctgggactttgagtgcctttgccagttatttcaacagcaaggttggcattcctcaggagaatgcagaccatgatgactttgatgctaatcaactattgaacaagatcaatgaaccaccaaagccagctcccagacaagtttccctgccagttaccaaatctactgacaatgcatttgagaaccctttctttaaagattcttttggttcatcacaagcctctgtggcttcttctcaacctgtatcttctgagatgtatagggatccatttggaaatccttttgcctaaattctgaacttggtctgcagaccatccagaggaataaaaaggttggccttagtagtcaaaaacaaagctgatagccagacacgttctgatttctgcccttgttccagctttgacgtattatctgttgccttatttctcattgcctcttctacttgtaaaatgcttttcactttctgtctaggttaaagctaaactgaatctatggctttaaataaattaagatcctaaactctctagcttaagtgtaaatgaagtacagtagtttccctactgaaccctgcctcttgtgtccctggaaccttctagaacacctgccttctaccctctggttgggagatgcagccaccacatcccttcatatcatactgttttgaataaattttcaaatccttattgttcagagttgtttgggggttctgtttcagagcataaaacctaaaggttatagtagaacaaggcaccttcttaaaagaaatcttgcttcagaccatcagttacagagaatttctaaagtaaaattgaagcaactacaacttctccttagacactttggaatctaaccacttaaggacctttttaaagagatagcttctcttctttctgaagatcaatttctcccaaggccaagattgtccttttctcccatttcttgctagctattgcaaatgagggaagaacattattcatctctcctccccttttttttctgattcttttttcagtcagttttgctcctgggttcaagtagtattaccaccctttcacaagcaacagactctcacagggcaaaaaaaaaaaaaaatctaatgattcacagacagatctggagcctctcttcattctcagtaattgctagtcccaagaactagaattgcaaatgggcacaacctatatccttcctgtggaagaggaggccactctcttgagctgaagttccagaagagcagttaatgttcaagagaaattgaactcaactcagcaacaaaggactctattttgaagagcaacatatcacaaagctaaatgtgattgtgccaaacacattaggtgcttatttggggtcatgctaggcctttatcaagtaactggaaaacttttcttgcagccacaatctcaatgtcgttagtaggaagataagaggggagaaaaagctgtagaacaaatgtttggggttaccattgaaaatctaatgtctgcaatatttttctcctcacaacttggaaacgttcccagttcattttcagtcctgttgtgagcacagttctgaagggtttattattgtcaaaataagttttgttttgttttgtttatgttgggtttttaatgttgtctcttgacccttaatgctcaggttcttgtgggagttaatcagccacatccaacgttaccttgagggggaagaagagggtgatgctcagaagctaaacaagacaggggccacatgaccctctattgattagccccaagtagaaagtcctgtggttttatgtttaatggtaatagttgatcatatatggcataattttctatcagcttcctactcagtcactataaacacagacttgaaatagtactttaaatgtccaaatacctaaatgtgctaaactggaggtaactatttctaggtagttgaatttttgaaagtcatgatcagccacacaactgttttgtacatacttattttctcatgcacttttctgtatgcaaataaagctataaatttactcatttcaataaactggagtggcagaa

SEQ ID NO: 427043 - DNA, 4538 bp, Homo sapiens
ttatttgcacccgccccccgcccgcgtcggtctggggcttttgacttctccccgaacacatttcccctcccgtcgctgggtccctgcgatcgcccccagctggtggggctcgcggagctcaggggagcggggtcctctgcgccgctgcagcgcgagttaataaacagttaagtttggaagactctgcagacacgttgagggggagttaccaagcccaggcagcaaaaacatcctggcacattcctggggagtcctcagctgccagcatctgattagaaccatatctctcgccgggagtggccgcgcggctccgaagctcccggccggcggctatttaagcgaggcccgccgcatccgctgcgctgtagcctggaggctccgggcgcggggaagtcatgctcgcttcacggaggcaatagctagccggtgtctgtgggaggttatgtttatttgagacttctccatcgggatcgcctggtgtcaccaagtgtccactggtactgaggtttgctgcctgccttcttgccatgtctaacgaagtagaaacaagtgcaaccaatggtcagcccgaccaacaggccgcaccaaaagcaccctcaaagaaggaaaaaaagaaaggccctgaaaagacagatgaatatctcttagcaaggttcaaaggcgatggtgtaaaatataaggccaagctgattggcattgatgatgtgccagatgcaagaggggataaaatgagccaagactctatgatgaaactaaagggaatggcggcagctggtcggtctcagggacaacacaaacaaaggatctgggtcaacatttccctttctgggataaaaataattgatgagaaaactggggtaatagagcatgaacatccagtaaataagatttctttcattgcccgtgatgtgacagacaaccgggcatttggttacgtgtgtggaggagaaggccagcatcagttttttgccataaaaaccgggcaacaggctgaaccattagttgttgatcttaaagacctttttcaagttatctataatgtaaagaaaaaggaagaagaaaagaaaaagatagaggaagccagcaaagcagttgagaatgggagtgaggccctaatgattctagatgaccaaactaacaaactgaaatcgggtgttgaccagatggatttgtttggggacatgtctacacctcctgacctaaatagtccaacagaaagcaaagatatcctgttagtggatctaaactctgaaatcgacaccaatcagaattctttaagagaaaatccattcttaacaaacggcatcacctcctgttctcttcctcgaccaacgcctcaggcatccttcttgcctgaaaatgccttttctgccaatctcaacttctttcccacccctaatcctgatcctttccgtgacgatcctttcacacagccagaccaatcgacaccttcttcgtttgattctctcaaatctccagatcagaagaaagagaattcgagtagctcgtctactccgctgagtaatgggcccctgaatggtgatgttgactactttggtcagcaatttgaccagatctctaaccggactggcaaacaggaagctcaggcaggcccatggcccttttcaagttcgcaaacccagccagcagtgagaactcaaccttttgtgggaagccctcccaaaggactgtccatacagaatggcgtaaagcaggacttggaaagctctgtccagtcctcaccacatgactccatagccattatcccacctccacaaagtaccaaaccaggaagaggcagaaggactgctaagtcttcagccaatgacttgcttgcatcagacatctttgctcctcccgtctcagaaccttcaggccaggcgtcacccacaggacaacctacagccctgcagcccaaccctctggatctcttcaaaacaagtgctcctgccccagtggggcccctggtgggtctaggtggtgtaactgtcacactccctcaggcaggaccatggaacacagcatctttggtcttcaatcagtccccttcaatggctccgggagccatgatgggtggtcaaccttcaggttttagtcagcccgtcatttttggtacaagtccagctgtttcaggttggaaccagccttcaccctttgcagcctcaactccccctccagtgcctgttgtctggggcccttctgcatctgtggcacccaatgcttggtcaacaacaagccctttggggaatccttttcagagcaatatttttccagctcctgctgtgtccactcagcccccatccatgcactcctctctcctggtcactcctcctcagccacctcccagagctggccctcccaaggacatctccagtgatgccttcactgccttagacccacttggggataaagagatcaaggatgtgaaagaaatgtttaaggatttccaactgcggcagccacctgctgtgcccgcgcggaagggagagcagacttcttctgggactttgagtgcctttgccagttatttcaacagcaaggttggcattcctcaggagaatgcagaccatgatgactttgatgctaatcaactattgaacaagatcaatgaaccaccaaagccagctcccagacaagtttccctgccagttaccaaatctactgacaatgcatttgagaaccctttctttaaagattcttttggttcatcacaagcctctgtggcttcttctcaacctgtatcttctgagatgtatagggatccatttggaaatccttttgcctaaattctgaacttggtctgcagaccatccagaggaataaaaaggttggccttagtagtcaaaaacaaagctgatagccagacacgttctgatttctgcccttgttccagctttgacgtattatctgttgccttatttctcattgcctcttctacttgtaaaatgcttttcactttctgtctaggttaaagctaaactgaatctatggctttaaataaattaagatcctaaactctctagcttaagtgtaaatgaagtacagtagtttccctactgaaccctgcctcttgtgtccctggaaccttctagaacacctgccttctaccctctggttgggagatgcagccaccacatcccttcatatcatactgttttgaataaattttcaaatccttattgttcagagttgtttgggggttctgtttcagagcataaaacctaaaggttatagtagaacaaggcaccttcttaaaagaaatcttgcttcagaccatcagttacagagaatttctaaagtaaaattgaagcaactacaacttctccttagacactttggaatctaaccacttaaggacctttttaaagagatagcttctcttctttctgaagatcaatttctcccaaggccaagattgtccttttctcccatttcttgctagctattgcaaatgagggaagaacattattcatctctcctccccttttttttctgattcttttttcagtcagttttgctcctgggttcaagtagtattaccaccctttcacaagcaacagactctcacagggcaaaaaaaaaaaaaaatctaatgattcacagacagatctggagcctctcttcattctcagtaattgctagtcccaagaactagaattgcaaatgggcacaacctatatccttcctgtggaagaggaggccactctcttgagctgaagttccagaagagcagttaatgttcaagagaaattgaactcaactcagcaacaaaggactctattttgaagagcaacatatcacaaagctaaatgtgattgtgccaaacacattaggtgcttatttggggtcatgctaggcctttatcaagtaactggaaaacttttcttgcagccacaatctcaatgtcgttagtaggaagataagaggggagaaaaagctgtagaacaaatgtttggggttaccattgaaaatctaatgtctgcaatatttttctcctcacaacttggaaacgttcccagttcattttcagtcctgttgtgagcacagttctgaagggtttattattgtcaaaataagttttgttttgttttgtttatgttgggtttttaatgttgtctcttgacccttaatgctcaggttcttgtgggagttaatcagccacatccaacgttaccttgagggggaagaagagggtgatgctcagaagctaaacaagacaggggccacatgaccctctattgattagccccaagtagaaagtcctgtggttttatgtttaatggtaatagttgatcatatatggcataattttctatcagcttcctactcagtcactataaacacagacttgaaatagtactttaaatgtccaaatacctaaatgtgctaaactggaggtaactatttctaggtagttgaatttttgaaagtcatgatcagccacacaactgttttgtacatacttattttctcatgcacttttctgtatgcaaataaagctataaatttactcatttcaataaactggagtggcagaa

SEQ ID NO: 427044 - DNA, 3479 bp, Homo sapiens
  misc_feature (87)..(87): n is a, c, g, or t
gcctgcaatggtagttgtagacccgtgtggataccgtcgagttctattgtgtcactataaacgttgggacatgtctacactcctganctaaatagtccacagaaagcaaagatatcctgttagtggatctaaactctgaaatcgacaccaatcagaattctttaagagaaaatccattcttaacaaacggcatcacctcctgttctcttcctcgaccaacgcctcaggcatccttcttgcctgaaaatgccttttctgccaatctcaacttctttcccacccctaatcctgatcctttccgtgacgatcctttcacacagccagaccaatcgacaccttcttcgtttgattctctcaaatctccagatcagaagaaagagaattcgagtagctcgtctactccgctgagtaatgggcccctgaatggtgatgttgactactttggtcagcaatttgaccagatctctaaccggactggcaaacaggaagctcaggcaggcccatggcccttttcaagttcgcaaacccagccagcagtgagaactcaaaatggggtatctgaaagagaacagaacggcttctctgtcaaatcctccccgaacccttttgtgggaagccctcccaaaggactgtccatacagaatggcgtaaagcaggacttggaaagctctgtccagtcctcaccacatgactccatagccattatcccacctccacaaagtaccaaaccaggaagaggcagaaggactgctaagtcttcagccaatgacttgcttgcatcagacatctttgctcctcccgtctcagaaccttcaggccaggcgtcacccacaggacaacctacagccctgcagcccaaccctctggatctcttcaaaacaagtgctcctgccccagtggggcccctggtgggtctaggtggtgtaactgtcacactccctcaggcaggaccatggaacacagcatctttggtcttcaatcagtccccttcaatggctccgggagccatgatgggtggtcaaccttcaggttttagtcagcccgtcatttttggtacaagtccagctgtttcaggttggaaccagccttcaccctttgcagcctcaactccccctccagtgcctgttgtctggggcccttctgcatctgtggcacccaatgcttggtcaacaacaagccctttggggaatccttttcagagcaatatttttccagctcctgctgtgtccactcagcccccatccatgcactcctctctcctggtcactcctcctcagccacctcccagagctggccctcccaaggacatctccagtgatgccttcactgccttagacccacttggggataaagagatcaaggatgtgaaagaaatgtttaaggatttccaactgcggcagccacctgctgtgcccgcgcggaagggagagcagacttcttctgggactttgagtgcctttgccagttatttcaacagcaaggttggcattcctcaggagaatgcagaccatgatgactttgatgctaatcaactattgaacaagatcaatgaaccaccaaagccagctcccagacaagtttccctgccagttaccaaatctactgacaatgcatttgagaaccctttctttaaagattcttttggttcatcacaagcctctgtggcttcttctcaacctgtatcttctgagatgtatagggatccatttggaaatccttttgcctaaattctgaacttggtctgcagaccatccagaggaataaaaaggttggccttagtagtcaaaaacaaagctgatagccagacacgttctgatttctgcccttgttccagctttgacgtattatctgttgccttatttctcattgcctcttctacttgtaaaatgcttttcactttctgtctaggttaaagctaaactgaatctatggctttaaataaattaagatcctaaactctctagcttaagtgtaaatgaagtacagtagtttccctactgaaccctgcctcttgtgtccctggaaccttctagaacacctgccttctaccctctggttgggagatgcagccaccacatcccttcatatcatactgttttgaataaattttcaaatccttattgttcagagttgtttgggggttctgtttcagagcataaaacctaaaggttatagtagaacaaggcaccttcttaaaagaaatcttgcttcagaccatcagttacagagaatttctaaagtaaaattgaagcaactacaacttctccttagacactttggaatctaaccacttaaggacctttttaaagagatagcttctcttctttctgaagatcaatttctcccaaggccaagattgtccttttctcccatttcttgctagctattgcaaatgagggaagaacattattcatctctcctccccttttttttctgattcttttttcagtcagttttgctcctgggttcaagtagtattaccaccctttcacaagcaacagactctcacagggcaaaaaaaaaaaaaaatctaatgattcacagacagatctggagcctctcttcattctcagtaattgctagtcccaagaactagaattgcaaatgggcacaacctatatccttcctgtggaagaggaggccactctcttgagctgaagttccagaagagcagttaatgttcaagagaaattgaactcaactcagcaacaaaggactctattttgaagagcaacatatcacaaagctaaatgtgattgtgccaaacacattaggtgcttatttggggtcatgctaggcctttatcaagtaactggaaaacttttcttgcagccacaatctcaatgtcgttagtaggaagataagaggggagaaaaagctgtagaacaaatgtttggggttaccattgaaaatctaatgtctgcaatatttttctcctcacaacttggaaacgttcccagttcattttcagtcctgttgtgagcacagttctgaagggtttattattgtcaaaataagttttgttttgttttgtttatgttgggtttttaatgttgtctcttgacccttaatgctcaggttcttgtgggagttaatcagccacatccaacgttaccttgagggggaagaagagggtgatgctcagaagctaaacaagacaggggccacatgaccctctattgattagccccaagtagaaagtcctgtggttttatgtttaatggtaatagttgatcatatatggcataattttctatcagcttcctactcagtcactataaacacagacttgaaatagtactttaaatgtccaaatacctaaatgtgctaaactggaggtaactatttctaggtagttgaatttttgaaagtcatgatcagccacacaactgttttgtacatacttattttctcatgcacttttctgtatgcaaataaagctataaatttactcatttcaataaactggagtggcagaa

SEQ ID NO: 427045 - DNA, 3938 bp, Homo sapiens
ttatttgcacccgccccccgcccgcgtcggtctggggcttttgacttctccccgaacacatttcccctcccgtcgctgggtccctgcgatcgcccccagctggtggggctcgcggagctcaggggagcggggtcctctgcgccgctgcagcgcgagttaataaacagttaagtttggaagactctgcagacacgttgagggggagttaccaagcccaggcagcaaaaacatcctggcacattcctggggagtcctcagctgccagcatctgattagaaccatatctctcgccgggagtggccgcgcggctccgaagctcccggccggcggctatttaagcgaggcccgccgcatccgctgcgctgtagcctggaggctccgggcgcggggaagtcatgctcgcttcacggaggcaatagctagccggtgtctgtgggaggttatgtttatttgagacttctccatcgggatcgcctggtgtcaccaagtgtccactggtactgaggtttgctgcctgccttcttgccatgtctaacgaagtagaaacaagtgcaaccaatggtcagcccgaccaacaggccgcaccaaaagcaccctcaaagaaggaaaaaaagaaaggccctgaaaagacagatgaatatctcttagcaaggttcaaaggcgatggtgtaaaatataaggccaagctgattggcattgatgatgtgccagatgcaagaggggataaaatgagccaagactctatgatgaaactaaagggaatggcggcagctggtcggtctcagggacaacacaaacaaaggatctgggtcaacatttccctttctgggataaaaataattgatgagaaaactggggtaatagagcatgaacatccagtaaataagatttctttcattgcccgtgatgtgacagacaaccgggcatttggttacgtgtgtggaggagaaggccagcatcagttttttgccataaaaaccgggcaacaggctgaaccattagttgttgatcttaaagacctttttcaagttatctataatgtaaagaaaaaggaagaagaaaagaaaaagatagaggaagccagcaaagcagttgagaatgggagtgaggccctaatgattctagatgaccaaactaacaaactgaaatcgggtgttgaccagatggatttgtttggggacatgtctacacctcctgacctaaatagtccaacatcttcagccaatgacttgcttgcatcagacatctttgctcctcccgtctcagaaccttcaggccaggcgtcacccacaggacaacctacagccctgcagcccaaccctctggatctcttcaaaacaagtgctcctgccccagtggggcccctggtgggtctaggtggtgtaactgtcacactccctcaggcaggaccatggaacacagcatctttggtcttcaatcagtccccttcaatggctccgggagccatgatgggtggtcaaccttcaggttttagtcagcccgtcatttttggtacaagtccagctgtttcaggttggaaccagccttcaccctttgcagcctcaactccccctccagtgcctgttgtctggggcccttctgcatctgtggcacccaatgcttggtcaacaacaagccctttggggaatccttttcagagcaatatttttccagctcctgctgtgtccactcagcccccatccatgcactcctctctcctggtcactcctcctcagccacctcccagagctggccctcccaaggacatctccagtgatgccttcactgccttagacccacttggggataaagagatcaaggatgtgaaagaaatgtttaaggatttccaactgcggcagccacctgctgtgcccgcgcggaagggagagcagacttcttctgggactttgagtgcctttgccagttatttcaacagcaaggttggcattcctcaggagaatgcagaccatgatgactttgatgctaatcaactattgaacaagatcaatgaaccaccaaagccagctcccagacaagtttccctgccagttaccaaatctactgacaatgcatttgagaaccctttctttaaagattcttttggttcatcacaagcctctgtggcttcttctcaacctgtatcttctgagatgtatagggatccatttggaaatccttttgcctaaattctgaacttggtctgcagaccatccagaggaataaaaaggttggccttagtagtcaaaaacaaagctgatagccagacacgttctgatttctgcccttgttccagctttgacgtattatctgttgccttatttctcattgcctcttctacttgtaaaatgcttttcactttctgtctaggttaaagctaaactgaatctatggctttaaataaattaagatcctaaactctctagcttaagtgtaaatgaagtacagtagtttccctactgaaccctgcctcttgtgtccctggaaccttctagaacacctgccttctaccctctggttgggagatgcagccaccacatcccttcatatcatactgttttgaataaattttcaaatccttattgttcagagttgtttgggggttctgtttcagagcataaaacctaaaggttatagtagaacaaggcaccttcttaaaagaaatcttgcttcagaccatcagttacagagaatttctaaagtaaaattgaagcaactacaacttctccttagacactttggaatctaaccacttaaggacctttttaaagagatagcttctcttctttctgaagatcaatttctcccaaggccaagattgtccttttctcccatttcttgctagctattgcaaatgagggaagaacattattcatctctcctccccttttttttctgattcttttttcagtcagttttgctcctgggttcaagtagtattaccaccctttcacaagcaacagactctcacagggcaaaaaaaaaaaaaaatctaatgattcacagacagatctggagcctctcttcattctcagtaattgctagtcccaagaactagaattgcaaatgggcacaacctatatccttcctgtggaagaggaggccactctcttgagctgaagttccagaagagcagttaatgttcaagagaaattgaactcaactcagcaacaaaggactctattttgaagagcaacatatcacaaagctaaatgtgattgtgccaaacacattaggtgcttatttggggtcatgctaggcctttatcaagtaactggaaaacttttcttgcagccacaatctcaatgtcgttagtaggaagataagaggggagaaaaagctgtagaacaaatgtttggggttaccattgaaaatctaatgtctgcaatatttttctcctcacaacttggaaacgttcccagttcattttcagtcctgttgtgagcacagttctgaagggtttattattgtcaaaataagttttgttttgttttgtttatgttgggtttttaatgttgtctcttgacccttaatgctcaggttcttgtgggagttaatcagccacatccaacgttaccttgagggggaagaagagggtgatgctcagaagctaaacaagacaggggccacatgaccctctattgattagccccaagtagaaagtcctgtggttttatgtttaatggtaatagttgatcatatatggcataattttctatcagcttcctactcagtcactataaacacagacttgaaatagtactttaaatgtccaaatacctaaatgtgctaaactggaggtaactatttctaggtagttgaatttttgaaagtcatgatcagccacacaactgttttgtacatacttattttctcatgcacttttctgtatgcaaataaagctataaatttactcatttcaataaactggagtggcagaa

SEQ ID NO: 427046 - DNA, 2902 bp, Homo sapiens
agctcggtacccgtgttcccttacaaccacagtcttctcaggcgaagactgtggaccgcccgtatcccgagcgcctcgatcaggcgaagactctgtccagtcctcaccacatgactccatagccattatcccacctccacaaagtaccaaaccaggaagaggcagaaggactgctaagtcttcagccaatgacttgcttgcatcagacatctttgctcctcccgtctcagaaccttcaggccaggcgtcacccacaggacaacctacagccctgcagcccaaccctctggatctcttcaaaacaagtgctcctgccccagtggggcccctggtgggtctaggtggtgtaactgtcacactccctcaggcaggaccatggaacacagcatctttggtcttcaatcagtccccttcaatggctccgggagccatgatgggtggtcaaccttcaggttttagtcagcccgtcatttttggtacaagtccagctgtttcaggttggaaccagccttcaccctttgcagcctcaactccccctccagtgcctgttgtctggggcccttctgcatctgtggcacccaatgcttggtcaacaacaagccctttggggaatccttttcagagcaatatttttccagctcctgctgtgtccactcagcccccatccatgcactcctctctcctggtcactcctcctcagccacctcccagagctggccctcccaaggacatctccagtgatgccttcactgccttagacccacttggggataaagagatcaaggatgtgaaagaaatgtttaaggatttccaactgcggcagccacctgctgtgcccgcgcggaagggagagcagacttcttctgggactttgagtgcctttgccagttatttcaacagcaaggttggcattcctcaggagaatgcagaccatgatgactttgatgctaatcaactattgaacaagatcaatgaaccaccaaagccagctcccagacaagtttccctgccagttaccaaatctactgacaatgcatttgagaaccctttctttaaagattcttttggttcatcacaagcctctgtggcttcttctcaacctgtatcttctgagatgtatagggatccatttggaaatccttttgcctaaattctgaacttggtctgcagaccatccagaggaataaaaaggttggccttagtagtcaaaaacaaagctgatagccagacacgttctgatttctgcccttgttccagctttgacgtattatctgttgccttatttctcattgcctcttctacttgtaaaatgcttttcactttctgtctaggttaaagctaaactgaatctatggctttaaataaattaagatcctaaactctctagcttaagtgtaaatgaagtacagtagtttccctactgaaccctgcctcttgtgtccctggaaccttctagaacacctgccttctaccctctggttgggagatgcagccaccacatcccttcatatcatactgttttgaataaattttcaaatccttattgttcagagttgtttgggggttctgtttcagagcataaaacctaaaggttatagtagaacaaggcaccttcttaaaagaaatcttgcttcagaccatcagttacagagaatttctaaagtaaaattgaagcaactacaacttctccttagacactttggaatctaaccacttaaggacctttttaaagagatagcttctcttctttctgaagatcaatttctcccaaggccaagattgtccttttctcccatttcttgctagctattgcaaatgagggaagaacattattcatctctcctccccttttttttctgattcttttttcagtcagttttgctcctgggttcaagtagtattaccaccctttcacaagcaacagactctcacagggcaaaaaaaaaaaaaaatctaatgattcacagacagatctggagcctctcttcattctcagtaattgctagtcccaagaactagaattgcaaatgggcacaacctatatccttcctgtggaagaggaggccactctcttgagctgaagttccagaagagcagttaatgttcaagagaaattgaactcaactcagcaacaaaggactctattttgaagagcaacatatcacaaagctaaatgtgattgtgccaaacacattaggtgcttatttggggtcatgctaggcctttatcaagtaactggaaaacttttcttgcagccacaatctcaatgtcgttagtaggaagataagaggggagaaaaagctgtagaacaaatgtttggggttaccattgaaaatctaatgtctgcaatatttttctcctcacaacttggaaacgttcccagttcattttcagtcctgttgtgagcacagttctgaagggtttattattgtcaaaataagttttgttttgttttgtttatgttgggtttttaatgttgtctcttgacccttaatgctcaggttcttgtgggagttaatcagccacatccaacgttaccttgagggggaagaagagggtgatgctcagaagctaaacaagacaggggccacatgaccctctattgattagccccaagtagaaagtcctgtggttttatgtttaatggtaatagttgatcatatatggcataattttctatcagcttcctactcagtcactataaacacagacttgaaatagtactttaaatgtccaaatacctaaatgtgctaaactggaggtaactatttctaggtagttgaatttttgaaagtcatgatcagccacacaactgttttgtacatacttattttctcatgcacttttctgtatgcaaataaagctataaatttactcatttcaataaactggagtggcagaa

SEQ ID NO: 427047 - DNA, 2950 bp, Homo sapiens
tatattcacttaaataagttcctgctattaacaggctctgttctagttgtttgagatgtatcagacaactagtgtctgtatgataagggcttatttttttgatgagtagatacttatggaccgtactacccttctaatcaggaaagttaaaaagacatggtaggaagaacatgggcctcaaaatgcaaccagcatttgaatgctcactatacagtgttagctggctaacttttacagtgattaatctgtcatattcttcccatatcagcctcagggctcaatggaggtgttagctgtggagaggctttccagagagttgtgctctctgaaattcaagaatcttcttcaagcttgactcctgataagtatttttcttcctcttacttcaggtggtgtaactgtcacactccctcaggcaggaccatggaacacagcatctttggtcttcaatcagtccccttcaatggctccgggagccatgatgggtggtcaaccttcaggttttagtcagcccgtcatttttggtacaagtccagctgtttcaggttggaaccagccttcaccctttgcagcctcaactccccctccagtgcctgttgtctggggcccttctgcatctgtggcacccaatgcttggtcaacaacaagccctttggggaatccttttcagagcaatatttttccagctcctgctgtgtccactcagcccccatccatgcactcctctctcctggtcactcctcctcagccacctcccagagctggccctcccaaggacatctccagtgatgccttcactgccttagacccacttggggataaagagatcaaggatgtgaaagaaatgtttaaggatttccaactgcggcagccacctgctgtgcccgcgcggaagggagagcagacttcttctgggactttgagtgcctttgccagttatttcaacagcaaggttggcattcctcaggagaatgcagaccatgatgactttgatgctaatcaactattgaacaagatcaatgaaccaccaaagccagctcccagacaagtttccctgccagttaccaaatctactgacaatgcatttgagaaccctttctttaaagattcttttggttcatcacaagcctctgtggcttcttctcaacctgtatcttctgagatgtatagggatccatttggaaatccttttgcctaaattctgaacttggtctgcagaccatccagaggaataaaaaggttggccttagtagtcaaaaacaaagctgatagccagacacgttctgatttctgcccttgttccagctttgacgtattatctgttgccttatttctcattgcctcttctacttgtaaaatgcttttcactttctgtctaggttaaagctaaactgaatctatggctttaaataaattaagatcctaaactctctagcttaagtgtaaatgaagtacagtagtttccctactgaaccctgcctcttgtgtccctggaaccttctagaacacctgccttctaccctctggttgggagatgcagccaccacatcccttcatatcatactgttttgaataaattttcaaatccttattgttcagagttgtttgggggttctgtttcagagcataaaacctaaaggttatagtagaacaaggcaccttcttaaaagaaatcttgcttcagaccatcagttacagagaatttctaaagtaaaattgaagcaactacaacttctccttagacactttggaatctaaccacttaaggacctttttaaagagatagcttctcttctttctgaagatcaatttctcccaaggccaagattgtccttttctcccatttcttgctagctattgcaaatgagggaagaacattattcatctctcctccccttttttttctgattcttttttcagtcagttttgctcctgggttcaagtagtattaccaccctttcacaagcaacagactctcacagggcaaaaaaaaaaaaaaatctaatgattcacagacagatctggagcctctcttcattctcagtaattgctagtcccaagaactagaattgcaaatgggcacaacctatatccttcctgtggaagaggaggccactctcttgagctgaagttccagaagagcagttaatgttcaagagaaattgaactcaactcagcaacaaaggactctattttgaagagcaacatatcacaaagctaaatgtgattgtgccaaacacattaggtgcttatttggggtcatgctaggcctttatcaagtaactggaaaacttttcttgcagccacaatctcaatgtcgttagtaggaagataagaggggagaaaaagctgtagaacaaatgtttggggttaccattgaaaatctaatgtctgcaatatttttctcctcacaacttggaaacgttcccagttcattttcagtcctgttgtgagcacagttctgaagggtttattattgtcaaaataagttttgttttgttttgtttatgttgggtttttaatgttgtctcttgacccttaatgctcaggttcttgtgggagttaatcagccacatccaacgttaccttgagggggaagaagagggtgatgctcagaagctaaacaagacaggggccacatgaccctctattgattagccccaagtagaaagtcctgtggttttatgtttaatggtaatagttgatcatatatggcataattttctatcagcttcctactcagtcactataaacacagacttgaaatagtactttaaatgtccaaatacctaaatgtgctaaactggaggtaactatttctaggtagttgaatttttgaaagtcatgatcagccacacaactgttttgtacatacttattttctcatgcacttttctgtatgcaaataaagctataaatttactcatttcaataaactggagtggcagaa

SEQ ID NO: 427048 - DNA, 3543 bp, Homo sapiens
ttatttgcacccgccccccgcccgcgtcggtctggggcttttgacttctccccgaacacatttcccctcccgtcgctgggtccctgcgatcgcccccagctggtggggctcgcggagctcaggggagcggggtcctctgcgccgctgcagcgcgagttaataaacagttaagtttggaagactctgcagacacgttgagggggagttaccaagcccaggcagcaaaaacatcctggcacattcctggggagtcctcagctgccagcatctgattagaaccatatctctcgccgggagtggccgcgcggctccgaagctcccggccggcggctatttaagcgaggcccgccgcatccgctgcgctgtagcctggaggctccgggcgcggggaagtcatgctcgcttcacggaggcaatagctagccggtgtctgtgggaggttatgtttatttgagacttctccatcgggatcgcctggtgtcaccaagtgtccactggtactgaggtttgctgcctgccttcttgccatgtctaacgaagtagaaacaagtgcaaccaatggtcagcccgaccaacaggccgcaccaaaagcaccctcaaagaaggaaaaaaagaaaggccctgaaaagacagatgaatatctcttagcaaggttcaaaggcgatggtgtaaaatataaggccaagctgattggcattgatgatgtgccagatgcaagaggggataaaatgagccaagactctatgatgaaactaaagggaatggcggcagctggtcggtctcagggacaacacaaacaaaggatctgggtcaacatttccctttctgggataaaaataattgatgagaaaactggggtaatagagcatgaacatccagtaaataagatttctttcattgcccgtgatgtgacagacaaccgggcatttggttacgtgtgtggaggagaaggccagcatcagttttttgccataaaaaccgggcaacaggctgaaccattagttgttgatcttaaagacctttttcaagttatctataatgtaaagaaaaaggaagaagaaaagaaaaagatagaggaagccagcaaagcagttgagaatgggagtgaggccctaatgattctagatgaccaaactaacaaactgaaatcggaaagcaaagatatcctgttagtggatctaaactctgaaatcgacaccaatcagaattctttaagagaaaatccattcttaacaaacggcatcacctcctgttctcttcctcgaccaacgcctcaggcatccttcttgcctgaaaatgccttttctgccaatctcaacttctttcccacccctaatcctgatcctttccgtgacgatcctttcacacagccagaccaatcgacaccttcttcgtttgattctctcaaatctccagatcagaagaaagagaattcgagtagctcgtctactccgctgagtaatgggcccctgaatggtgatgttgactactttggtcagcaatttgaccagatctctaaccggactggcaaacaggaagctcaggcaggcccatggcccttttcaagttcgcaaacccagccagcagtgagaactcaaaatggggtatctgaaagagaacagaacggcttctctgtcaaatcctccccgaacccttttgtgggaagccctcccaaaggactgtccatacagaatggcgtaaagcaggacttggaaagctctgtccagtcctcaccacatgactccatagccattatcccacctccacaaagtaccaaaccaggaagaggcagaaggactgctaagtcttcagccaatgacttgcttgcatcagacatctttgctcctcccgtctcagaaccttcaggccaggcgtcacccacaggacaacctacagccctgcagcccaaccctctggatctcttcaaaacaagtgctcctgccccagtggggcccctggtgggtctaggtggtgtaactgtcacactccctcaggcaggaccatggaacacagcatctttggtcttcaatcagtccccttcaatggctccgggagccatgatgggtggtcaaccttcaggttttagtcagcccgtcatttttggtacaagtccagctgtttcaggttggaaccagccttcaccctttgcagcctcaactccccctccagtgcctgttgtctggggcccttctgcatctgtggcacccaatgcttggtcaacaacaagccctttggggaatccttttcagagcaatatttttccagctcctgctgtgtccactcagcccccatccatgcactcctctctcctggtcactcctcctcagccacctcccagagctggccctcccaaggacatctccagtgatgccttcactgccttagacccacttggggataaagagatcaaggatgtgaaagaaatgtttaaggatttccaactgcggcagccacctgctgtgcccgcgcggaagggagagcagacttcttctgggactttgagtgcctttgccagttatttcaacagcaaggttggcattcctcaggagaatgcagaccatgatgactttgatgctaatcaactattgaacaagatcaatgaaccaccaaagccagctcccagacaagtttccctgccagttaccaaatctactgacaatgcatttgagaaccctttctttaaagattcttttggttcatcacaagcctctgtggcttcttctcaacctgtatcttctgagatgtatagggatccatttggaaatccttttgcctaaattctgaacttggtctgcagaccatccagaggaataaaaaggttggccttagtagtcaaaaacaaagctgatagccagacacgttctgatttctgcccttgttccagctttgacgtattatctgttgccttatttctcattgcctcttctacttgtaaaatgcttttcactttctgtctaggttaaagctaaactgaatctatggctttaaataaattaagatcctaaactctctagcttaagtgtaaatgaagtacagtagtttccctactgaaccctgcctcttgtgtccctggaaccttctagaacacctgccttctaccctctggttgggagatgcagccaccacatcccttcatatcatactgttttgaataaattttcaaatccttattgttcagagttgtttgggggttctgtttcagagcataaaacctaaaggttatagtagaacaaggcaccttcttaaaagaaatcttgcttcagaccatcagttacagagaatttctaaagtaaaattgaagcaactacaacttctccttagacactttggaatctaaccacttaaggacctttttaaagagatagcagggttttttcaggcagaacaattgttaacgaggccgagagtgcgtgttataccatttacttataggctaatagtggatagacgggcacgcaccttagacgatctgatcgtatccgataagtttgaaatcgaattccagccgctcggggcatctcactactttagagaccacccatt

SEQ ID NO: 427049 - DNA, 3348 bp, Homo sapiens
  misc_feature (2243)..(2243): n is a, c, g, or t
ttatttgcacccgccccccgcccgcgtcggtctggggcttttgacttctccccgaacacatttcccctcccgtcgctgggtccctgcgatcgcccccagctggtggggctcgcggagctcaggggagcggggtcctctgcgccgctgcagcgcgagttaataaacagttaagtttggaagactctgcagacacgttgagggggagttaccaagcccaggcagcaaaaacatcctggcacattcctggggagtcctcagctgccagcatctgattagaaccatatctctcgccgggagtggccgcgcggctccgaagctcccggccggcggctatttaagcgaggcccgccgcatccgctgcgctgtagcctggaggctccgggcgcggggaagtcatgctcgcttcacggaggcaatagctagccggtgtctgtgggaggttatgtttatttgagacttctccatcgggatcgcctggtgtcaccaagtgtccactggtactgaggtttgctgcctgccttcttgccatgtctaacgaagtagaaacaagtgcaaccaatggtcagcccgaccaacaggccgcaccaaaagcaccctcaaagaaggaaaaaaagaaaggccctgaaaagacagatgaatatctcttagcaaggttcaaaggcgatggtgtaaaatataaggccaagctgattggcattgatgatgtgccagatgcaagaggggataaaatgagccaagactctatgatgaaactaaagggaatggcggcagctggtcggtctcagggacaacacaaacaaaggatctgggtcaacatttccctttctgggataaaaataattgatgagaaaactggggtaatagagcatgaacatccagtaaataagatttctttcattgcccgtgatgtgacagacaaccgggcatttggttacgtgtgtggaggagaaggccagcatcagttttttgccataaaaaccgggcaacaggctgaaccattagttgttgatcttaaagacctttttcaagttatctataatgtaaagaaaaaggaagaagaaaagaaaaagatagaggaagccagcaaagcagttgagaatgggagtgaggccctaatgattctagatgaccaaactaacaaactgaaatcgggtgttgaccagatggatttgtttggggacatgtctacacctcctgacctaaatagtccaacagtaagtgtttgtttttaaatttgcaatgtaataaaatgacatctataactcaaattggcaataaccagaaatcttaagcatctcattgaaacttggaaggtgactgttgatttttgcaaatgaagtgtcaatggtttttagaataaatgtgaatcttaagtcaccatgggaacctatccacactaattcagttatattaatattgcttacagattaaacctgaacaataagtcagcaatgtagtccttcttggtatcacttaggattagaaggaggaggtgaataatagtccttgaataagcctacttgaagaaagtatgactgttagatggttaatcataaagcctcctggcctcttcatttcttttgcattctgtctgttgcaatttagcagcataaatttggtgtgaagtaagatttaaaacaaacaagtggctcagttatattccaccaaagcttgtccttgttagaaagctgcccattctcataggattttataccatatccagtctgctcaatattgaatgatctgtaacaaccctgtaagaacagaacagtattttcctttataaattaaaaaaaaatggtggttcagggaaaaaaaaagaagaaaaaaaaataaaaaggaaagaggtccagattcaagacttaggcccaagtcttcagaccttccaaaacatacctctaatgaaaatgtccatgacattttgaatgacttcttgcaacttcttttatttatgtaacagtttcctgagcacctgctatttgcaaggcatagcagtaagatgcacaacatcaatgacatcatggaatttactctccggcagggagaccaacattaaaactaatcacatcgttagtaattgatgttactacagggtatttatctagttcagattcaggtaatgcttctgcaggagtgagtttctagatttgaacataaaagatgagaaggcaataaacagacaaaaagagaattagtctagaataatggggggaaatgtctagaaaggactctcttgtatcagnaaattatcatggaagcctatgtgaccaaggttacaggagttgaagcaatggatcaaagattggataaaattctcccttcagacttctgcagagaatttgaggcctgtgaatccttactgcataaaactttcaggtcaaatgagatggagaggagcagggacttcatgcattcttctctgaccctaaccatatgagtatcacaatgcatggtagcattctaaaatgcctttaagagagaagcctgtttaatattcattttagcagtgagccctaactcacttgcctatagaacctttcattcttcataatttttgttatagttctgaggataaactttttaaagtactagactagattatcctgacaggtccatcctaactctgaggtccttttgatttgtagtcaactttgtgctctcctccattagtgatgttttctcaaataaatcagtatctgaacacttacttcccaagtataaatgacattcaaacaagtaatattcaaagagagcaaagcactcaagatatgaagtggaattccactggaataggcaaggaagtactgcctatataatctacttctgtagacttctagaatgttctaaaaaaggaaatggaaaacaacatggataatcttcagtctcatttttattagactttatgaagtctaagaattttttatttataggaattcaagttttagttaaactaacaataaagtaataaataccatcaaaatatatactctctgataaccaaaagaaggctaacagatctaattatgtgctggttaggctttgacatgttcttatctattgactctatagtcataggtcaaaaatagatttatctctacttggtaaagccagcatgtttaaaaatattcaactctttcaacaattgctctgaaatatgtaaagagagaaagaaatctaaattacctagactttattattggtcctagatggttgtcactcccctcaaatttatacagaaaagttttatgagtttcaaataatgctcatgttgcaaactatgtggtatcccctagaacagaatttttattggcaagccccttgagcattatccttccacactgcatctca

SEQ ID NO: 427050 - DNA, 3026 bp, Homo sapiens
  misc_feature (2243)..(2243): n is a, c, g, or t
ttatttgcacccgccccccgcccgcgtcggtctggggcttttgacttctccccgaacacatttcccctcccgtcgctgggtccctgcgatcgcccccagctggtggggctcgcggagctcaggggagcggggtcctctgcgccgctgcagcgcgagttaataaacagttaagtttggaagactctgcagacacgttgagggggagttaccaagcccaggcagcaaaaacatcctggcacattcctggggagtcctcagctgccagcatctgattagaaccatatctctcgccgggagtggccgcgcggctccgaagctcccggccggcggctatttaagcgaggcccgccgcatccgctgcgctgtagcctggaggctccgggcgcggggaagtcatgctcgcttcacggaggcaatagctagccggtgtctgtgggaggttatgtttatttgagacttctccatcgggatcgcctggtgtcaccaagtgtccactggtactgaggtttgctgcctgccttcttgccatgtctaacgaagtagaaacaagtgcaaccaatggtcagcccgaccaacaggccgcaccaaaagcaccctcaaagaaggaaaaaaagaaaggccctgaaaagacagatgaatatctcttagcaaggttcaaaggcgatggtgtaaaatataaggccaagctgattggcattgatgatgtgccagatgcaagaggggataaaatgagccaagactctatgatgaaactaaagggaatggcggcagctggtcggtctcagggacaacacaaacaaaggatctgggtcaacatttccctttctgggataaaaataattgatgagaaaactggggtaatagagcatgaacatccagtaaataagatttctttcattgcccgtgatgtgacagacaaccgggcatttggttacgtgtgtggaggagaaggccagcatcagttttttgccataaaaaccgggcaacaggctgaaccattagttgttgatcttaaagacctttttcaagttatctataatgtaaagaaaaaggaagaagaaaagaaaaagatagaggaagccagcaaagcagttgagaatgggagtgaggccctaatgattctagatgaccaaactaacaaactgaaatcgggtgttgaccagatggatttgtttggggacatgtctacacctcctgacctaaatagtccaacagtaagtgtttgtttttaaatttgcaatgtaataaaatgacatctataactcaaattggcaataaccagaaatcttaagcatctcattgaaacttggaaggtgactgttgatttttgcaaatgaagtgtcaatggtttttagaataaatgtgaatcttaagtcaccatgggaacctatccacactaattcagttatattaatattgcttacagattaaacctgaacaataagtcagcaatgtagtccttcttggtatcacttaggattagaaggaggaggtgaataatagtccttgaataagcctacttgaagaaagtatgactgttagatggttaatcataaagcctcctggcctcttcatttcttttgcattctgtctgttgcaatttagcagcataaatttggtgtgaagtaagatttaaaacaaacaagtggctcagttatattccaccaaagcttgtccttgttagaaagctgcccattctcataggattttataccatatccagtctgctcaatattgaatgatctgtaacaaccctgtaagaacagaacagtattttcctttataaattaaaaaaaaatggtggttcagggaaaaaaaaagaagaaaaaaaaataaaaaggaaagaggtccagattcaagacttaggcccaagtcttcagaccttccaaaacatacctctaatgaaaatgtccatgacattttgaatgacttcttgcaacttcttttatttatgtaacagtttcctgagcacctgctatttgcaaggcatagcagtaagatgcacaacatcaatgacatcatggaatttactctccggcagggagaccaacattaaaactaatcacatcgttagtaattgatgttactacagggtatttatctagttcagattcaggtaatgcttctgcaggagtgagtttctagatttgaacataaaagatgagaaggcaataaacagacaaaaagagaattagtctagaataatggggggaaatgtctagaaaggactctcttgtatcagnaaattatcatggaagcctatgtgaccaaggttacaggagttgaagcaatggatcaaagattggataaaattctcccttcagacttctgcagagaatttgaggcctgtgaatccttactgcataaaactttcaggtcaaatgagatggagaggagcagggacttcatgcattcttctctgaccctaaccatatgagtatcacaatgcatggtagcattctaaaatgcctttaagagagaagcctgtttaatattcattttagcagtgagccctaactcacttgcctatagaacctttcattcttcataatttttgttatagttctgaggataaactttttaaagtactagactagattatcctgacaggtccatcctaactctgaggtccttttgatttgtagtcaactttgtgctctcctccattagtgatgttttctcaaataaatcagtatctgaacacttacttcccaagtataaatgacattcaaacaagtaatattcaaagagagcaaagcactcaagatatgaagtggaattccactggaataggcaaggaagtactgcctatataatctacttctgtagacttctagaatgttctaaaaaaggaaatggaaaacaacatggataatcttcagtctcatttttattagactttatgaagtctaagaattttttatttataggaattcaagttttagttaaactaacaataaagtaggatgcgcgcctgaccactcacaacttcacttcgttacctgacgcgctaacacccgtacagc

SEQ ID NO: 427051 - DNA, 852 bp, Homo sapiens
  misc_feature (852)..(852): n is a, c, g, or t
ttatttgcacccgccccccgcccgcgtcggtctggggcttttgacttctccccgaacacatttcccctcccgtcgctgggtccctgcgatcgcccccagctggtggggctcgcggagctcaggggagcggggtcctctgcgccgctgcagcgcgagttaataaacagttaagtttggaagactctgcagacacgttgagggggagttaccaagcccaggcagcaaaaacatcctggcacattcctggggagtcctcagctgccagcatctgattagaaccatatctctcgccgggagtggccgcgcggctccgaagctcccggccggcggctatttaagcgaggcccgccgcatccgctgcgctgtagcctggaggctccgggcgcggggaagtcatgctcgcttcacggaggcaatagctagccggtgtctgtgggaggttatgtttatttgagacttctccatcgggatcgcctggtgtcaccaagtgtccactggtactgaggtttgctgcctgccttcttgccatgtctaacgaagtagaaacaagtgcaaccaatggtcagcccgaccaacaggccgcaccaaaagcaccctcaaagaaggaaaaaaagaaaggccctgaaaagacagatgaatatctcttagcaaggttcaaaggcgatggtgtaaaatataaggccaagctgattggcattgatgatgtgccagatgcaagaggggataaaatgagccacctacccaccagcttcactctgaagagtttcaagagccggggcaactgtcagacccaaggggactccatcctggactcgtgcccaagacgggcagaacacttgcatacagagggtn

SEQ ID NO: 427052 - DNA, 2277 bp, Homo sapiens
tatcgatgcaccaggcgtgagccacggcccggccctacctatttctttctagagtgtttgaagcaaatcttagttccatctgtaaatacttaagtatgtgtctgtagtgtctgtctcaaaacatgatcatgataccattatgtttttttaaaattgcttaatatcaaatatctctgtcagtgtttgaatttaccgagttatctcataactggtttttactgatattttttaaaaataagattcagttgaggtccatttaccacaaatggttggtaatgatcttgattattcatctgtttcttttttccctttacaattatgggggaatcggaggacaaatagtttagcatgtaaattttcccacagtctgaattttgttgatggaatccctgtggtcgtttattattttgtgtttatcgatgccaccttccctggaagggaaggtggcttcttccagcttgccagtcagtgctgaaaaatcacacctggttcccctcatggatgccaggatcaatgcttacattgaagaagaagtccaaagacgccttcaggatttgcatcgtgtgattagtgaaggctgcagtacatctgcagacacgatgaaggataatgagaaacttcacaatggcaccattcaacgtaaactaaaatatgagcggatggtttctcgctctttgggcgcaaatccagatgacctgaaggacccaattaaaattagtatcccacgctacgtcctctgcgggcaaggaaaggatgcacacttcgagtttgaggtcaagattactgtcctagatgagacatggactgtattcaggcgttacagtcgttttcgagaaatgcataaaacattgaagttaaagtatgcagagcttgctgcccttgaatttcctccaaagaaactatttggaaataaggatgaacgtgtgattgctgagagacgaagtcacttagagaaatacctcagggactttttcagcgtgatgctccagtccgcaacatctcccctccacatcaacaaagtgggactgactctctcgaaacataccatttgtgagttttcaccattcttcaagaaaggagtctttgactacagcagccacgggacggggtagagccaggggtgatggaggaaccaccacagcagtgccttctcgtcgaagcgggctccgatgcagggcagctcccccatgcgaggatccgggtctgcctcctcctgctgaagacagacatgcagcagcgggcccgggccacctcacgtttccatacctagtgcctgagtttggggatgggatgctctgcctgctgatgtggccctgacaggcagccgttaccgttccattgcggttgaacgtggccttttcccacagtgcttccttctcactgcgcagcaaagttcgtcccctgtggcaagatagatgtggttgggccatcgtgggttccctgagcccagccagcctgggacctcccaaagtgggtggcttaccagaccacccttaaatgactttcatctggtttcctctttcaccaaaatatactcgtattttttatatttcttccatgtggctggctatattccaagaaaagcattttaaattatttcattgtatttttttctttttttccctcatttgaatcagaacttttatataaaacccaaacactgatgtttacacagaatttcatattctgcaaaagggattttttgatccaatcatgactgtagtcttccatgcttgacaaattggatgtagacaacattacttaaaacttctataaatccctacaattaggatatttatttaaccttgaatattcaagaacattctcccaaatctaaatggctactgtgcattcttgagctttttctgctaagcacaaaatgaacgcaaagctaaatgcatatttttaagtattattcacattttttgttacagaatctattggatctttggctggaaaactagaatttatagcagtttattaatgataccttaaattactcaggacttaatgtagcattgcacttctgtgtacagtaaaactgctttgttttactaaagagaaaaatgtgagtggaaaaaatatgtatgtggtatatactcaaatgtatataattctatctatagatttatatatgtatacattctgtacagtagttccatcaaaatatgtaataattcacaccaattttattaaatgtatttgctttttcaaaatttaaattgagctgctatcaatattaaatgaagttatggcatctaccctgtagctcagctt

SEQ ID NO: 427053 - DNA, 491 bp, Homo sapiens
actacatacttccgttcacaagaaatggttttcaaaaccctcggcacagatgtcgtgaagtctgcatttgaaggttataatgcttgtgtctttgcatatgggcaaactggatctggaaagtcatacactatgatgggaaattctggagattctggcttaatacctcggatctgtgaaggactcttcagtcggataaatgaaaccaccagatgggatgaagcttcttttcgaactgaagtcagctacttagaaatttataacgaacgtgtgagagatctacttcggcggaagtcatctaaaaccttcaatttgagagtccgtgagcatcccaaagaaggcccttatgttgaggatttatccaaacatttaggactacatacttccgggctaccataggtagcactgacaaagttatttaataactgaagaattttcataggtatgacaaatgggccactaagatttggtgcagctggatttagagttgtcag

SEQ ID NO: 427054 - DNA, 697 bp, Homo sapiens
  misc_feature (467)..(467): n is a, c, g, or t
  misc_feature (500)..(500): n is a, c, g, or t
  misc_feature (503)..(503): n is a, c, g, or t
  misc_feature (548)..(548): n is a, c, g, or t
  misc_feature (558)..(558): n is a, c, g, or t
  misc_feature (604)..(604): n is a, c, g, or t
  misc_feature (617)..(617): n is a, c, g, or t
  misc_feature (662)..(662): n is a, c, g, or t
  misc_feature (668)..(668): n is a, c, g, or t
  misc_feature (691)..(691): n is a, c, g, or t
ggcgggagccgcgatctgagtagccagcgtcgccggcgaccgcggagttctgggctagtgggaccccgcgcgggctggttcgggatgagcgatggcatcggtcaaggtggccgtgagggtccggcccatgaatcgcagggaaaaggacttggaggccaagttcattattcagatggagaaaagcaaaacgacaatcacaaacttaaagataccagaaggaggcactggggactcaggaagagaacggaccaagaccttcacctatgacttttctttttattctgctgatacaaaaagcccagattacgtttcacaagaaatggttttcaaaaccctcggcacagatgtcgtgaagtctgcatttgaaggttataatgcttgtgtctttgcatatgggcaaactggatctggaaagtcatacactatgatgggaaattctggaaatctgcttaatactccgatctgtnaaagaccctccctccggattaatgaaacccccnatnggatgaactctttccaactgaattccctccttaaaaatttttacnaactttttanaattactccgcggaattcctaaaaccccatttgaaattcttaactncccaaaaggcctnttttaagatttccaacttttttccaaattttgtgacttaaaaatntgatgnggcattcacccgacccccccaangggtta

SEQ ID NO: 427055 - DNA, 4573 bp, Homo sapiens
  misc_feature (3171)..(3171): n is a, c, g, or t
  misc_feature (4419)..(4419): n is a, c, g, or t
  misc_feature (4471)..(4471): n is a, c, g, or t
ggcgggagccgcgatctgagtagccagcgtcgccggcgaccgcggagttctgggctagtgggaccccgcgcgggctggttcgggatgagcgatggcatcggtcaaggtggccgtgagggtccggcccatgaatcgcagggaaaaggacttggaggccaagttcattattcagatggagaaaagcaaaacgacaatcacaaacttaaagataccagaaggaggcactggggactcaggaagagaacggaccaagaccttcacctatgacttttctttttattctgctgatacaaaaagcccagattacgtttcacaagaaatggttttcaaaaccctcggcacagatgtcgtgaagtctgcatttgaaggttataatgcttgtgtctttgcatatgggcaaactggatctggaaagtcatacactatgatgggaaattctggagattctggcttaatacctcggatctgtgaaggactcttcagtcggataaatgaaaccaccagatgggatgaagcttcttttcgaactgaagtcagctacttagaaatttataacgaacgtgtgagagatctacttcggcggaagtcatctaaaaccttcaatttgagagtccgtgagcatcccaaagaaggcccttatgttgaggatttatccaaacatttagtacagaattatggtgacgtagaagaacttatggatgcgggcaatatcaaccggaccaccgcagcgactgggatgaacgacgtcagtagcaggtctcatgccatcttcaccatcaagttcactcaggctaaatttgattctgaaatgccatgtgaaaccgtcagtaagatccacttggttgatcttgccggaagtgagcgtgcagatgccaccggagccaccggggttaggctaaaggaagggggaaatattaacaagtccctcgtgactctggggaacgtcatttctgccttagctgatttatctcaggatgctgcaaatactcttgcaaagaagaagcaagttttcgtgccttacagggattctgtgttgacttggttgttaaaagatagccttggaggaaactctaaaactatcatgattgccaccatttcacctgctgatgtcaattatggagaaaccctaagtactcttcgctatgcaaatagagccaaaaacatcatcaacaagcctaccattaatgaggatgccaacgtcaaacttatccgtgagctgcgagctgaaatagccagactgaaaacgctgcttgctcaagggaatcagattgccctcttagactcccccacagctttaagtatggaggaaaaacttcagcagaatgaagcaagagttcaagaattgaccaaggaatggacaaataagtggaatgaaacccaaaatattttgaaagaacaaactctagccctcaggaaagaagggattggagttgttttggattctgaactgcctcatttgattggcatcgatgatgaccttttgagtactggaatcatcttatatcatttaaaggaaggtcagacatacgttggtagagacgatgcttccacggagcaagatattgttcttcatggccttgacttggagagtgagcattgcatctttgaaaatatcggggggacagtgactctgatacccctgagtgggtcccagtgctctgtgaatggtgttcagatcgtggaggccacacatctaaatcaaggtgctgtgattctcttgggaagaaccaatatgtttcgctttaaccatccaaaggaagccgccaagctcagggagaagaggaagagtggccttctgtcctccttcagcttgtccatgaccgacctctcgaagtcccgtgagaacctgtctgcagtcatgttgtataaccccggacttgaatttgagaggcaacagcgtgaagaacttgaaaaattagaaagtaaaaggaaactcatagaagaaatggaggaaaagcagaaatcagacaaggctgaactggagcggatgcagcaggaggtggagacccagcgcaaggagacagaaatcgtgcagctccagattcgcaagcaggaggagagcctcaaacgccgcagcttccacatcgagaacaagctaaaggatttacttgcggagaaggaaaaatttgaagaggagaggctgagggaacagcaggaaatcgagctgcagaagaagagacaagaagaagagacctttctccgcgtccaagaagaactccaacgactcaaagaactcaacaacaacgagaaggctgagaagtttcagatatttcaagaactggaccagctccaaaaggaaaaagatgaacagtatgccaagcttgaactggaaaaaaagagactagaggagcaggagaaggagcaggtcatgctcgtggcccatctggaagagcagctccgagagaagcaggagatgatccagctcctgcggcgtggggaggtacagtgggtggaagaggagaagagggacctggaaggcattcgggaatccctcctgcgggtgaaggaggctcgtgccggaggggatgaagatggcgaggagttagaaaaggctcaactgcgtttcttcgaattcaagagaaggcagcttgtcaagctagtgaacttggagaaggacctggttcagcagaaagacatcctgaaaaaagaagtccaagaagaacaggagatcctagagtgtttaaaatgtgaacatgacaaagaatctagattgttggaaaaacatgatgagagtgtcacagatgtcacggaagtgcctcaagatttcgagaaaataaagccagtggagtacaggctgcaatataaagaacgccagctacagtacctcctgcagaatcacttgccaactctgttggaagaaaagcagagagcatttgaaattcttgacagaggccctctcagcttagacaacactctttatcaagtagaaaaggaaatggaagaaaaagaagaacagcttgcacagtaccaggccaatgcaaaccagctgcaaaagctccaagccacctttgaattcactgccaacattgcacgtcaggaggaaaaagtgaggaaaaaggaaaaggagattttggagtccagagagaagcagcagagagaggcgctggagcgggccctggccaggctggagaggagacattctgcgctgcagaggcactccaccctgggcanggagattgaagagcagaggcagaaacttgccagtctgaacagtggcagcagagagcagtcagggctccaggctagcctggaggctgagcaggaagccctggagaaggaccaggagaggttagaatatgaaatccagcagctgaaacagaagatttatgaggtcgatggtgttcaaaaagatcatcatgggaccctggaagggaaggtggcttcttccagcttgccagtcagtgctgaaaaatcacacctggttcccctcatggatgccaggatcaatgcttacattgaagaagaagtccaaagacgccttcaggatttgcatcgtgtgattagtgaaggctgcagtacatctgcagacacgatgaaggataatgagaaacttcacaatggcaccattcaacgtaaactaaaatatgagctgtgtcgtgacctcctgtgtgtcctgatgccagagcctgatgccgctgcctgcgctaatcatcccttgctccagcaagatctggttcagctttctcttgattggaaaacagaaatccctgatttagttttgccaaatggagttcaggtgtcatccaaattccagactaccttggttgacatgatttactttcttcatggaaatatggaagtcaatgtcccttccctggcagaagttcagttactgctctacacaacagtgaaagtcatgggtgactctggccatgaccagtgccagtcgctagtccttctgaacacccacattgcactggtgaaggaagactgtgttttttatccacgcattcgatctcgaaacatacctcctccgggtgcacaatttgatgtgatcaaatgccatgctttaagtgaattcaggtgtgttgttgttccagaaaagaaaaatgtgtcaacagtagaactagtcttcttacagaaactcaaaccttcagtgggttccagaaatagtccacctgagcaccttcaggaagccccaaatgtccagttgttcaccaccccattgtatcttcaaggcagtcagaatgtcgcacctgaggtctggaaacttactttcaattctcaagatgaggctctttggctaatctcacatttgacaagactctaaggaggagacttttaaagatgcactacatgttttttgagatcattaataaaataagcattgtgaaaacagtcaaggcaatatgaatatctccgtgtagctaattgaattggaactggaaaaatgcagacctctaaaattgaaaatgtaantattttaaatatctacaataaaataaaaacagctaatagcagagccccaatnaaatatctttatcatcaccttgcttcattttcttgaaactcaggcttgtaaatttgtgcctgcttcattatttgtgaggtgattaaagcatttctgattgtt

SEQ ID NO: 427056 - DNA, 5120 bp, Homo sapiens
  misc_feature (3171)..(3171): n is a, c, g, or t
ggcgggagccgcgatctgagtagccagcgtcgccggcgaccgcggagttctgggctagtgggaccccgcgcgggctggttcgggatgagcgatggcatcggtcaaggtggccgtgagggtccggcccatgaatcgcagggaaaaggacttggaggccaagttcattattcagatggagaaaagcaaaacgacaatcacaaacttaaagataccagaaggaggcactggggactcaggaagagaacggaccaagaccttcacctatgacttttctttttattctgctgatacaaaaagcccagattacgtttcacaagaaatggttttcaaaaccctcggcacagatgtcgtgaagtctgcatttgaaggttataatgcttgtgtctttgcatatgggcaaactggatctggaaagtcatacactatgatgggaaattctggagattctggcttaatacctcggatctgtgaaggactcttcagtcggataaatgaaaccaccagatgggatgaagcttcttttcgaactgaagtcagctacttagaaatttataacgaacgtgtgagagatctacttcggcggaagtcatctaaaaccttcaatttgagagtccgtgagcatcccaaagaaggcccttatgttgaggatttatccaaacatttagtacagaattatggtgacgtagaagaacttatggatgcgggcaatatcaaccggaccaccgcagcgactgggatgaacgacgtcagtagcaggtctcatgccatcttcaccatcaagttcactcaggctaaatttgattctgaaatgccatgtgaaaccgtcagtaagatccacttggttgatcttgccggaagtgagcgtgcagatgccaccggagccaccggggttaggctaaaggaagggggaaatattaacaagtccctcgtgactctggggaacgtcatttctgccttagctgatttatctcaggatgctgcaaatactcttgcaaagaagaagcaagttttcgtgccttacagggattctgtgttgacttggttgttaaaagatagccttggaggaaactctaaaactatcatgattgccaccatttcacctgctgatgtcaattatggagaaaccctaagtactcttcgctatgcaaatagagccaaaaacatcatcaacaagcctaccattaatgaggatgccaacgtcaaacttatccgtgagctgcgagctgaaatagccagactgaaaacgctgcttgctcaagggaatcagattgccctcttagactcccccacagctttaagtatggaggaaaaacttcagcagaatgaagcaagagttcaagaattgaccaaggaatggacaaataagtggaatgaaacccaaaatattttgaaagaacaaactctagccctcaggaaagaagggattggagttgttttggattctgaactgcctcatttgattggcatcgatgatgaccttttgagtactggaatcatcttatatcatttaaaggaaggtcagacatacgttggtagagacgatgcttccacggagcaagatattgttcttcatggccttgacttggagagtgagcattgcatctttgaaaatatcggggggacagtgactctgatacccctgagtgggtcccagtgctctgtgaatggtgttcagatcgtggaggccacacatctaaatcaaggtgctgtgattctcttgggaagaaccaatatgtttcgctttaaccatccaaaggaagccgccaagctcagggagaagaggaagagtggccttctgtcctccttcagcttgtccatgaccgacctctcgaagtcccgtgagaacctgtctgcagtcatgttgtataaccccggacttgaatttgagaggcaacagcgtgaagaacttgaaaaattagaaagtaaaaggaaactcatagaagaaatggaggaaaagcagaaatcagacaaggctgaactggagcggatgcagcaggaggtggagacccagcgcaaggagacagaaatcgtgcagctccagattcgcaagcaggaggagagcctcaaacgccgcagcttccacatcgagaacaagctaaaggatttacttgcggagaaggaaaaatttgaagaggagaggctgagggaacagcaggaaatcgagctgcagaagaagagacaagaagaagagacctttctccgcgtccaagaagaactccaacgactcaaagaactcaacaacaacgagaaggctgagaagtttcagatatttcaagaactggaccagctccaaaaggaaaaagatgaacagtatgccaagcttgaactggaaaaaaagagactagaggagcaggagaaggagcaggtcatgctcgtggcccatctggaagagcagctccgagagaagcaggagatgatccagctcctgcggcgtggggaggtacagtgggtggaagaggagaagagggacctggaaggcattcgggaatccctcctgcgggtgaaggaggctcgtgccggaggggatgaagatggcgaggagttagaaaaggctcaactgcgtttcttcgaattcaagagaaggcagcttgtcaagctagtgaacttggagaaggacctggttcagcagaaagacatcctgaaaaaagaagtccaagaagaacaggagatcctagagtgtttaaaatgtgaacatgacaaagaatctagattgttggaaaaacatgatgagagtgtcacagatgtcacggaagtgcctcaagatttcgagaaaataaagccagtggagtacaggctgcaatataaagaacgccagctacagtacctcctgcagaatcacttgccaactctgttggaagaaaagcagagagcatttgaaattcttgacagaggccctctcagcttagacaacactctttatcaagtagaaaaggaaatggaagaaaaagaagaacagcttgcacagtaccaggccaatgcaaaccagctgcaaaagctccaagccacctttgaattcactgccaacattgcacgtcaggaggaaaaagtgaggaaaaaggaaaaggagattttggagtccagagagaagcagcagagagaggcgctggagcgggccctggccaggctggagaggagacattctgcgctgcagaggcactccaccctgggcanggagattgaagagcagaggcagaaacttgccagtctgaacagtggcagcagagagcagtcagggctccaggctagcctggaggctgagcaggaagccctggagaaggaccaggagaggttagaatatgaaatccagcagctgaaacagaagatttatgaggtcgatggtgttcaaaaagatcatcatgggaccctggaagggaaggtggcttcttccagcttgccagtcagtgctgaaaaatcacacctggttcccctcatggatgccaggatcaatgcttacattgaagaagaagtccaaagacgccttcaggatttgcatcgtgtgattagtgaaggctgcagtacatctgcagacacgatgaaggataatgagaaacttcacaatggcaccattcaacgtaaactaaaatatgagcggatggtttctcgctctttgggcgcaaatccagatgacctgaaggacccaattaaaattagtatcccacgctacgtcctctgcgggcaaggaaaggatgcacacttcgagtttgaggtcaagcttgctgcccttgaatttcctccaaagaaactatttggaaataaggatgaacgtgtgattgctgagagacgaagtcacttagagaaatacctcagggactttttcagcgtgatgctccagtccgcaacatctcccctccacatcaacaaagtgggactgactctctcgaaacataccatttgtgagttttcaccattcttcaagaaaggagtctttgactacagcagccacgggacggggtagagccaggggtgatggaggaaccaccacagcagtgccttctcgtcgaagcgggctccgatgcagggcagctcccccatgcgaggatccgggtctgcctcctcctgctgaagacagacatgcagcagcgggcccgggccacctcacgtttccatacctagtgcctgagtttggggatgggatgctctgcctgctgatgtggccctgacaggcagccgttaccgttccattgcggttgaacgtggccttttcccacagtgcttccttctcactgcgcagcaaagttcgtcccctgtggcaagatagatgtggttgggccatcgtgggttccctgagcccagccagcctgggacctcccaaagtgggtggcttaccagaccacccttaaatgactttcatctggtttcctctttcaccaaaatatactcgtattttttatatttcttccatgtggctggctatattccaagaaaagcattttaaattatttcattgtatttttttctttttttccctcatttgaatcagaacttttatataaaacccaaacactgatgtttacacagaatttcatattctgcaaaagggattttttgatccaatcatgactgtagtcttccatgcttgacaaattggatgtagacaacattacttaaaacttctataaatccctacaattaggatatttatttaaccttgaatattcaagaacattctcccaaatctaaatggctactgtgcattcttgagctttttctgctaagcacaaaatgaacgcaaagctaaatgcatatttttaagtattattcacattttttgttacagaatctattggatctttggctggaaaactagaatttatagcagtttattaatgataccttaaattactcaggacttaatgtagcattgcacttctgtgtacagtaaaactgctttgttttactaaagagaaaaatgtgagtggaaaaaatatgtatgtggtatatactcaaatgtatataattctatctatagatttatatatgtatacattctgtacagtagttccatcaaaatatgtaataattcacaccaattttattaaatgtatttgctttttcaaaatttaaattgagctgctatcaatattaaatgaagttatggcatctaccctgtagctcagctt

SEQ ID NO: 427057 - DNA, 5087 bp, Homo sapiens
  misc_feature (3171)..(3171): n is a, c, g, or t
ggcgggagccgcgatctgagtagccagcgtcgccggcgaccgcggagttctgggctagtgggaccccgcgcgggctggttcgggatgagcgatggcatcggtcaaggtggccgtgagggtccggcccatgaatcgcagggaaaaggacttggaggccaagttcattattcagatggagaaaagcaaaacgacaatcacaaacttaaagataccagaaggaggcactggggactcaggaagagaacggaccaagaccttcacctatgacttttctttttattctgctgatacaaaaagcccagattacgtttcacaagaaatggttttcaaaaccctcggcacagatgtcgtgaagtctgcatttgaaggttataatgcttgtgtctttgcatatgggcaaactggatctggaaagtcatacactatgatgggaaattctggagattctggcttaatacctcggatctgtgaaggactcttcagtcggataaatgaaaccaccagatgggatgaagcttcttttcgaactgaagtcagctacttagaaatttataacgaacgtgtgagagatctacttcggcggaagtcatctaaaaccttcaatttgagagtccgtgagcatcccaaagaaggcccttatgttgaggatttatccaaacatttagtacagaattatggtgacgtagaagaacttatggatgcgggcaatatcaaccggaccaccgcagcgactgggatgaacgacgtcagtagcaggtctcatgccatcttcaccatcaagttcactcaggctaaatttgattctgaaatgccatgtgaaaccgtcagtaagatccacttggttgatcttgccggaagtgagcgtgcagatgccaccggagccaccggggttaggctaaaggaagggggaaatattaacaagtccctcgtgactctggggaacgtcatttctgccttagctgatttatctcaggatgctgcaaatactcttgcaaagaagaagcaagttttcgtgccttacagggattctgtgttgacttggttgttaaaagatagccttggaggaaactctaaaactatcatgattgccaccatttcacctgctgatgtcaattatggagaaaccctaagtactcttcgctatgcaaatagagccaaaaacatcatcaacaagcctaccattaatgaggatgccaacgtcaaacttatccgtgagctgcgagctgaaatagccagactgaaaacgctgcttgctcaagggaatcagattgccctcttagactcccccacagctttaagtatggaggaaaaacttcagcagaatgaagcaagagttcaagaattgaccaaggaatggacaaataagtggaatgaaacccaaaatattttgaaagaacaaactctagccctcaggaaagaagggattggagttgttttggattctgaactgcctcatttgattggcatcgatgatgaccttttgagtactggaatcatcttatatcatttaaaggaaggtcagacatacgttggtagagacgatgcttccacggagcaagatattgttcttcatggccttgacttggagagtgagcattgcatctttgaaaatatcggggggacagtgactctgatacccctgagtgggtcccagtgctctgtgaatggtgttcagatcgtggaggccacacatctaaatcaaggtgctgtgattctcttgggaagaaccaatatgtttcgctttaaccatccaaaggaagccgccaagctcagggagaagaggaagagtggccttctgtcctccttcagcttgtccatgaccgacctctcgaagtcccgtgagaacctgtctgcagtcatgttgtataaccccggacttgaatttgagaggcaacagcgtgaagaacttgaaaaattagaaagtaaaaggaaactcatagaagaaatggaggaaaagcagaaatcagacaaggctgaactggagcggatgcagcaggaggtggagacccagcgcaaggagacagaaatcgtgcagctccagattcgcaagcaggaggagagcctcaaacgccgcagcttccacatcgagaacaagctaaaggatttacttgcggagaaggaaaaatttgaagaggagaggctgagggaacagcaggaaatcgagctgcagaagaagagacaagaagaagagacctttctccgcgtccaagaagaactccaacgactcaaagaactcaacaacaacgagaaggctgagaagtttcagatatttcaagaactggaccagctccaaaaggaaaaagatgaacagtatgccaagcttgaactggaaaaaaagagactagaggagcaggagaaggagcaggtcatgctcgtggcccatctggaagagcagctccgagagaagcaggagatgatccagctcctgcggcgtggggaggtacagtgggtggaagaggagaagagggacctggaaggcattcgggaatccctcctgcgggtgaaggaggctcgtgccggaggggatgaagatggcgaggagttagaaaaggctcaactgcgtttcttcgaattcaagagaaggcagcttgtcaagctagtgaacttggagaaggacctggttcagcagaaagacatcctgaaaaaagaagtccaagaagaacaggagatcctagagtgtttaaaatgtgaacatgacaaagaatctagattgttggaaaaacatgatgagagtgtcacagatgtcacggaagtgcctcaagatttcgagaaaataaagccagtggagtacaggctgcaatataaagaacgccagctacagtacctcctgcagaatcacttgccaactctgttggaagaaaagcagagagcatttgaaattcttgacagaggccctctcagcttagacaacactctttatcaagtagaaaaggaaatggaagaaaaagaagaacagcttgcacagtaccaggccaatgcaaaccagctgcaaaagctccaagccacctttgaattcactgccaacattgcacgtcaggaggaaaaagtgaggaaaaaggaaaaggagattttggagtccagagagaagcagcagagagaggcgctggagcgggccctggccaggctggagaggagacattctgcgctgcagaggcactccaccctgggcanggagattgaagagcagaggcagaaacttgccagtctgaacagtggcagcagagagcagtcagggctccaggctagcctggaggctgagcaggaagccctggagaaggaccaggagaggttagaatatgaaatccagcagctgaaacagaagatttatgaggtcgatggtgttcaaaaagatcatcatgggaccctggaagggaaggtggcttcttccagcttgccagtcagtgctgaaaaatcacacctggttcccctcatggatgccaggatcaatgcttacattgaagaagaagtccaaagacgccttcaggatttgcatcgtgtgattagtgaaggctgcagtacatctgcagacacgatgaaggataatgagaaacttcacaatggcaccattcaacgtaaactaaaatatgagattactgtcctagatgagacatggactgtattcaggcgttacagtcgttttcgagaaatgcataaaacattgaagttaaagtatgcagagcttgctgcccttgaatttcctccaaagaaactatttggaaataaggatgaacgtgtgattgctgagagacgaagtcacttagagaaatacctcagggactttttcagcgtgatgctccagtccgcaacatctcccctccacatcaacaaagtgggactgactctctcgaaacataccatttgtgagttttcaccattcttcaagaaaggagtctttgactacagcagccacgggacggggtagagccaggggtgatggaggaaccaccacagcagtgccttctcgtcgaagcgggctccgatgcagggcagctcccccatgcgaggatccgggtctgcctcctcctgctgaagacagacatgcagcagcgggcccgggccacctcacgtttccatacctagtgcctgagtttggggatgggatgctctgcctgctgatgtggccctgacaggcagccgttaccgttccattgcggttgaacgtggccttttcccacagtgcttccttctcactgcgcagcaaagttcgtcccctgtggcaagatagatgtggttgggccatcgtgggttccctgagcccagccagcctgggacctcccaaagtgggtggcttaccagaccacccttaaatgactttcatctggtttcctctttcaccaaaatatactcgtattttttatatttcttccatgtggctggctatattccaagaaaagcattttaaattatttcattgtatttttttctttttttccctcatttgaatcagaacttttatataaaacccaaacactgatgtttacacagaatttcatattctgcaaaagggattttttgatccaatcatgactgtagtcttccatgcttgacaaattggatgtagacaacattacttaaaacttctataaatccctacaattaggatatttatttaaccttgaatattcaagaacattctcccaaatctaaatggctactgtgcattcttgagctttttctgctaagcacaaaatgaacgcaaagctaaatgcatatttttaagtattattcacattttttgttacagaatctattggatctttggctggaaaactagaatttatagcagtttattaatgataccttaaattactcaggacttaatgtagcattgcacttctgtgtacagtaaaactgctttgttttactaaagagaaaaatgtgagtggaaaaaatatgtatgtggtatatactcaaatgtatataattctatctatagatttatatatgtatacattctgtacagtagttccatcaaaatatgtaataattcacaccaattttattaaatgtatttgctttttcaaaatttaaattgagctgctatcaatattaaatgaagttatggcatctaccctgtagctcagctt

SEQ ID NO: 427058 - DNA, 1658 bp, Homo sapiens
ggcgggagccgcgatctgagtagccagcgtcgccggcgaccgcggagttctgggctagtgggaccccgcgcgggctggttcgggatgagcgatggcatcggtcaaggtggccgtgagggtccggcccatgaatcgcagggaaaaggacttggaggccaagttcattattcagatggagaaaagcaaaacgacaatcacaaacttaaagataccagaaggaggcactggggactcaggaagagaacggaccaagaccttcacctatgacttttctttttattctgctgatacaaaaagcccagattacgtttcacaagaaatggttttcaaaaccctcggcacagatgtcgtgaagtctgcatttgaaggttataatgcttgtgtctttgcatatgggcaaactggatctggaaagtcatacactatgatgggaaattctggagattctggcttaatacctcggatctgtgaaggactcttcagtcggataaatgaaaccaccagatgggatgaagcttcttttcgaactgaagtcagctacttagaaatttataacgaacgtgtgagagatctacttcggcggaagtcatctaaaaccttcaatttgagagtccgtgagcatcccaaagaaggcccttatgttgaggatttatccaaacatttagtacagaattatggtgacgtagaagaacttatggatgcgggcaatatcaaccggaccaccgcagcgactgggatgaacgacgtcagtagcaggtctcatgccatcttcaccatcaagttcactcaggctaaatttgattctgaaatgccatgtgaaaccgtcagtaagatccacttggttgatcttgccggaagtgagcgtgcagatgccaccggagccaccggggttaggctaaaggaagggggaaatattaacaagtccctcgtgactctggggaacgtcatttctgccttagctgatttatctcaggatgctgcaaatactcttgcaaagaagaagcaagttttcgtgccttacagggattctgtgttgacttggttgttaaaagatagccttggaggaaactctaaaactatcatgattgccaccatttcacctgctgatgtcaattatggagaaaccctaagtactcttcgctatgcaaatagagccaaaaacatcatcaacaagcctaccattaatgaggatgccaacgtcaaacttatccgtgagctgcgagctgaaatagccagactgaaaacgctgcttgctcaagggaatcaggggtttttctgagatttatggataattttctttgagtaatggcatctatttctagatcttaatgagacaattttctcactcatgctattgatttgagtaaataagtgctaagtaaagctttgaatgagttagccagtccctcgtttacatcaacctcttgtcagcctttgcattcattacgggctgcatgtgtaagattttatccactaaacctgaaatgattaactctctaatagttatcaattatgaatggaaatgtactatgcaataggattaatggcataatctctttaagtggaaagaaattgatatgcttagaatagtatttaaaatttcacccatgcattttatgactttaaaatgtgttttaacagaataaaagacttgttcg

SEQ ID NO: 427059 - DNA, 1883 bp, Homo sapiens
ggcgggagccgcgatctgagtagccagcgtcgccggcgaccgcggagttctgggctagtgggaccccgcgcgggctggttcgggatgagcgatggcatcggtcaaggtggccgtgagggtccggcccatgaatcgcagggaaaaggacttggaggccaagttcattattcagatggagaaaagcaaaacgacaatcacaaacttaaagataccagaaggaggcactggggactcaggaagagaacggaccaagaccttcacctatgacttttctttttattctgctgatacaaaaagcccagattacgtttcacaagaaatggttttcaaaaccctcggcacagatgtcgtgaagtctgcatttgaaggttataatgcttgtgtctttgcatatgggcaaactggatctggaaagtcatacactatgatgggaaattctggagattctggcttaatacctcggatctgtgaaggactcttcagtcggataaatgaaaccaccagatgggatgaagcttcttttcgaactgaagtcagctacttagaaatttataacgaacgtgtgagagatctacttcggcggaagtcatctaaaaccttcaatttgagagtccgtgagcatcccaaagaaggcccttatgttgaggatttatccaaacatttagtacagaattatggtgacgtagaagaacttatggatgcgggcaatatcaaccggaccaccgcagcgactgggatgaacgacgtcagtagcaggtctcatgccatcttcaccatcaagttcactcaggctaaatttgattctgaaatgccatgtgaaaccgtcagtaagatccacttggttgatcttgccggaagtgagcgtgcagatgccaccggagccaccggggttaggctaaaggaagggggaaatattaacaagtccctcgtgactctggggaacgtcatttctgccttagctgatttatctcaggatgctgcaaatactcttgcaaagaagaagcaagttttcgtgccttacagggattctgtgttgacttggttgttaaaagatagccttggaggaaactctaaaactatcatgattgccaccatttcacctgctgatgtcaattatggagaaaccctaagtactcttcgctatgcaaatagagccaaaaacatcatcaacaagcctaccattaatgaggatgccaacgtcaaacttatccgtgagctgcgagctgaaatagccagactgaaaacgctgcttgctcaagggaatcagagtggtcccgttggagcagtgctttccacgtgggattatgtggcacttgaagctcttggcatcccataaatgttttgaaaatactgatgggatgaaaacctcactgaatttcctgtgtcctgaaatgtacctggcagttctttcccacaagatggtggacagcagttgaataggaattgttcattgtgcttaaaaatatctccacatgcattttgctctatggtggaagttgtcagaatgaagagtccagctccacgtgatgaggcccttataacatgaaccacaatagtcatttttatttatacaccttgttattggaatctttttcttttcttttctttttgagatagagtctcactgtgttgcccaggctggagtgcagtgatgcaatctgggctcactgcaacctccacctccagggttcaagtaattctcatgcctcagcctcctgagtagctgggaggtgcctgccaccatgcctggctaatttttttgtatttttggtagagacggggtttcacgacgtgaccagtctggtctggaactcctgacctcaagtgatctgcccgccttggcctcccaaagtgttgggattacaggtgtgagccaccgcgcc

SEQ ID NO: 427060 - DNA, 1614 bp, Homo sapiens
ggcgggagccgcgatctgagtagccagcgtcgccggcgaccgcggagttctgggctagtgggaccccgcgcgggctggttcgggatgagcgatggcatcggtcaaggtggccgtgagggtccggcccatgaatcgcagggaaaaggacttggaggccaagttcattattcagatggagaaaagcaaaacgacaatcacaaacttaaagataccagaaggaggcactggggactcaggaagagaacggaccaagaccttcacctatgacttttctttttattctgctgatacaaaaagcccagattacgtttcacaagaaatggttttcaaaaccctcggcacagatgtcgtgaagtctgcatttgaaggttataatgcttgtgtctttgcatatgggcaaactggatctggaaagtcatacactatgatgggaaattctggagattctggcttaatacctcggatctgtgaaggactcttcagtcggataaatgaaaccaccagatgggatgaagcttcttttcgaactgaagtcagctacttagaaatttataacgaacgtgtgagagatctacttcggcggaagtcatctaaaaccttcaatttgagagtccgtgagcatcccaaagaaggcccttatgttgaggatttatccaaacatttagtacagaattatggtgacgtagaagaacttatggatgcgggcaatatcaaccggaccaccgcagcgactgggatgaacgacgtcagtagcaggtctcatgccatcttcaccatcaagttcactcaggctaaatttgattctgaaatgccatgtgaaaccgtcagtaagatccacttggttgatcttgccggaagtgagcgtgcagatgccaccggagccaccggggttaggctaaaggaagggggaaatattaacaagtccctcgtgactctggggaacgtcatttctgccttagctgatttatctcaggatgctgcaaatactcttgcaaagaagaagcaagttttcgtgccttacagggattctgtgttgacttggttgttaaaagatagccttggaggaaactctaaaactatcatgattgccaccatttcacctgctgatgtcaattatggagaaaccctaagtactcttcgctatgcaaatagagccaaaaacatcatcaacaagcctaccattaatgaggatgccaacgtcaaacttatccgtgagctgcgaggggtttttctgagatttatggataattttctttgagtaatggcatctatttctagatcttaatgagacaattttctcactcatgctattgatttgagtaaataagtgctaagtaaagctttgaatgagttagccagtccctcgtttacatcaacctcttgtcagcctttgcattcattacgggctgcatgtgtaagattttatccactaaacctgaaatgattaactctctaatagttatcaattatgaatggaaatgtactatgcaataggattaatggcataatctctttaagtggaaagaaattgatatgcttagaatagtatttaaaatttcacccatgcattttatgactttaaaatgtgttttaacagaataaaagacttgttcg

SEQ ID NO: 427061 - DNA, 389 bp, Homo sapiens
tggacagagtgttcgattcctgagctctgcagagggtcttctgctcactgtattcagttacaacaaatacctctctcaacagctgtgtcgtgacctcctgtgtgtcctgatgccagagcctgatgccgctgcctgcgctaatcatcccttgctccagcaagatctggttcagctttctcttgattggaaaacagaaatccctgatttagttttgccaaatggagttcaggtgtcatccaaattccagactaccttggttgacatgatttactttcttcatggaaatatggaagtcaatgtcccttccctggcagaagttcagttactgctctacacaacagtgaaagtcatgggtgactctggccatgaccagtgccagtcgctagtcc

SEQ ID NO: 427062 - DNA, 1661 bp, Homo sapiens
  misc_feature (22)..(22): n is a, c, g, or t
  misc_feature (24)..(24): n is a, c, g, or t
  misc_feature (29)..(29): n is a, c, g, or t
aattaggctaggtacgaggccngngtttnagcagcggctccctcccggaaagcgagcgtatctcccgagccgttgccactgacagccgcgggcgctcccatctgagtaagagccagcccgtccgcggcctctccagccccgggttcgcgctctcgactctcctgcctgcccagctgcgcggcggagcggagcgaggcgcggcctgcgagtccccggcagcccccgacccctccctcggcgctgcgtgtaggccgcgccctcaggcccagtccgcggtgccccggcgggtgatgccaaatacagccatgaagaaaaaggtgctgctgatggggaagagcgggtcggggaagaccagcatgaggtcgataatcttcgccaattacattgctcgcgacacccggcgcctgggggccaccattgacgtggaacactcccacgtccgattcctagggaacctggtgctgaacctgtgggactgtggcggtcaggacaccttcatggaaaattacttcaccagccagcgagacaatatcttccgtaacgtggaagttttgatttacgtgtttgacgtggagagccgcgaactggaaaaggacatgcattattaccagtcgtgtctggaggccatcctccagaactctcctgacgccaaaatcttctgcctggtgcacaaaatggatctggttcaggaggatcagcgtgacctgatttttaaagagcgagaggaagacctgaggcgtctgtctcgcccgctggagtgtgcttgttttcgaacgtccatctgggatgagacgctctacaaagcctggtccagcatcgtctaccagctgattcccaacgttcagcagctggagatgaacctcaggaattttgcccaaatcattgaggccgatgaagttctgctgttcgaaagagctacattcttggttatttcccactaccagtgcaaagagcagcgcgacgtccaccggtttgagaagatcagcaacatcatcaaacagttcaagctgagctgcagtaaattggccgcttccttccagagcatggaagttaggaattccaacttcgctgctttcatcgacatcttcacctcaaatacgtacgtgatggtggtcatgtcagatccgtcgatcccttctgcggccactctgatcaacattcgcaatgcccggaaacactttgagaagctggagagagtggatggccccaagcacagtctccttatgcgttgaatattgccaaatgctctttctgaaaatgctgaattgccttttttgtttgcatcctttatttttaatattcataatgtcgtgtgcttaaaagtgggctttgaagtgtgtgctgcttactcctttcatctttctccccgcttccccagtctttaaacattggacgctatttactcagctacccagtagagcttgaagctgacctttctgagaagttggtatggtgtaacactaaagtaggtggttcgtgtgtgttctcattacctggttatgatagatatgcacatcaaagcctttaccagtatcttcctgtattccgtatcagattgcaaagacggaatgttactattttatcagcaaggtattaaaatgcatttataaattcttcttggcttcattcatgaataaacgtgttagcaatttaaaaaaaat

SEQ ID NO: 427063 - DNA, 1628 bp, Homo sapiens
ggaaagagataggctaggtcaggctggtgttaattggcaacgaggctgacagccgcgggcgctcccatctgagtaagagccagcccgtccgcggcctctccagccccgggttcgcgctctcgactctcctgcctgcccagctgcgcggcggagcggagcgaggcgcggcctgcgagtccccggcagcccccgacccctccctcggcgctgcgtgtaggccgcgccctcaggcccagtccgcggtgccccggcgggtgatgccaaatacagccatgaagaaaaaggtgctgctgatggggaagagcgggtcggggaagaccagcatgaggtcgataatcttcgccaattacattgctcgcgacacccggcgcctgggggccaccattgacgtggaacactcccacgtccgattcctagggaacctggtgctgaacctgtgggactgtggcggtcaggacaccttcatggaaaattacttcaccagccagcgagacaatatcttccgtaacgtggaagttttgatttacgtgtttgacgtggagagccgcgaactggaaaaggacatgcattattaccagtcgtgtctggaggccatcctccagaactctcctgacgccaaaatcttctgcctggtgcacaaaatggatctggttcaggaggatcagcgtgacctgatttttaaagagcgagaggaagacctgaggcgtctgtctcgcccgctggagtgtgcttgttttcgaacgtccatctgggatgagacgctctacaaagcctggtccagcatcgtctaccagctgattcccaacgttcagcagctggagatgaacctcaggaattttgcccaaatcattgaggccgatgaagttctgctgttcgaaagagctacattcttggttatttcccactaccagtgcaaagagcagcgcgacgtccaccggtttgagaagatcagcaacatcatcaaacagttcaagctgagctgcagtaaattggccgcttccttccagagcatggaagttaggaattccaacttcgctgctttcatcgacatcttcacctcaaatacgtacgtgatggtggtcatgtcagatccgtcgatcccttctgcggccactctgatcaacattcgcaatgcccggaaacactttgagaagctggagagagtggatggccccaagcacagtctccttatgcgttgaatattgccaaatgctctttctgaaaatgctgaattgccttttttgtttgcatcctttatttttaatattcataatgtcgtgtgcttaaaagtgggctttgaagtgtgtgctgcttactcctttcatctttctccccgcttccccagtctttaaacattggacgctatttactcagctacccagtagagcttgaagctgacctttctgagaagttggtatggtgtaacactaaagtaggtggttcgtgtgtgttctcattacctggttatgatagatatgcacatcaaagcctttaccagtatcttcctgtattccgtatcagattgcaaagacggaatgttactattttatcagcaaggtattaaaatgcatttataaattcttcttggcttcattcatgaataaacgtgttagcaatttaaaaaaaat

SEQ ID NO: 427064 - DNA, 1567 bp, Homo sapiens
tgtacgggtcggaagttatgggcccgtccgcggcctctccagccccgggttcgcgctctcgactctcctgcctgcccagctgcgcggcggagcggagcgaggcgcggcctgcgagtccccggcagcccccgacccctccctcggcgctgcgtgtaggccgcgccctcaggcccagtccgcggtgccccggcgggtgatgccaaatacagccatgaagaaaaaggtgctgctgatggggaagagcgggtcggggaagaccagcatgaggtcgataatcttcgccaattacattgctcgcgacacccggcgcctgggggccaccattgacgtggaacactcccacgtccgattcctagggaacctggtgctgaacctgtgggactgtggcggtcaggacaccttcatggaaaattacttcaccagccagcgagacaatatcttccgtaacgtggaagttttgatttacgtgtttgacgtggagagccgcgaactggaaaaggacatgcattattaccagtcgtgtctggaggccatcctccagaactctcctgacgccaaaatcttctgcctggtgcacaaaatggatctggttcaggaggatcagcgtgacctgatttttaaagagcgagaggaagacctgaggcgtctgtctcgcccgctggagtgtgcttgttttcgaacgtccatctgggatgagacgctctacaaagcctggtccagcatcgtctaccagctgattcccaacgttcagcagctggagatgaacctcaggaattttgcccaaatcattgaggccgatgaagttctgctgttcgaaagagctacattcttggttatttcccactaccagtgcaaagagcagcgcgacgtccaccggtttgagaagatcagcaacatcatcaaacagttcaagctgagctgcagtaaattggccgcttccttccagagcatggaagttaggaattccaacttcgctgctttcatcgacatcttcacctcaaatacgtacgtgatggtggtcatgtcagatccgtcgatcccttctgcggccactctgatcaacattcgcaatgcccggaaacactttgagaagctggagagagtggatggccccaagcacagtctccttatgcgttgaatattgccaaatgctctttctgaaaatgctgaattgccttttttgtttgcatcctttatttttaatattcataatgtcgtgtgcttaaaagtgggctttgaagtgtgtgctgcttactcctttcatctttctccccgcttccccagtctttaaacattggacgctatttactcagctacccagtagagcttgaagctgacctttctgagaagttggtatggtgtaacactaaagtaggtggttcgtgtgtgttctcattacctggttatgatagatatgcacatcaaagcctttaccagtatcttcctgtattccgtatcagattgcaaagacggaatgttactattttatcagcaaggtattaaaatgcatttataaattcttcttggcttcattcatgaataaacgtgttagcaatttaaaaaaaat

SEQ ID NO: 427065 - DNA, 1696 bp, Homo sapiens
  misc_feature (22)..(22): n is a, c, g, or t
  misc_feature (24)..(24): n is a, c, g, or t
  misc_feature (29)..(29): n is a, c, g, or t
aattaggctaggtacgaggccngngtttnagcagcggctccctcccggaaagcgagcgtatctcccgagccgttgccactgacagccgcgggcgctcccatctgagtaagagccagcccgtccgcggcctctccagccccgggttcgcgctctcgactctcctgcctgcccagctgcgcggcggagcggagcgaggcgcggcctgcgagtccccggcagcccccgacccctccctcggcgctgcgtgtaggccgcgccctcaggcccagtccgcggtgccccggcgggtgatgccaaatacagccatgaagaaaaaggtgctgctgatggggaagagcgggtcggggaagaccagcatgaggtcgataatcttcgccaattacattgctcgcgacacccggcgcctgggggccaccattgacgtggaacactcccacgtccgattcctagggaacctggtgctgaacctgtgggactgtggcggtcaggacaccttcatggaaaattacttcaccagccagcgagacaatatcttccgtaacgtggaagttttgatttacgtgtttgacgtggagagccgcgaactggaaaaggacatgcattattaccagtcgtgtctggaggccatcctccagaactctcctgacgccaaaatcttctgcctggtgcacaaaatggatctggttcaggaggatcagcgtgacctgatttttaaagagcgagaggaagacctgaggcgtctgtctcgcccgctggagtgtgcttgttttcgaacgtccatctgggatgagacgctctacaaagcctggtccagcatcgtctaccagctgattcccaacgttcagcagctggagatgaacctcaggaattttgcccaaatcattgaggccgatgaagttctgctgttcgaaagagctacattcttggttatttcccactaccagtgcaaagagcagcgcgacgtccaccggtttgagaagatcagcaacatcatcaaacagttcaagctgagctgcagtaaattggccgcttccttccagagcatggaagttaggaattccaacttcgctgctttcatcgacatcttcacctcaaatacgtacgtgatggtggtcatgtcagatccgtcgatcccttctgcggccactctgatcaacattcgcaatgcccggaaacactttgagaagctggagagagtggatggccccaagcacagtctccttatgcgttgaatattgccaaatgctctttctgaaaatgctgaattgccttttttgtttgcatcctttatttttaatattcataatgtcgtgtgcttaaaagtgggctttgaagtgtgtgctgcttactcctttcatctttctccccgcttccccagtctttaaacattggacgctatttactcagctacccagtagagcttgaagctgacctttctgagaagttggtatggtgtaacactaaagtaggtggttcgtgtgtgttctcattacctggttatgatagatatgcacatcaaagcctttaccagtatcttcctgtattccgtatcagattgcaaagacggaatgttactattttatcagcaaggtcagcttcaagctctactgggtagctgagtaaatagcgtccaatgtttaaagactggggaagcggggagaaagagtcgacgcgcctgcgaatttagtagtagtag

SEQ ID NO: 427066 - DNA, 1580 bp, Homo sapiens
  misc_feature (22)..(22): n is a, c, g, or t
  misc_feature (24)..(24): n is a, c, g, or t
  misc_feature (29)..(29): n is a, c, g, or t
aattaggctaggtacgaggccngngtttnagcagcggctccctcccggaaagcgagcgtatctcccgagccgttgccactgacagccgcgggcgctcccatctgagtaagagccagcccgtccgcggcctctccagccccgggttcgcgctctcgactctcctgcctgcccagctgcgcggcggagcggagcgaggcgcggcctgcgagtccccggcagcccccgacccctccctcggcgctgcgtgtaggccgcgccctcaggcccagtccgcggtgccccggcgggtgatgccaaatacagccatgaagaaaaaggtgctgctgatggggaagagcgggtcggggaagaccagcatgaggtcgataatcttcgccaattacattgctcgcgacacccggcgcctgggggccaccattgacgtggaacactcccacgtccgattcctagggaacctggtgctgaacctgtgggactgtggcggtcaggacaccttcatggaaaattacttcaccagccagcgagacaatatcttccgtaacgtggaagttttgatttacgtgtttgacgtggagagccgcgaactggaaaaggacatgcattattaccagtcgtgtctggaggccatcctccagaactctcctgacgccaaaatcttctgcctggtgcacaaaatggatctggttcaggaggatcagcgtgacctgatttttaaagagcgagaggaagacctgaggcgtctgtctcgcccgctggagtgtgcttgttttcgaacgtccatctgggatgagacgctctacaaagcctggtccagcatcgtctaccagctgattcccaacgttcagcagctggagatgaacctcaggaattttgcccaaatcattgaggccgatgaagttctgctgttcgaaagagctacattcttggttatttcccactaccagtgcaaagagcagcgcgacgtccaccggtttgagaagatcagcaacatcatcaaacagttcaagctgagctgcagtaaattggccgcttccttccagagcatggaagttaggaattccaacttcgctgctttcatcgacatcttcacctcaaatacgtacgtgatggtggtcatgtcagatccgtcgatcccttctgcggccactctgatcaacattcgcaatgcccggaaacactttgagaagctggagagagtggatggccccaagcacagtctccttatgcgttgaatattgccaaatgctctttctgaaaatgctgaattgccttttttgtttgcatcctttatttttaatattcataatgtcgtgtgcttaaaagtgggctttgaagtgtgtgctgcttactcctttcatctttctccccgcttccccagtctttaaacattggacgctatttactcagctacccagtagagcttgaagctgacctttctgagaagttggtatggtgtaacactaaagtaggtggttcgtgtgtacggaatgttactattttatcagcaaggtattaaaatgcatttataaattcttcttggcttcattcatgaataaacgtgttagcaatttaaaaaaaat

SEQ ID NO: 427067 - DNA, 1607 bp, Homo sapiens
  misc_feature (22)..(22): n is a, c, g, or t
  misc_feature (24)..(24): n is a, c, g, or t
  misc_feature (29)..(29): n is a, c, g, or t
aattaggctaggtacgaggccngngtttnagcagcggctccctcccggaaagcgagcgtatctcccgagccgttgccactgacagccgcgggcgctcccatctgagtaagagccagcccgtccgcggcctctccagccccgggttcgcgctctcgactctcctgcctgcccagctgcgcggcggagcggagcgaggcgcggcctgcgagtccccggcagcccccgacccctccctcggcgctgcgtgtaggccgcgccctcaggcccagtccgcggtgccccggcgggtgatgccaaatacagccatgaagaaaaaggtgctgctgatggggaagagcgggtcggggaagaccagcatgaggtcgataatcttcgccaattacattgctcgcgacacccggcgcctgggggccaccattgacgtggaacactcccacgtccgattcctagggaacctggtgctgaacctgtgggactgtggcggtcaggacaccttcatggaaaattacttcaccagccagcgagacaatatcttccgtaacgtggaagttttgatttacgtgtttgacgtggagagccgcgaactggaaaaggacatgcattattaccagtcgtgtctggaggccatcctccagaactctcctgacgccaaaatcttctgcctggtgcacgaagacctgaggcgtctgtctcgcccgctggagtgtgcttgttttcgaacgtccatctgggatgagacgctctacaaagcctggtccagcatcgtctaccagctgattcccaacgttcagcagctggagatgaacctcaggaattttgcccaaatcattgaggccgatgaagttctgctgttcgaaagagctacattcttggttatttcccactaccagtgcaaagagcagcgcgacgtccaccggtttgagaagatcagcaacatcatcaaacagttcaagctgagctgcagtaaattggccgcttccttccagagcatggaagttaggaattccaacttcgctgctttcatcgacatcttcacctcaaatacgtacgtgatggtggtcatgtcagatccgtcgatcccttctgcggccactctgatcaacattcgcaatgcccggaaacactttgagaagctggagagagtggatggccccaagcacagtctccttatgcgttgaatattgccaaatgctctttctgaaaatgctgaattgccttttttgtttgcatcctttatttttaatattcataatgtcgtgtgcttaaaagtgggctttgaagtgtgtgctgcttactcctttcatctttctccccgcttccccagtctttaaacattggacgctatttactcagctacccagtagagcttgaagctgacctttctgagaagttggtatggtgtaacactaaagtaggtggttcgtgtgtgttctcattacctggttatgatagatatgcacatcaaagcctttaccagtatcttcctgtattccgtatcagattgcaaagacggaatgttactattttatcagcaaggtattaaaatgcatttataaattcttcttggcttcattcatgaataaacgtgttagcaatttaaaaaaaat

SEQ ID NO: 427068 - DNA, 918 bp, Homo sapiens
caggggttacaatgagtgtgatgcgtattataccatagccgcctactgtcaagagtactgcggcagtactattgacccagcgatgggggcttcgacatgggctttagcggagtcataagtggagtccgaaaacggcatcttcatcgggatgaagatgccgtgttcgaaagagctacattcttggttatttcccactaccagtgcaaagagcagcgcgacgtccaccggtttgagaagatcagcaacatcatcaaacagttcaagctgagctgcagtaaattggccgcttccttccagagcatggaagttaggaattccaacttcgctgctttcatcgacatcttcacctcaaatacgtacgtgatggtggtcatgtcagatccgtcgatcccttctgcggccactctgatcaacattcgcaatgcccggaaacactttgagaagctggagagagtggatggccccaagcacagtctccttatgcgttgaatattgccaaatgctctttctgaaaatgctgaattgccttttttgtttgcatcctttatttttaatattcataatgtcgtgtgcttaaaagtgggctttgaagtgtgtgctgcttactcctttcatctttctccccgcttccccagtctttaaacattggacgctatttactcagctacccagtagagcttgaagctgacctttctgagaagttggtatggtgtaacactaaagtaggtggttcgtgtgtgttctcattacctggttatgatagatatgcacatcaaagcctttaccagtatcttcctgtattccgtatcagattgcaaagacggaatgttactattttatcagcaaggtattaaaatgcatttataaattcttcttggcttcattcatgaataaacgtgttagcaatttaaaaaaaat

SEQ ID NO: 427069 - DNA, 2427 bp, Homo sapiens
cggaagctgggcatctgcagctggctcggcgcactccactgaccgtcccgacgatgctacgcgcgcccggctgcctcctccggacctccgtagcgcctgccgcggccctggctgcggcgctgctctcgtcgcttgcgcgctgctctcttctagagccgagggacccggtggcctcgtcgctcagcccctatttcggcaccaagactcgctacgaggatgtcaaccccgtgctattgtcgggccccgaggctccgtggcgggaccctgagctgctggaggggacctgcaccccggtgcagctggtcgccctcattcgccacggcacccgctaccccacggtcaaacagatccgcaagctgaggcagctgcacgggttgctgcaggcccgcgggtccagggatggcggggctagtagtaccggcagccgcgacctgggtgcagcgctggccgactggcctttgtggtacgcggactggatggacgggcagctagtagagaagggacggcaggatatgcgacagctggcgctgcgtctggcctcgctcttcccggcccttttcagccgtgagaactacggccgcctgcggctcatcaccagttccaagcaccgctgcatggatagcagcgccgccttcctgcaggggctgtggcagcactaccaccctggcttgccgccgccggacgtcgcagatatggagtttggacctccaacagttaatgataaactaatgagattttttgatcactgtgagaagtttttaactgaagtagaaaaaaatgctacagctctttatcacgtggaagccttcaaaactggaccagaaatgcagaacattttaaaaaaagttgcagctactttgcaagtgccagtaaatgatttaaatgcagatttaattcaagtagcctttttcacctgttcatttgacctggcaattaaaggtgttaaatctccttggtgtgatgtttttgacatagatgatgcaaaggtattagaatatttaaatgatctgaaacaatattggaaaagaggatatgggtatactattaacagtcgatccagctgcaccttgtttcaggatatctttcagcacttggacaaagcagttgaacagaaacaaaggtctcagccaatttcttctccagtcatcctccagtttggtcatgcagagactcttcttccactgctttctctcatgggctacttcaaagacaaggaacccctaacagcgtacaattacaaaaaacaaatgcatcggaagttccgaagtggtctcattgtaccttatgcctcgaacctgatatttgtgctttaccactgtgaaaatgctaagactcctaaagaacaattccgagtgcagatgttattaaatgaaaaggtgttacctttggcttactcacaagaaactgtttcattttatgaagatctgaagaaccactacaaggacatccttcagagttgtcaaaccagtgaagaatgtgaattagcaagggctaacagtacatctgatgaactatgagtaactgaagaacatttttaattctttaggaatctgcaatgagtgattacatgcttgtaataggtaggcaattccttgattacaggaagcttttatattacttgagtatttctgtcttttcacagaaaaacattgggtttctctctgggtttggacatgaaatgtaagaaaagatttttcactggagcagctctcttaaggagaaacaaatctatttagagaaacagctggccctgcaaatgtttacagaaatgaaattcttcctacttatataagaaatctcacactgagatagaattgtgatttcataataacacttgaaaagtgctggagtaacaaaatatctcagttggaccatccttaacttgattgaactgtctaggaactttacagattgttctgcagttctctcttcttttcctcaggtaggacagctctagcattttcttaatcaggaatattgtggtaagctgggagtatcactctggaagaaagtaacatctccagatgagaatttgaaacaagaaacagagtgttgtaaaaggacaccttcactgaagcaagtcggaaagtacaatgaaaataaatatttttggtatttatttatgaaatatttgaacattttttcaataattcctttttacttctaggaagtctcaaaagaccatcttaaattattatatgtttggacaattagcaacaagtcagatagttagaatcgaagtttttcaaatccattgcttagctaactttttcattctgtcacttggcttcgatttttatattttcctattatatgaaatgtatcttttggttgtttgatttttctttctttctttgtaaatagttctgagttctgtcaaatgccgtgaaagtatttgctataataaagaaaattcttgtgacttta

SEQ ID NO: 427070 - DNA, 2195 bp, Homo sapiens
cggaagctgggcatctgcagctggctcggcgcactccactgaccgtcccgacgatgctacgcgcgcccggctgcctcctccggacctccgtagcgcctgccgcggccctggctgcggcgctgctctcgtcgcttgcgcgctgctctcttctagagccgagggacccggtggcctcgtcgctcagcccctatttcggcaccaagactcgctacgaggatgtcaaccccgtgctattgtcgggccccgaggctccgtggcgggaccctgagctgctggaggggacctgcaccccggtgcagctggtcgccctcattcgccacggcacccgctaccccacggtcaaacagatccgcaagctgaggcagctgcacgggttgctgcaggcccgcgggtccagggatggcggggctagtagtaccggcagccgcgacctgggtgcagcgctggccgactggcctttgtggtacgcggactggatggacgggcagctagtagagaagggacggcaggatatgcgacagctggcgctgcgtctggcctcgctcttcccggcccttttcagccgtgagaactacggccgcctgcggctcatcaccagttccaagcaccgctgcatggatagcagcgccgccttcctgcaggggctgtggcagcactaccaccctggcttgccgccgccggacgtcgcagatatggagtttggacctccaacagttaatgataaactaatgagattttttgatcactgtgagaagtttttaactgaagtagaaaaaaatgctacagctctttatcacgtggaagccttcaaaactggaccagaaatgcagaacattttaaaaaaagttgcagctactttgcaagtgccagtaaatgatttaaatgcaggtctcagccaatttcttctccagtcatcctccagtttggtcatgcagagactcttcttccactgctttctctcatgggctacttcaaagacaaggaacccctaacagcgtacaattacaaaaaacaaatgcatcggaagttccgaagtggtctcattgtaccttatgcctcgaacctgatatttgtgctttaccactgtgaaaatgctaagactcctaaagaacaattccgagtgcagatgttattaaatgaaaaggtgttacctttggcttactcacaagaaactgtttcattttatgaagatctgaagaaccactacaaggacatccttcagagttgtcaaaccagtgaagaatgtgaattagcaagggctaacagtacatctgatgaactatgagtaactgaagaacatttttaattctttaggaatctgcaatgagtgattacatgcttgtaataggtaggcaattccttgattacaggaagcttttatattacttgagtatttctgtcttttcacagaaaaacattgggtttctctctgggtttggacatgaaatgtaagaaaagatttttcactggagcagctctcttaaggagaaacaaatctatttagagaaacagctggccctgcaaatgtttacagaaatgaaattcttcctacttatataagaaatctcacactgagatagaattgtgatttcataataacacttgaaaagtgctggagtaacaaaatatctcagttggaccatccttaacttgattgaactgtctaggaactttacagattgttctgcagttctctcttcttttcctcaggtaggacagctctagcattttcttaatcaggaatattgtggtaagctgggagtatcactctggaagaaagtaacatctccagatgagaatttgaaacaagaaacagagtgttgtaaaaggacaccttcactgaagcaagtcggaaagtacaatgaaaataaatatttttggtatttatttatgaaatatttgaacattttttcaataattcctttttacttctaggaagtctcaaaagaccatcttaaattattatatgtttggacaattagcaacaagtcagatagttagaatcgaagtttttcaaatccattgcttagctaactttttcattctgtcacttggcttcgatttttatattttcctattatatgaaatgtatcttttggttgtttgatttttctttctttctttgtaaatagttctgagttctgtcaaatgccgtgaaagtatttgctataataaagaaaattcttgtgacttta

SEQ ID NO: 427071 - DNA, 1623 bp, Homo sapiens
ataaatctctctgtggtatgaaccttagggaccaactcttaaatgctggaaaggacaaatactatattttgtgcagaatggtaattaaacattgtaaccatttcttagagaatcattattaaatcagggaatcttgttatatttttgaaaatatattagaaattatttttgaatttttttaggtattagaatatttaaatgatctgaaacaatattggaaaagaggatatgggtatactattaacagtcgatccagctgcaccttgtttcaggatatctttcagcacttggacaaagcagttgaacagaaacaaaggtctcagccaatttcttctccagtcatcctccagtttggtcatgcagagactcttcttccactgctttctctcatgggctacttcaaagacaaggaacccctaacagcgtacaattacaaaaaacaaatgcatcggaagttccgaagtggtctcattgtaccttatgcctcgaacctgatatttgtgctttaccactgtgaaaatgctaagactcctaaagaacaattccgagtgcagatgttattaaatgaaaaggtgttacctttggcttactcacaagaaactgtttcattttatgaagatctgaagaaccactacaaggacatccttcagagttgtcaaaccagtgaagaatgtgaattagcaagggctaacagtacatctgatgaactatgagtaactgaagaacatttttaattctttaggaatctgcaatgagtgattacatgcttgtaataggtaggcaattccttgattacaggaagcttttatattacttgagtatttctgtcttttcacagaaaaacattgggtttctctctgggtttggacatgaaatgtaagaaaagatttttcactggagcagctctcttaaggagaaacaaatctatttagagaaacagctggccctgcaaatgtttacagaaatgaaattcttcctacttatataagaaatctcacactgagatagaattgtgatttcataataacacttgaaaagtgctggagtaacaaaatatctcagttggaccatccttaacttgattgaactgtctaggaactttacagattgttctgcagttctctcttcttttcctcaggtaggacagctctagcattttcttaatcaggaatattgtggtaagctgggagtatcactctggaagaaagtaacatctccagatgagaatttgaaacaagaaacagagtgttgtaaaaggacaccttcactgaagcaagtcggaaagtacaatgaaaataaatatttttggtatttatttatgaaatatttgaacattttttcaataattcctttttacttctaggaagtctcaaaagaccatcttaaattattatatgtttggacaattagcaacaagtcagatagttagaatcgaagtttttcaaatccattgcttagctaactttttcattctgtcacttggcttcgatttttatattttcctattatatgaaatgtatcttttggttgtttgatttttctttctttctttgtaaatagttctgagttctgtcaaatgccgtgaaagtatttgctataataaagaaaattcttgtgacttta

SEQ ID NO: 427072 - DNA, 369 bp, Homo sapiens
ttttcaataattcctttttacttctaggaagtctcaaaagaccatcttaaattattatatgtttggacaattagcaacaagtcagatagttagaatcgaagtttttcaaatccattgcttagctaactttttcattctgtcacttggcttcgatttttatattttcctattatatgaaatgtatcttttggttgtttgatttttctttctttctttgtaaatagttctgagttctgtcaaatgccgtgaaagtatttgctataataaagaaaattcttgtgactttactaccaggacttttctcttccccatgtcaaaatacaatcaataattgatggtaaaagtttggaaattcaagcagatttgact

SEQ ID NO: 427073 - DNA, 2411 bp, Homo sapiens
cggaagctgggcatctgcagctggctcggcgcactccactgaccgtcccgacgatgctacgcgcgcccggctgcctcctccggacctccgtagcgcctgccgcggccctggctgcggcgctgctctcgtcgcttgcgcgctgctctcttctagagccgagggacccggtggcctcgtcgctcagcccctatttcggcaccaagactcgctacgaggatgtcaaccccgtgctattgtcgggccccgaggctccgtggcgggaccctgagctgctggaggggacctgcaccccggtgcagctggtcgccctcattcgccacggcacccgctaccccacggtcaaacagatccgcaagctgaggcagctgcacgggttgctgcaggcccgcgggtccagggatggcggggctagtagtaccggcagccgcgacctgggtgcagcgctggccgactggcctttgtggtacgcggactggatggacgggcagctagtagagaagggacggcaggatatgcgacagctggcgctgcgtctggcctcgctcttcccggcccttttcagccgtgagaactacggccgcctgcggctcatcaccagttccaagcaccgctgcatggatagcagcgccgccttcctgcaggggctgtggcagcactaccaccctggcttgccgccgccggacgtcgcagatatggagtttggacctccaacagttaatgataaactaatgagattttttgatcactgtgagaagtttttaactgaagtagaaaaaaatgctacagctctttatcacgtggaagccttcaaaactggaccagaaatgcagaacattttaaaaaaagttgcagctactttgcaagtgccagtaaatgatttaaatgcagatttaattcaagtagcctttttcacctgttcatttgacctggcaattaaaggtgttaaatctccttggtgtgatgtttttgacatagatgatgcaaaggtattagaatatttaaatgatctgaaacaatattggaaaagaggatatgggtatactattaacagtcgatccagctgcaccttgtttcaggatatctttcagcacttggacaaagcagttgaacagaaacaaaggtctcagccaatttcttctccagtcatgcagagactcttcttccactgctttctctcatgggctacttcaaagacaaggaacccctaacagcgtacaattacaaaaaacaaatgcatcggaagttccgaagtggtctcattgtaccttatgcctcgaacctgatatttgtgctttaccactgtgaaaatgctaagactcctaaagaacaattccgagtgcagatgttattaaatgaaaaggtgttacctttggcttactcacaagaaactgtttcattttatgaagatctgaagaaccactacaaggacatccttcagagttgtcaaaccagtgaagaatgtgaattagcaagggctaacagtacatctgatgaactatgagtaactgaagaacatttttaattctttaggaatctgcaatgagtgattacatgcttgtaataggtaggcaattccttgattacaggaagcttttatattacttgagtatttctgtcttttcacagaaaaacattgggtttctctctgggtttggacatgaaatgtaagaaaagatttttcactggagcagctctcttaaggagaaacaaatctatttagagaaacagctggccctgcaaatgtttacagaaatgaaattcttcctacttatataagaaatctcacactgagatagaattgtgatttcataataacacttgaaaagtgctggagtaacaaaatatctcagttggaccatccttaacttgattgaactgtctaggaactttacagattgttctgcagttctctcttcttttcctcaggtaggacagctctagcattttcttaatcaggaatattgtggtaagctgggagtatcactctggaagaaagtaacatctccagatgagaatttgaaacaagaaacagagtgttgtaaaaggacaccttcactgaagcaagtcggaaagtacaatgaaaataaatatttttggtatttatttatgaaatatttgaacattttttcaataattcctttttacttctaggaagtctcaaaagaccatcttaaattattatatgtttggacaattagcaacaagtcagatagttagaatcgaagtttttcaaatccattgcttagctaactttttcattctgtcacttggcttcgatttttatattttcctattatatgaaatgtatcttttggttgtttgatttttctttctttctttgtaaatagttctgagttctgtcaaatgccgtgaaagtatttgctataataaagaaaattcttgtgacttta

SEQ ID NO: 427074 - DNA, 2845 bp, Homo sapiens
ggggctgctggtggctgcaggtttcccacggagctttgagtttgcactcagggctgtgaggtcatggaggccagcattgccttctcatggcaggtgtcccggagtccctgaatctgtgggtttcccccaagccagcacctttgctgcaaacctctgagtttcctgttagcagtttttgggttgctgtgatgaatgagacaatatccgtaatatcacagcgtgtatttctgtctttccaaggatgtgtgaccggaatggtggtcggcggcttcgacagtggctgatcgagcagattgacagtagcatgtatccaggactgatttgggagaatgaggagaagagcatgttccggatcccttggaaacacgctggcaagcaagattataatcaggaagtggatgcctccatttttaaggcctgggcagtttttaaagggaagtttaaagaaggggacaaagctgaaccagccacttggaagacgaggttacgctgtgctttgaataagagcccagattttgaggaagtgacggaccggtcccaactggacatttccgagccatacaaagtttaccgaattgttcctgaggaagagcaaaaatgcaaactaggcgtggcaactgctggctgcgtgaatgaagttacagagatggagtgcggtcgctctgaaatcgacgagctgatcaaggagccttctgtggacgattacatggggatgatcaaaaggagcccttccccgccggaggcctgtcggagtcagctccttccagactggtgggcgcagcagcccagcacaggcgtgccgctggtgacggggtacaccacctacgacgcgcaccattcagcattctcccagatggtgatcagcttctactatgggggcaagctggtgggccaggccaccaccacctgccccgagggctgccgcctgtccctgagccagcctgggctgcccggcaccaagctgtatgggcccgagggcctggagctggtgcgcttcccgccggccgacgccatccccagcgagcgacagaggcaggtgacgcggaagctgttcgggcacctggagcgcggggtgctgctgcacagcagccggcagggcgtgttcgtcaagcggctgtgccagggccgcgtgttctgcagcggcaacgccgtggtgtgcaaaggcaggcccaacaagctggagcgtgatgaggtggtccaggtcttcgacaccagccagttcttccgagagctgcagcagttctataacagccagggccggcttcctgacggcagggtggtgctgtgctttggggaagagtttccggatatggcccccttgcgctccaaactcattctcgtgcagattgagcagctgtatgtccggcaactggcagaagaggctgggaagagctgtggagccggctctgtgatgcaggcccccgaggagccgccgccagaccaggtcttccggatgtttccagatatttgtgcctcacaccagagatcatttttcagagaaaaccaacagatcaccgtctaagtgcgtcgcttgggcgccccaccccgtctgcgtcctgcatccatctccctgttacagtggcccgcatcatgattaaagaatgtggatccctctgtctggggtgggatgccttactttgcacttaatttaataagggcattctcggaggagtagacgtttaatacgaagtggcggcatagccctgccgagatgtcggtgatggcctggatgctgtaaccacaacctgtggctaaaaattttattttctatcctttacccgtcattatcattagttgctatgattctttctgcattttcggttaactatcatttccaaagacttgtcattcagtaatattagcagatagctgcttcgataaaggaatttggagtttaaaaatcaacttgtgaaaacaaggttgtttttgtctttatcgtttgttagagttatagatttatgatttcataggcttgattctatgtgaaatatctttttacttttatgcattttaataagatttaaaaatatttagattaaagccccctttaatgagtacaagaaaaactcttggcttgttagaagaaagtatattctttctagaatttggtgcaggaatatgtgttcatatccaggcaaacgggtgtgtttttatcttcagacaatgaaaccttctcctctggggctttgttgccaggaagattagaactaaatttatttttttcatttctgtcatgaaatcattccagatacctcttttcttctttccaaatggttttcacatgtgtttgaaatatttgtacttcgaattgtcggattttccatgtcctcctttctcctttgtgcccagcctgagtcagcaccatcccgcattcagaacctcccagtgaaagggcagccttcattttgagaaggtggaaggtgttagggtttgggagacagctcatccaatctcccaagtctcatggtggatttgtgactgtgagagtttccggtttaaaatctgaaaagccagatatgcctgtttccttttcccagcaccatgcctgtggaggggacagtcagacccagaggtcctttacgtgtggatggagttcacaggcgaatagaggagaggaccaggggacgtggcttgtcccttttgtccaacaaagcattatatttttaagaatggcagacctgtttgctgaagtgttcataagataacaataggcttgaatctccaattcaaatgaatgtcaaagcacatatctttaatatgctgaatgaatatttatttttgtatccattaaaacagtatattgatctcttttattctttattaaaataaaatgctcttttttaaa

SEQ ID NO: 427075 - DNA, 2304 bp, Homo sapiens
ggggctgctggtggctgcaggtttcccacggagctttgagtttgcactcagggctgtgaggtcatggaggccagcattgccttctcatggcaggtgtcccggagtccctgaatctgtgggtttcccccaagccagcacctttgctgcaaacctctgagtttcctgttagcagtttttgggttgctgtgatgaatgagacaatatccgtaatatcacagcgtgtatttctgtctttccaaggatgtgtgaccggaatggtggtcggcggcttcgacagtggctgatcgagcagattgacagtagcatgtatccaggactgatttgggagaatgaggagaagagcatgttccggatcccttggaaacacgctggcaagcaagattataatcaggaagtggatgcctccatttttaaggcctgggcagtttttaaagggaagtttaaagaaggggacaaagctgaaccagccacttggaagacgaggttacgctgtgctttgaataagagcccagattttgaggaagtgacggaccggtcccaactggacatttccgagccatacaaagtttaccgaattgttcctgaggaagagcaaaaatgcaaactaggcgtggcaactgctggctgcgtgaatgaagttacagagatggagtgcggtcgctctgaaatcgacgagctgatcaaggagagctgcagcagttctataacagccagggccggcttcctgacggcagggtggtgctgtgctttggggaagagtttccggatatggcccccttgcgctccaaactcattctcgtgcagattgagcagctgtatgtccggcaactggcagaagaggctgggaagagctgtggagccggctctgtgatgcaggcccccgaggagccgccgccagaccaggtcttccggatgtttccagatatttgtgcctcacaccagagatcatttttcagagaaaaccaacagatcaccgtctaagtgcgtcgcttgggcgccccaccccgtctgcgtcctgcatccatctccctgttacagtggcccgcatcatgattaaagaatgtggatccctctgtctggggtgggatgccttactttgcacttaatttaataagggcattctcggaggagtagacgtttaatacgaagtggcggcatagccctgccgagatgtcggtgatggcctggatgctgtaaccacaacctgtggctaaaaattttattttctatcctttacccgtcattatcattagttgctatgattctttctgcattttcggttaactatcatttccaaagacttgtcattcagtaatattagcagatagctgcttcgataaaggaatttggagtttaaaaatcaacttgtgaaaacaaggttgtttttgtctttatcgtttgttagagttatagatttatgatttcataggcttgattctatgtgaaatatctttttacttttatgcattttaataagatttaaaaatatttagattaaagccccctttaatgagtacaagaaaaactcttggcttgttagaagaaagtatattctttctagaatttggtgcaggaatatgtgttcatatccaggcaaacgggtgtgtttttatcttcagacaatgaaaccttctcctctggggctttgttgccaggaagattagaactaaatttatttttttcatttctgtcatgaaatcattccagatacctcttttcttctttccaaatggttttcacatgtgtttgaaatatttgtacttcgaattgtcggattttccatgtcctcctttctcctttgtgcccagcctgagtcagcaccatcccgcattcagaacctcccagtgaaagggcagccttcattttgagaaggtggaaggtgttagggtttgggagacagctcatccaatctcccaagtctcatggtggatttgtgactgtgagagtttccggtttaaaatctgaaaagccagatatgcctgtttccttttcccagcaccatgcctgtggaggggacagtcagacccagaggtcctttacgtgtggatggagttcacaggcgaatagaggagaggaccaggggacgtggcttgtcccttttgtccaacaaagcattatatttttaagaatggcagacctgtttgctgaagtgttcataagataacaataggcttgaatctccaattcaaatgaatgtcaaagcacatatctttaatatgctgaatgaatatttatttttgtatccattaaaacagtatattgatctcttttattctttattaaaataaaatgctcttttttaaa

SEQ ID NO: 427076 - DNA, 2689 bp, Homo sapiens
gacttcttcaggcggggacgtcatgatccacccggtgaccaaccggccggtcgacgagcgcagcttcagtcccgctccctggtggagaaggagaaggtctctcgcagtggtggctactgccatcaatggatggagctggatcctagtcctcgcactggcctctggagaccaccactccccaagcttctattgatccttgtgggaccctaggatggactcccaatctgccagtgctctgggcgccacaagatgcgcgtatctgctcccaggctggcccttgccaggaccacgcctgagtcgtacaagccaccccctgaataccttgctcgagcgaaggatgtgatgcggcttggctgtcgggaacaggcacggaagctaggagctatttccgagccatacaaagtttaggcggaagttgttcctagaggaaagagcacaaaattgcaaactaggcgtggcaactgctggctgcgtgaatgaagttacagagatggagtgcggtcgctctgaaatcgacgagctgatcaaggagccttctgtggacgattacatggggatgatcaaaaggagcccttccccgccggaggcctgtcggagtcagctccttccagactggtgggcgcagcagcccagcacaggcgtgccgctggtgacggggtacaccacctacgacgcgcaccattcagcattctcccagatggtgatcagcttctactatgggggcaagctggtgggccaggccaccaccacctgccccgagggctgccgcctgtccctgagccagcctgggctgcccggcaccaagctgtatgggcccgagggcctggagctggtgcgcttcccgccggccgacgccatccccagcgagcgacagaggcaggtgacgcggaagctgttcgggcacctggagcgcggggtgctgctgcacagcagccggcagggcgtgttcgtcaagcggctgtgccagggccgcgtgttctgcagcggcaacgccgtggtgtgcaaaggcaggcccaacaagctggagcgtgatgaggtggtccaggtcttcgacaccagccagttcttccgagagctgcagcagttctataacagccagggccggcttcctgacggcagggtggtgctgtgctttggggaagagtttccggatatggcccccttgcgctccaaactcattctcgtgcagattgagcagctgtatgtccggcaactggcagaagaggctgggaagagctgtggagccggctctgtgatgcaggcccccgaggagccgccgccagaccaggtcttccggatgtttccagatatttgtgcctcacaccagagatcatttttcagagaaaaccaacagatcaccgtctaagtgcgtcgcttgggcgccccaccccgtctgcgtcctgcatccatctccctgttacagtggcccgcatcatgattaaagaatgtggatccctctgtctggggtgggatgccttactttgcacttaatttaataagggcattctcggaggagtagacgtttaatacgaagtggcggcatagccctgccgagatgtcggtgatggcctggatgctgtaaccacaacctgtggctaaaaattttattttctatcctttacccgtcattatcattagttgctatgattctttctgcattttcggttaactatcatttccaaagacttgtcattcagtaatattagcagatagctgcttcgataaaggaatttggagtttaaaaatcaacttgtgaaaacaaggttgtttttgtctttatcgtttgttagagttatagatttatgatttcataggcttgattctatgtgaaatatctttttacttttatgcattttaataagatttaaaaatatttagattaaagccccctttaatgagtacaagaaaaactcttggcttgttagaagaaagtatattctttctagaatttggtgcaggaatatgtgttcatatccaggcaaacgggtgtgtttttatcttcagacaatgaaaccttctcctctggggctttgttgccaggaagattagaactaaatttatttttttcatttctgtcatgaaatcattccagatacctcttttcttctttccaaatggttttcacatgtgtttgaaatatttgtacttcgaattgtcggattttccatgtcctcctttctcctttgtgcccagcctgagtcagcaccatcccgcattcagaacctcccagtgaaagggcagccttcattttgagaaggtggaaggtgttagggtttgggagacagctcatccaatctcccaagtctcatggtggatttgtgactgtgagagtttccggtttaaaatctgaaaagccagatatgcctgtttccttttcccagcaccatgcctgtggaggggacagtcagacccagaggtcctttacgtgtggatggagttcacaggcgaatagaggagaggaccaggggacgtggcttgtcccttttgtccaacaaagcattatatttttaagaatggcagacctgtttgctgaagtgttcataagataacaataggcttgaatctccaattcaaatgaatgtcaaagcacatatctttaatatgctgaatgaatatttatttttgtatccattaaaacagtatattgatctcttttattctttattaaaataaaatgctcttttttaaa

SEQ ID NO: 427077 - DNA, 2219 bp, Homo sapiens
tgtgggagtctgggaggtggcagctggccccggaggccttgaaggttgccaggccttgggtgtcgagtaagaggtccctggaaaggcacctctgtctgtgctgcaggaacaccatccggaaagctagcttgcacccccaggctctcccccagagataagccctgggtggcgtgccgctggtgacggggtacaccacctacgacgcgcaccattcagcattctcccagatggtgatcagcttctactatgggggcaagctggtgggccaggccaccaccacctgccccgagggctgccgcctgtccctgagccagcctgggctgcccggcaccaagctgtatgggcccgagggcctggagctggtgcgcttcccgccggccgacgccatccccagcgagcgacagaggcaggtgacgcggaagctgttcgggcacctggagcgcggggtgctgctgcacagcagccggcagggcgtgttcgtcaagcggctgtgccagggccgcgtgttctgcagcggcaacgccgtggtgtgcaaaggcaggcccaacaagctggagcgtgatgaggtggtccaggtcttcgacaccagccagttcttccgagagctgcagcagttctataacagccagggccggcttcctgacggcagggtggtgctgtgctttggggaagagtttccggatatggcccccttgcgctccaaactcattctcgtgcagattgagcagctgtatgtccggcaactggcagaagaggctgggaagagctgtggagccggctctgtgatgcaggcccccgaggagccgccgccagaccaggtcttccggatgtttccagatatttgtgcctcacaccagagatcatttttcagagaaaaccaacagatcaccgtctaagtgcgtcgcttgggcgccccaccccgtctgcgtcctgcatccatctccctgttacagtggcccgcatcatgattaaagaatgtggatccctctgtctggggtgggatgccttactttgcacttaatttaataagggcattctcggaggagtagacgtttaatacgaagtggcggcatagccctgccgagatgtcggtgatggcctggatgctgtaaccacaacctgtggctaaaaattttattttctatcctttacccgtcattatcattagttgctatgattctttctgcattttcggttaactatcatttccaaagacttgtcattcagtaatattagcagatagctgcttcgataaaggaatttggagtttaaaaatcaacttgtgaaaacaaggttgtttttgtctttatcgtttgttagagttatagatttatgatttcataggcttgattctatgtgaaatatctttttacttttatgcattttaataagatttaaaaatatttagattaaagccccctttaatgagtacaagaaaaactcttggcttgttagaagaaagtatattctttctagaatttggtgcaggaatatgtgttcatatccaggcaaacgggtgtgtttttatcttcagacaatgaaaccttctcctctggggctttgttgccaggaagattagaactaaatttatttttttcatttctgtcatgaaatcattccagatacctcttttcttctttccaaatggttttcacatgtgtttgaaatatttgtacttcgaattgtcggattttccatgtcctcctttctcctttgtgcccagcctgagtcagcaccatcccgcattcagaacctcccagtgaaagggcagccttcattttgagaaggtggaaggtgttagggtttgggagacagctcatccaatctcccaagtctcatggtggatttgtgactgtgagagtttccggtttaaaatctgaaaagccagatatgcctgtttccttttcccagcaccatgcctgtggaggggacagtcagacccagaggtcctttacgtgtggatggagttcacaggcgaatagaggagaggaccaggggacgtggcttgtcccttttgtccaacaaagcattatatttttaagaatggcagacctgtttgctgaagtgttcataagataacaataggcttgaatctccaattcaaatgaatgtcaaagcacatatctttaatatgctgaatgaatatttatttttgtatccattaaaacagtatattgatctcttttattctttattaaaataaaatgctcttttttaaa

SEQ ID NO: 427078 - DNA, 2661 bp, Homo sapiens
agcgcggcagcaagcgtgggaacgcgggcggcgagacggcggcaggacggcggcaggatgtgtgaccggaatggtggtcggcggcttcgacagtggctgatcgagcagattgacagtagcatgtatccaggactgatttgggagaatgaggagaagagcatgttccggatcccttggaaacacgctggcaagcaagattataatcaggaagtggatgcctccatttttaaggcctgggcagtttttaaagggaagtttaaagaaggggacaaagctgaaccagccacttggaagacgaggttacgctgtgctttgaataagagcccagattttgaggaagtgacggaccggtcccaactggacatttccgagccatacaaagtttaccgaattgttcctgaggaagagcaaaaatgcaaactaggcgtggcaactgctggctgcgtgaatgaagttacagagatggagtgcggtcgctctgaaatcgacgagctgatcaaggagccttctgtggacgattacatggggatgatcaaaaggagcccttccccgccggaggcctgtcggagtcagctccttccagactggtgggcgcagcagcccagcacaggcgtgccgctggtgacggggtacaccacctacgacgcgcaccattcagcattctcccagatggtgatcagcttctactatgggggcaagctggtgggccaggccaccaccacctgccccgagggctgccgcctgtccctgagccagcctgggctgcccggcaccaagctgtatgggcccgagggcctggagctggtgcgcttcccgccggccgacgccatccccagcgagcgacagaggcaggtgacgcggaagctgttcgggcacctggagcgcggggtgctgctgcacagcagccggcagggcgtgttcgtcaagcggctgtgccagggccgcgtgttctgcagcggcaacgccgtggtgtgcaaaggcaggcccaacaagctggagcgtgatgaggtggtccaggtcttcgacaccagccagttcttccgagagctgcagcagttctataacagccagggccggcttcctgacggcagggtggtgctgtgctttggggaagagtttccggatatggcccccttgcgctccaaactcattctcgtgcagattgagcagctgtatgtccggcaactggcagaagaggctgggaagagctgtggagccggctctgtgatgcaggcccccgaggagccgccgccagaccaggtcttccggatgtttccagatatttgtgcctcacaccagagatcatttttcagagaaaaccaacagatcaccgtctaagtgcgtcgcttgggcgccccaccccgtctgcgtcctgcatccatctccctgttacagtggcccgcatcatgattaaagaatgtggatccctctgtctggggtgggatgccttactttgcacttaatttaataagggcattctcggaggagtagacgtttaatacgaagtggcggcatagccctgccgagatgtcggtgatggcctggatgctgtaaccacaacctgtggctaaaaattttattttctatcctttacccgtcattatcattagttgctatgattctttctgcattttcggttaactatcatttccaaagacttgtcattcagtaatattagcagatagctgcttcgataaaggaatttggagtttaaaaatcaacttgtgaaaacaaggttgtttttgtctttatcgtttgttagagttatagatttatgatttcataggcttgattctatgtgaaatatctttttacttttatgcattttaataagatttaaaaatatttagattaaagccccctttaatgagtacaagaaaaactcttggcttgttagaagaaagtatattctttctagaatttggtgcaggaatatgtgttcatatccaggcaaacgggtgtgtttttatcttcagacaatgaaaccttctcctctggggctttgttgccaggaagattagaactaaatttatttttttcatttctgtcatgaaatcattccagatacctcttttcttctttccaaatggttttcacatgtgtttgaaatatttgtacttcgaattgtcggattttccatgtcctcctttctcctttgtgcccagcctgagtcagcaccatcccgcattcagaacctcccagtgaaagggcagccttcattttgagaaggtggaaggtgttagggtttgggagacagctcatccaatctcccaagtctcatggtggatttgtgactgtgagagtttccggtttaaaatctgaaaagccagatatgcctgtttccttttcccagcaccatgcctgtggaggggacagtcagacccagaggtcctttacgtgtggatggagttcacaggcgaatagaggagaggaccaggggacgtggcttgtcccttttgtccaacaaagcattatatttttaagaatggcagacctgtttgctgaagtgttcataagataacaataggcttgaatctccaattcaaatgaatgtcaaagcacatatctttaatatgctgaatgaatatttatttttgtatccattaaaacagtatattgatctcttttattctttattaaaataaaatgctcttttttaaa

SEQ ID NO: 427079 - DNA, 2720 bp, Homo sapiens
ggggctgctggtggctgcaggtttcccacggagctttgagtttgcactcagggctgtgaggtcatggaggccagcattgccttctcatggcaggtgtcccggagtccctgaatctgatgtgtgaccggaatggtggtcggcggcttcgacagtggctgatcgagcagattgacagtagcatgtatccaggactgatttgggagaatgaggagaagagcatgttccggatcccttggaaacacgctggcaagcaagattataatcaggaagtggatgcctccatttttaaggcctgggcagtttttaaagggaagtttaaagaaggggacaaagctgaaccagccacttggaagacgaggttacgctgtgctttgaataagagcccagattttgaggaagtgacggaccggtcccaactggacatttccgagccatacaaagtttaccgaattgttcctgaggaagagcaaaaatgcaaactaggcgtggcaactgctggctgcgtgaatgaagttacagagatggagtgcggtcgctctgaaatcgacgagctgatcaaggagccttctgtggacgattacatggggatgatcaaaaggagcccttccccgccggaggcctgtcggagtcagctccttccagactggtgggcgcagcagcccagcacaggcgtgccgctggtgacggggtacaccacctacgacgcgcaccattcagcattctcccagatggtgatcagcttctactatgggggcaagctggtgggccaggccaccaccacctgccccgagggctgccgcctgtccctgagccagcctgggctgcccggcaccaagctgtatgggcccgagggcctggagctggtgcgcttcccgccggccgacgccatccccagcgagcgacagaggcaggtgacgcggaagctgttcgggcacctggagcgcggggtgctgctgcacagcagccggcagggcgtgttcgtcaagcggctgtgccagggccgcgtgttctgcagcggcaacgccgtggtgtgcaaaggcaggcccaacaagctggagcgtgatgaggtggtccaggtcttcgacaccagccagttcttccgagagctgcagcagttctataacagccagggccggcttcctgacggcagggtggtgctgtgctttggggaagagtttccggatatggcccccttgcgctccaaactcattctcgtgcagattgagcagctgtatgtccggcaactggcagaagaggctgggaagagctgtggagccggctctgtgatgcaggcccccgaggagccgccgccagaccaggtcttccggatgtttccagatatttgtgcctcacaccagagatcatttttcagagaaaaccaacagatcaccgtctaagtgcgtcgcttgggcgccccaccccgtctgcgtcctgcatccatctccctgttacagtggcccgcatcatgattaaagaatgtggatccctctgtctggggtgggatgccttactttgcacttaatttaataagggcattctcggaggagtagacgtttaatacgaagtggcggcatagccctgccgagatgtcggtgatggcctggatgctgtaaccacaacctgtggctaaaaattttattttctatcctttacccgtcattatcattagttgctatgattctttctgcattttcggttaactatcatttccaaagacttgtcattcagtaatattagcagatagctgcttcgataaaggaatttggagtttaaaaatcaacttgtgaaaacaaggttgtttttgtctttatcgtttgttagagttatagatttatgatttcataggcttgattctatgtgaaatatctttttacttttatgcattttaataagatttaaaaatatttagattaaagccccctttaatgagtacaagaaaaactcttggcttgttagaagaaagtatattctttctagaatttggtgcaggaatatgtgttcatatccaggcaaacgggtgtgtttttatcttcagacaatgaaaccttctcctctggggctttgttgccaggaagattagaactaaatttatttttttcatttctgtcatgaaatcattccagatacctcttttcttctttccaaatggttttcacatgtgtttgaaatatttgtacttcgaattgtcggattttccatgtcctcctttctcctttgtgcccagcctgagtcagcaccatcccgcattcagaacctcccagtgaaagggcagccttcattttgagaaggtggaaggtgttagggtttgggagacagctcatccaatctcccaagtctcatggtggatttgtgactgtgagagtttccggtttaaaatctgaaaagccagatatgcctgtttccttttcccagcaccatgcctgtggaggggacagtcagacccagaggtcctttacgtgtggatggagttcacaggcgaatagaggagaggaccaggggacgtggcttgtcccttttgtccaacaaagcattatatttttaagaatggcagacctgtttgctgaagtgttcataagataacaataggcttgaatctccaattcaaatgaatgtcaaagcacatatctttaatatgctgaatgaatatttatttttgtatccattaaaacagtatattgatctcttttattctttattaaaataaaatgctcttttttaaa

SEQ ID NO: 427080 - DNA, 2249 bp, Homo sapiens
tgtgggagtctgggaggtggcagctggccccggaggccttgaaggttgccaggccttgggtgtcgagtaagaggtccctggaaaggcacctctgtctgtgctgcaggaacaccatccggaaagctagcttgcacccccaggctctcccccagagataagccctgggtggtgggtatgcagtccagtggtattctgggggcgtgccgctggtgacggggtacaccacctacgacgcgcaccattcagcattctcccagatggtgatcagcttctactatgggggcaagctggtgggccaggccaccaccacctgccccgagggctgccgcctgtccctgagccagcctgggctgcccggcaccaagctgtatgggcccgagggcctggagctggtgcgcttcccgccggccgacgccatccccagcgagcgacagaggcaggtgacgcggaagctgttcgggcacctggagcgcggggtgctgctgcacagcagccggcagggcgtgttcgtcaagcggctgtgccagggccgcgtgttctgcagcggcaacgccgtggtgtgcaaaggcaggcccaacaagctggagcgtgatgaggtggtccaggtcttcgacaccagccagttcttccgagagctgcagcagttctataacagccagggccggcttcctgacggcagggtggtgctgtgctttggggaagagtttccggatatggcccccttgcgctccaaactcattctcgtgcagattgagcagctgtatgtccggcaactggcagaagaggctgggaagagctgtggagccggctctgtgatgcaggcccccgaggagccgccgccagaccaggtcttccggatgtttccagatatttgtgcctcacaccagagatcatttttcagagaaaaccaacagatcaccgtctaagtgcgtcgcttgggcgccccaccccgtctgcgtcctgcatccatctccctgttacagtggcccgcatcatgattaaagaatgtggatccctctgtctggggtgggatgccttactttgcacttaatttaataagggcattctcggaggagtagacgtttaatacgaagtggcggcatagccctgccgagatgtcggtgatggcctggatgctgtaaccacaacctgtggctaaaaattttattttctatcctttacccgtcattatcattagttgctatgattctttctgcattttcggttaactatcatttccaaagacttgtcattcagtaatattagcagatagctgcttcgataaaggaatttggagtttaaaaatcaacttgtgaaaacaaggttgtttttgtctttatcgtttgttagagttatagatttatgatttcataggcttgattctatgtgaaatatctttttacttttatgcattttaataagatttaaaaatatttagattaaagccccctttaatgagtacaagaaaaactcttggcttgttagaagaaagtatattctttctagaatttggtgcaggaatatgtgttcatatccaggcaaacgggtgtgtttttatcttcagacaatgaaaccttctcctctggggctttgttgccaggaagattagaactaaatttatttttttcatttctgtcatgaaatcattccagatacctcttttcttctttccaaatggttttcacatgtgtttgaaatatttgtacttcgaattgtcggattttccatgtcctcctttctcctttgtgcccagcctgagtcagcaccatcccgcattcagaacctcccagtgaaagggcagccttcattttgagaaggtggaaggtgttagggtttgggagacagctcatccaatctcccaagtctcatggtggatttgtgactgtgagagtttccggtttaaaatctgaaaagccagatatgcctgtttccttttcccagcaccatgcctgtggaggggacagtcagacccagaggtcctttacgtgtggatggagttcacaggcgaatagaggagaggaccaggggacgtggcttgtcccttttgtccaacaaagcattatatttttaagaatggcagacctgtttgctgaagtgttcataagataacaataggcttgaatctccaattcaaatgaatgtcaaagcacatatctttaatatgctgaatgaatatttatttttgtatccattaaaacagtatattgatctcttttattctttattaaaataaaatgctcttttttaaa

SEQ ID NO: 427081 - DNA, 3132 bp, Homo sapiens
cggacaggagccattgtgggcgagagcaagttaaggggagggggtgtaagagccagcgaataagagagagagtaagagggagagagaagaagaggaagaagaggaggcggcggcagcggaggaggaggaggactagtgtggggtggaaaggaagagtgagcgagagcaagttaaggggagggggtgtaagagccagcgaattctttttctttttctattattattttgacgactcctgagttgcgcccatgctcttgtcagcttcgttttaggcgtagcatggccaggcagaagaaaatggggcaaagcgtgctccgggcggtcttctttttagtcctggggcttttgggtcattctcacggaggattccccaacaccatcagcataggtggacttttcatgagaaacacagtgcaggagcacagcgctttccgctttgccgtgcagttatacaacaccaaccagaacaccaccgagaagcccttccatttgaattaccacgtagatcacttggattcctccaatagtttttccgtgacaaatgctttctgctcccagttctcgagaggggtgtatgccatctttggattctatgaccagatgtcaatgaacaccctgacctccttctgtggggccctgcacacatcctttgttacgcctagcttccccactgacgcagatgtgcagtttgtcatccagatgcgcccagccttgaagggcgctattctgagtcttctgggtcattacaagtgggagaagtttgtgtacctctatgacacagaacgaggattttccatcctccaagcgattatggaagcagcagtgcaaaacaactggcaagtaacagcaaggtctgtgggaaacataaaggacgtccaagaattcaggcgcatcattgaagaaatggacaggaggcaggaaaagcgatacttgattgactgcgaagtcgaaaggattaacacaattttggaacaggttgtgatcctagggaaacactcaagaggttatcactacatgctcgctaacctgggttttactgatattttactggaaagagtcatgcatgggggagccaacattacaggtttccagattgtcaacaatgaaaaccctatggttcagcagttcatacagcgctgggtgaggctggatgaaagggaattccctgaagccaagaatgcaccactaaagtatacatctgcattgacacacgacgcaatactggtcatagcagaagctttccgctacctgaggaggcagcgagtagatgtgtcccggagaggaagtgctggagactgcttagcaaatcctgctgtgccctggagtcaaggaattgatattgagagagctctgaaaatggtgcaagtacaaggaatgactggaaatattcaatttgacacttatggacgtaggacaaattataccatcgatgtgtatgaaatgaaagtcagtggctctcgaaaagctggctactggaacgagtatgaaaggtttgtgcctttctcagatcagcaaatcagcaatgacagtgcatcctcagagaatcggaccatagtagtgactaccattctggaatcaccatatgtaatgtacaagaagaaccatgagcaactggaaggaaatgaacgatatgaaggctattgtgtagacctagcctatgaaatagccaaacatgtaaggatcaaatacaaattgtccatcgttggtgacgggaaatatggtgcaagggatccagagactaaaatatggaacggcatggttggggaacttgtctatgggagagctgatatagctgttgctccactcactataacattggtccgtgaagaagtcatagatttttcaaagccattcatgagcctgggcatctccatcatgataaagaagcctcagaaatcaaaaccaggcgtattctcatttctggatcccctggcttatgaaatctggatgtgcattgtctttgcttacattggagtcagcgtagttcttttcctagtcagcaggttcagtccttatgaatggcacttggaagacaacaatgaagaacctcgtgacccacaaagtcctcctgatcctccaaatgaatttggaatatttaacagtctttggttttccttgggtgcctttatgcagcaaggatgtgatatttctccaagatcactctccgggcgcattgttggaggggtttggtggttcttcaccctgatcataatttcttcctatactgccaatctcgctgctttcctgactgtggagaggatggtttctcccatagagagtgctgaagacttagctaaacagactgaaattgcatatgggaccctggactccggttcaacaaaagaatttttcagaagatccaaaattgctgtgtacgagaaaatgtggtcttacatgaaatcagcggagccatctgtgtttaccaaaacaacagcagacggagtggcccgagtgcgaaagtccaagggaaagttcgccttcctgctggagtcaaccatgaatgagtacattgagcagagaaaaccatgtgatacgatgaaagttggtggaaatctggattccaaaggctatggtgtggcaacccctaaaggctcagcattaggaaatgctgttaacctggcagtattaaaactgaatgagcaaggcctcttggacaaattgaaaaacaaatggtggtacgacaaaggagagtgcggcagcgggggcggtgactccaaggacaagaccagcgctctgagcctgagcaatgtggcaggcgttttctatatacttgtcggaggtctggggctggccatgatggtggctttgatagaattctgttacaaatcacgggcagagtccaaacgcatgaaactcacaaagaacacccaaaactttaagcctgctcctgccaccaacactcagaattatgctacatacagagaaggctacaacgtgtatggaacagagagtgttaagatctagggatcccttcccactggaggcatgtgatgagaggaaatcaccgaaaacggcgtgcatggcatgcacgttcagacagctgcattgtaagagttctgtcatgcagtctgaaaagggaagaaacaggatggctttctgtagccacacctgtgaggcgtgatgattgttggg

SEQ ID NO: 427082 - DNA, 631 bp, Homo sapiens
tgttaactttttataaggtaatgctcaggttgcctgcagtgtctaaaattactctgtggccagggccccctgctttatcgctttctatagttttaaagtagtttgaagcttgaataacataaaataacataatataatgttatttatgttatttcccacgtgaagaacgcctgtaaaccttgcagtattgaaactcagtgaacaaggcatcttagacaagctgaaaaacaaatggtggtacgataagggggaatgtggagccaaggactccgggagtaaggtcagtcgctgaaggtctttttgtactgattagcaatcacattttgacccactgtttattttctaccctaaaacggctttccttcccaacacacactccctgacacagtgggacccctttataacaacagtgctaaaggaataagacaaatgccagcctcagaggcctgccacatgacatcaattgttgactctatagaacagttatgatgattaggaaactcaatctggcctactgcatttccaaagttataaaataatgagctgtgttataagggggttttactgtatttcacatttcaaaagttcaaagagaaaatataataacaataacaacaacaacaaccaaaaa

SEQ ID NO: 427083 - DNA, 3281 bp, Homo sapiens
cggacaggagccattgtgggcgagagcaagttaaggggagggggtgtaagagccagcgaataagagagagagtaagagggagagagaagaagaggaagaagaggaggcggcggcagcggaggaggaggaggactagtgtggggtggaaaggaagagtgagcgagagcaagttaaggggagggggtgtaagagccagcgaattctttttctttttctattattattttgacgactcctgagttgcgcccatgctcttgtcagcttcgttttaggcgtagcatggccaggcagaagaaaatggggcaaagcgtgctccgggcggtcttctttttagtcctggggcttttgggtcattctcacggaggattccccaacaccatcagcataggtggacttttcatgagaaacacagtgcaggagcacagcgctttccgctttgccgtgcagttatacaacaccaaccagaacaccaccgagaagcccttccatttgaattaccacgtagatcacttggattcctccaatagtttttccgtgacaaatgctttctgctcccagttctcgagaggggtgtatgccatctttggattctatgaccagatgtcaatgaacaccctgacctccttctgtggggccctgcacacatcctttgttacgcctagcttccccactgacgcagatgtgcagtttgtcatccagatgcgcccagccttgaagggcgctattctgagtcttctgggtcattacaagtgggagaagtttgtgtacctctatgacacagaacgaggattttccatcctccaagcgattatggaagcagcagtgcaaaacaactggcaagtaacagcaaggtctgtgggaaacataaaggacgtccaagaattcaggcgcatcattgaagaaatggacaggaggcaggaaaagcgatacttgattgactgcgaagtcgaaaggattaacacaattttggaacaggttgtgatcctagggaaacactcaagaggttatcactacatgctcgctaacctgggttttactgatattttactggaaagagtcatgcatgggggagccaacattacaggtttccagattgtcaacaatgaaaaccctatggttcagcagttcatacagcgctgggtgaggctggatgaaagggaattccctgaagccaagaatgcaccactaaagtatacatctgcattgacacacgacgcaatactggtcatagcagaagctttccgctacctgaggaggcagcgagtagatgtgtcccggagaggaagtgctggagactgcttagcaaatcctgctgtgccctggagtcaaggaattgatattgagagagctctgaaaatggtgcaagtacaaggaatgactggaaatattcaatttgacacttatggacgtaggacaaattataccatcgatgtgtatgaaatgaaagtcagtggctctcgaaaagctggctactggaacgagtatgaaaggtttgtgcctttctcagatcagcaaatcagcaatgacagtgcatcctcagagaatcggaccatagtagtgactaccattctggaatcaccatatgtaatgtacaagaagaaccatgagcaactggaaggaaatgaacgatatgaaggctattgtgtagacctagcctatgaaatagccaaacatgtaaggatcaaatacaaattgtccatcgttggtgacgggaaatatggtgcaagggatccagagactaaaatatggaacggcatggttggggaacttgtctatgggagagctgatatagctgttgctccactcactataacattggtccgtgaagaagtcatagatttttcaaagccattcatgagcctgggcatctccatcatgataaagaagcctcagaaatcaaaaccaggcgtattctcatttctggatcccctggcttatgaaatctggatgtgcattgtctttgcttacattggagtcagcgtagttcttttcctagtcagcaggttcagtccttatgaatggcacttggaagacaacaatgaagaacctcgtgacccacaaagtcctcctgatcctccaaatgaatttggaatatttaacagtctttggttttccttgggtgcctttatgcagcaaggatgtgatatttctccaagatcactctccgggcgcattgttggaggggtttggtggttcttcaccctgatcataatttcttcctatactgccaatctcgctgctttcctgactgtggagaggatggtttctcccatagagagtgctgaagacttagctaaacagactgaaattgcatatgggaccctggactccggttcaacaaaagaatttttcagaagatccaaaattgctgtgtacgagaaaatgtggtcttacatgaaatcagcggagccatctgtgtttaccaaaacaacagcagacggagtggcccgagtgcgaaagtccaagggaaagttcgccttcctgctggagtcaaccatgaatgagtacattgagcagagaaaaccatgtgatacgatgaaagttggtggaaatctggattccaaaggctatggtgtggcaacccctaaaggctcagcattaggaacgcctgtaaaccttgcagtattgaaactcagtgaacaaggcatcttagacaagctgaaaaacaaatggtggtacgataagggggaatgtggagccaaggactccgggagtaaggacaagaccagcgctctgagcctgagcaatgtggcaggcgttttctatatacttgtcggaggtctggggctggccatgatggtggctttgatagaattctgttacaaatcacgggcagagtccaaacgcatgaaactcacaaagaacacccaaaactttaagcctgctcctgccaccaacactcagaattatgctacatacagagaaggctacaacgtgtatggaacagagagtgttaagatctagggatcccttcccactggaggcatgtgatgagaggaaatcaccgaaaacgtggctgcttcaaggatcctgagccagatttcactctccttggtgtcgggcatgacacgaatattgctgatggtgcaatgacctttcaataggaaaaactgatttttttttccttcagtgccttatggaacactctgagactcgcgacaatgcaaaccatcattgaaatctttttgctttgcttgaaaaaaaataattaaaataaaaaccaacaaaaatggacatgcatcaaacccttgatgtattaatatttattatagttttcatta

SEQ ID NO: 427084 - DNA, 2874 bp, Homo sapiens
tcacaaggcagtacaagttgtattataaggtagcaaaaacacactattaggaaaagaaagcagagtcggttgctctaagccaatgtgtctcagaagacaaaaggccagcaccctttctttaatttaccatcaagttaaagcactttagaacccactgaatgctaccacttttctaacctaagcattgataattcaattggttgtaaagatttaggacttgatattttcaccaaagaagtatattaagcgacaaataactgattaaagactgtctctaaaagtcatatatgttttcttttttttcttttttttcagagagctgatatagctgttgctccactcactataacattggtccgtgaagaagtcatagatttttcaaagccattcatgagcctgggcatctccatcatgataaagaagcctcagaaatcaaaaccaggcgtattctcatttctggatcccctggcttatgaaatctggatgtgcattgtctttgcttacattggagtcagcgtagttcttttcctagtcagcaggttcagtccttatgaatggcacttggaagacaacaatgaagaacctcgtgacccacaaagtcctcctgatcctccaaatgaatttggaatatttaacagtctttggttttccttgggtgcctttatgcagcaaggatgtgatatttctccaagatcactctccgggcgcattgttggaggggtttggtggttcttcaccctgatcataatttcttcctatactgccaatctcgctgctttcctgactgtggagaggatggtttctcccatagagagtgctgaagacttagctaaacagactgaaattgcatatgggaccctggactccggttcaacaaaagaatttttcagaagatccaaaattgctgtgtacgagaaaatgtggtcttacatgaaatcagcggagccatctgtgtttaccaaaacaacagcagacggagtggcccgagtgcgaaagtccaagggaaagttcgccttcctgctggagtcaaccatgaatgagtacattgagcagagaaaaccatgtgatacgatgaaagttggtggaaatctggattccaaaggctatggtgtggcaacccctaaaggctcagcattaggaacgcctgtaaaccttgcagtattgaaactcagtgaacaaggcatcttagacaagctgaaaaacaaatggtggtacgataagggggaatgtggagccaaggactccgggagtaaggacaagaccagcgctctgagcctgagcaatgtggcaggcgttttctatatacttgtcggaggtctggggctggccatgatggtggctttgatagaattctgttacaaatcacgggcagagtccaaacgcatgaaactcacaaagaacacccaaaactttaagcctgctcctgccaccaacactcagaattatgctacatacagagaaggctacaacgtgtatggaacagagagtgttaagatctagggatcccttcccactggaggcatgtgatgagaggaaatcaccgaaaacgtggctgcttcaaggatcctgagccagatttcactctccttggtgtcgggcatgacacgaatattgctgatggtgcaatgacctttcaataggaaaaactgatttttttttccttcagtgccttatggaacactctgagactcgcgacaatgcaaaccatcattgaaatctttttgctttgcttgaaaaaaaataattaaaataaaaaccaacaaaaatggacatgcaagattccagtatgcgaaaaaaaatcttattaagtcaattcaacaaaagccattctttgataccactgcagagtatataaacaccatgttctttaatacacacacacacacacacacacacacacacacacatttaaattccaattcagcaaagaggcccatctaagctaaaaaaattaattcttcctgattaaaaagaaaaaatctgtctcccagtgtttgggaagacggactggcatttcttctaggatctgctgaccagatgtttttggtatttcctgttggtggtgatgttctgtgcactctatttcctttcaatgttgctgaaatgtgtatatctttagaatgtaaatgcaacacttaagaaaattcaaacactttggaaaagggactaaacagtgatttctctgtgttcttgaaatggttttgtgaaaatgctttgataacttcccactcaaagaagagatttacagagctttcgaaattgactttgtgtgtagcaagggacggggcactatcaggatacctcttggtgctttcctaaaatggatcccggggctttccaaggagcctggaatttcagctcacagatctgtttttcttgcttcagtgtgcattttaagtcaatagagctgagtatctagcattgaggtgagggaaatgctgcctatactcccagatgtgtttagaatatctcagaaacaacactgtgtttagctcggctttctctgctaagtatgcctttcaagtgtacaccacggagacaggaccgcgttgcaaggcgggacagcaggttcagaccacagttctcagtctgactttactcttgctaggtctgtcctactagctgttgcctgctaccgcccatggctctccatcggactgcatgtgtccttttctagtttgcaaagactaaaatgcattcccaaacctactgctaatctgagggcctcagcatcacttccagatccttgcttggagcagtctctctattgactctctcagatcgctccactgctccatgggctatcaagtaactaactgcatacctgccgttggcatcatcagaacagtccgaagaaatagtctccactcacta

SEQ ID NO: 427085 - DNA, 897 bp, Homo sapiens
cggacaggagccattgtgggcgagagcaagttaaggggagggggtgtaagagccagcgaataagagagagagtaagagggagagagaagaagaggaagaagaggaggcggcggcagcggaggaggaggaggactagtgtggggtggaaaggaagagtgagcgagagcaagttaaggggagggggtgtaagagccagcgaattctttttctttttctattattattttgacgactcctgagttgcgcccatgctcttgtcagcttcgttttaggcgtagcatggccaggcagaagaaaatggggcaaagcgtgctccgggcggtcttctttttagtcctggggcttttgggtcattctcacggaggattccccaacaccatcagcataggtggacttttcatgagaaacacagtgcaggagcacagcgctttccgctttgccgtgcagttatacaacaccaaccagaacaccaccgagaagcccttccatttgaattaccacgtagatcacttggattcctccaatagtttttccgtgacaaatgctttctgctcccagttctcgagaggggtgtatgccatctttggattctatgaccagatgtcaatgaacaccctgacctccttctgtggggccctgcacacatcctttgttacgcctagcttccccactgacgcagatgtgcagtttgtcatccagatgcgcccagccttgaagggcgctattctgagtcttctgggtcattacaagtgggagaagtttgtgtacctctatgacacagaacgaggtaagaagaggcacctgctctgctctttagatattcatgtaattgtgttcaaacttcctcagcttatgtgccctttgcttccaataaataaaatctaattctgttttaaa

SEQ ID NO: 427086 - DNA, 418 bp, Homo sapiens
aagaaacagtattgagagcaagagagagattgccttgagccatttgattgtaataattgtaacacatgcacacatgaggtaagaactatcactgtagaatgaatcgaattcaggcttgcccagagagatctcttaaataaataggggggtgactgcatagaacaataggtagaaatgaatgaaaattataagaaacaaggcaaattttgagggtatcatttatcatgatatcttgtttttcatgcatccatttcagtatacatctgcattgacacacgacgcaatactggtcatagcagaagctttccgctacctgaggaggcagcgagtagatgtgtcccggagaggaagtgctggagactgcttagcaaatcctgctgtgccctggagtcaaggaattgatattgagagagctctg

SEQ ID NO: 427087 - DNA, 4338 bp, Homo sapiens
cggacaggagccattgtgggcgagagcaagttaaggggagggggtgtaagagccagcgaataagagagagagtaagagggagagagaagaagaggaagaagaggaggcggcggcagcggaggaggaggaggactagtgtggggtggaaaggaagagtgagcgagagcaagttaaggggagggggtgtaagagccagcgaattctttttctttttctattattattttgacgactcctgagttgcgcccatgctcttgtcagcttcgttttaggcgtagcatggccaggcagaagaaaatggggcaaagcgtgctccgggcggtcttctttttagtcctggggcttttgggtcattctcacggaggattccccaacaccatcagcataggtggacttttcatgagaaacacagtgcaggagcacagcgctttccgctttgccgtgcagttatacaacaccaaccagaacaccaccgagaagcccttccatttgaattaccacgtagatcacttggattcctccaatagtttttccgtgacaaatgctttctgctcccagttctcgagaggggtgtatgccatctttggattctatgaccagatgtcaatgaacaccctgacctccttctgtggggccctgcacacatcctttgttacgcctagcttccccactgacgcagatgtgcagtttgtcatccagatgcgcccagccttgaagggcgctattctgagtcttctgggtcattacaagtgggagaagtttgtgtacctctatgacacagaacgaggattttccatcctccaagcgattatggaagcagcagtgcaaaacaactggcaagtaacagcaaggtctgtgggaaacataaaggacgtccaagaattcaggcgcatcattgaagaaatggacaggaggcaggaaaagcgatacttgattgactgcgaagtcgaaaggattaacacaattttggaacaggttgtgatcctagggaaacactcaagaggttatcactacatgctcgctaacctgggttttactgatattttactggaaagagtcatgcatgggggagccaacattacaggtttccagattgtcaacaatgaaaaccctatggttcagcagttcatacagcgctgggtgaggctggatgaaagggaattccctgaagccaagaatgcaccactaaagtatacatctgcattgacacacgacgcaatactggtcatagcagaagctttccgctacctgaggaggcagcgagtagatgtgtcccggagaggaagtgctggagactgcttagcaaatcctgctgtgccctggagtcaaggaattgatattgagagagctctgaaaatggtgcaagtacaaggaatgactggaaatattcaatttgacacttatggacgtaggacaaattataccatcgatgtgtatgaaatgaaagtcagtggctctcgaaaagctggctactggaacgagtatgaaaggtttgtgcctttctcagatcagcaaatcagcaatgacagtgcatcctcagagaatcggaccatagtagtgactaccattctggaatcaccatatgtaatgtacaagaagaaccatgagcaactggaaggaaatgaacgatatgaaggctattgtgtagacctagcctatgaaatagccaaacatgtaaggatcaaatacaaattgtccatcgttggtgacgggaaatatggtgcaagggatccagagactaaaatatggaacggcatggttggggaacttgtctatgggagagctgatatagctgttgctccactcactataacattggtccgtgaagaagtcatagatttttcaaagccattcatgagcctgggcatctccatcatgataaagaagcctcagaaatcaaaaccaggcgtattctcatttctggatcccctggcttatgaaatctggatgtgcattgtctttgcttacattggagtcagcgtagttcttttcctagtcagcaggttcagtccttatgaatggcacttggaagacaacaatgaagaacctcgtgacccacaaagtcctcctgatcctccaaatgaatttggaatatttaacagtctttggttttccttgggtgcctttatgcagcaaggatgtgatatttctccaagatcactctccgggcgcattgttggaggggtttggtggttcttcaccctgatcataatttcttcctatactgccaatctcgctgctttcctgactgtggagaggatggtttctcccatagagagtgctgaagacttagctaaacagactgaaattgcatatgggaccctggactccggttcaacaaaagaatttttcagaagatccaaaattgctgtgtacgagaaaatgtggtcttacatgaaatcagcggagccatctgtgtttaccaaaacaacagcagacggagtggcccgagtgcgaaagtccaagggaaagttcgccttcctgctggagtcaaccatgaatgagtacattgagcagagaaaaccatgtgatacgatgaaagttggtggaaatctggattccaaaggctatggtgtggcaacccctaaaggctcagcattaggaaatgctgttaacctggcagtattaaaactgaatgagcaaggcctcttggacaaattgaaaaacaaatggtggtacgacaaaggagagtgcggcagcgggggcggtgactccaaggacaagaccagcgctctgagcctgagcaatgtggcaggcgttttctatatacttgtcggaggtctggggctggccatgatggtggctttgatagaattctgttacaaatcacgggcagagtccaaacgcatgaaactcacaaagaacacccaaaactttaagcctgctcctgccaccaacactcagaattatgctacatacagagaaggctacaacgtgtatggaacagagagtgttaagatctagggatcccttcccactggaggcatgtgatgagaggaaatcaccgaaaacgtggctgcttcaaggatcctgagccagatttcactctccttggtgtcgggcatgacacgaatattgctgatggtgcaatgacctttcaataggaaaaactgatttttttttccttcagtgccttatggaacactctgagactcgcgacaatgcaaaccatcattgaaatctttttgctttgcttgaaaaaaaataattaaaataaaaaccaacaaaaatggacatgcaagattccagtatgcgaaaaaaaatcttattaagtcaattcaacaaaagccattctttgataccactgcagagtatataaacaccatgttctttaatacacacacacacacacacacacacacacacacacatttaaattccaattcagcaaagaggcccatctaagctaaaaaaattaattcttcctgattaaaaagaaaaaatctgtctcccagtgtttgggaagacggactggcatttcttctaggatctgctgaccagatgtttttggtatttcctgttggtggtgatgttctgtgcactctatttcctttcaatgttgctgaaatgtgtatatctttagaatgtaaatgcaacacttaagaaaattcaaacactttggaaaagggactaaacagtgatttctctgtgttcttgaaatggttttgtgaaaatgctttgataacttcccactcaaagaagagatttacagagctttcgaaattgactttgtgtgtagcaagggacggggcactatcaggatacctcttggtgctttcctaaaatggatcccggggctttccaaggagcctggaatttcagctcacagatctgtttttcttgcttcagtgtgcattttaagtcaatagagctgagtatctagcattgaggtgagggaaatgctgcctatactcccagatgtgtttagaatatctcagaaacaacactgtgtttagctcggctttctctgctaagtatgcctttcaagtgtacaccacggagacaggaccgcgttgcaaggcgggacagcaggttcagaccacagttctcagtctgactttactcttgctaggtctgtcctactagctgttgcctgctaccgcccatggctctccatcggactgcatgtgtccttttctagtttgcaaagactaaaatgcattcccaaacctactgctaatctgagggcctcagcatcacttccagatccttgcttggagcagtctctctattgactctctcagatcgctccactgctccatgggctatcaagtaactaactgcatacctgccgttggcatcatcagaacagtccgaagaaatagtctccactcacta

SEQ ID NO: 427088 - DNA, 978 bp, Homo sapiens
cggacaggagccattgtgggcgagagcaagttaaggggagggggtgtaagagccagcgaataagagagagagtaagagggagagagaagaagaggaagaagaggaggcggcggcagcggaggaggaggaggactagtgtggggtggaaaggaagagtgagcgagagcaagttaaggggagggggtgtaagagccagcgaattctttttctttttctattattattttgacgactcctgagttgcgcccatgctcttgtcagcttcgttttaggcgtagcatggccaggcagaagaaaatggggcaaagcgtgctccgggcggtcttctttttagtcctggggcttttgggtcattctcacggaggattccccaacaccatcagcataggtggacttttcatgagaaacacagtgcaggagcacagcgctttccgctttgccgtgcagttatacaacaccaaccagaacaccaccgagaagcccttccatttgaattaccacgtagatcacttggattcctccaatagtttttccgtgacaaatgcttgtcctgctgaaagggactacctgccttggccaggaagcatcagggaaaacaattggacagctctgccgtgctgcaaagatcatgggctgctgcacctaaaatgttcaccaggtggggcccgccaaaactgggcctattgtatctggggcgttacaggtgaactgtaagatgagaacaagatcacaagtcagcactacctcctcccttcttgagttctcaactgagtgagcatcatggagggagaagaaagaaagaagttcagcctgggtgtgtgaagctgtaaagttgcaggttgaacccaaacccattttagagacagaagaaactaccctctggagataaaataaaaagatgaagctgagatgggacaggatcaaagttgatgaaatatcaagagaggttaataaaggaacattaatttattcctcaaa

SEQ ID NO: 427089 - DNA, 1494 bp, Homo sapiens
cggacaggagccattgtgggcgagagcaagttaaggggagggggtgtaagagccagcgaataagagagagagtaagagggagagagaagaagaggaagaagaggaggcggcggcagcggaggaggaggaggactagtgtggggtggaaaggaagagtgagcgagagcaagttaaggggagggggtgtaagagccagcgaattctttttctttttctattattattttgacgactcctgagttgcgcccatgctcttgtcagcttcgttttaggcgtagcatggccaggcagaagaaaatggggcaaagcgtgctccgggcggtcttctttttagtcctggggcttttgggtcattctcacggaggattccccaacaccatcagcataggtggacttttcatgagaaacacagtgcaggagcacagcgctttccgctttgccgtgcagttatacaacaccaaccagaacaccaccgagaagcccttccatttgaattaccacgtagatcacttggattcctccaatagtttttccgtgacaaatgctttctgctcccagttctcgagaggggtgtatgccatctttggattctatgaccagatgtcaatgaacaccctgacctccttctgtggggccctgcacacatcctttgttacgcctagcttccccactgacgcagatgtgcagtttgtcatccagatgcgcccagccttgaagggcgctattctgagtcttctgggtcattacaagtgggagaagtttgtgtacctctatgacacagaacgaggattttccatcctccaagcgattatggaagcagcagtgcaaaacaactggcaagtaacagcaaggtctgtgggaaacataaaggacgtccaagaattcaggcgcatcattgaagaaatggacaggaggcaggaaaagcgatacttgattgactgcgaagtcgaaaggattaacacaattttggaacaggttgtgatcctagggaaacactcaagaggttatcactacatgctcgctaacctgttccctttgatactgagctctatctggcaaagacatctttgtacatttacatggaacttcccctggtaacaatcctaaagtgagaagacttggatattccatgaatgctttaacgaagacctctcagaggtcaagatgtacatttcagagtggacaatgagctgcagaaaattctagcttgttgaaatcccggaaagaaacagaagatttcaccaggagtacaacccagagatgtgatctactcaggctagaagtggacatcccaatagagcaagactctctctaacatggcgctgtttgtcaacgttagtcccagaattagccatcatgtgtacaatctgtcagtcaagcagcctctcaatctctcatggtcttcttcttctgttctctactttccctttctttgttccgacattttttatgttctaaataaaaaattcaaatgctcaaagccacgtgttgtga

SEQ ID NO: 427090 - DNA, 2626 bp, Homo sapiens
ggaattccaatgaatgaatgaatgaatgagtgaatgaatcaacgaaggagtgagtcaaggcccgggaaccacagactccaagcctacgcagagcccgggaagggggattccggaggggcggggcctctttccggaagcgcccgccgggggcggggagggggcggggccatccgcgtgaggcgaccctgttggtccggaggggcggggcgaggaggaggaccggccttgggcggttcggctgcccacagtaaccgctgggtggacctggccagcgctccgaaccttgtcctcgctgcgcgccggcccctcggagccccacagcccgggaaggaggccgccgcgggccgggcgcccgctctgccaagcggacccgcaacccggaaaggcggcgcggcggagcctggagccggatcctgctcagaccgggccccggccggccagagccgcgggcatgtcggaggcgcggaaggggccggacgaggcggaggagagccagtacgactctggcattgagtctctgcgctctctgcgctccctacccgagtccacctcggctccagcctccgggccctcggacggcagcccccagccctgcacccatcctccgggacccgtcaaggaaccacaggagaaggaagacgcggatggggagcgggctgattccacctatggctcctcctcgctcacctacaccctgtccttgctggggggccccgaggctgaggacccggccccacgcctgccactcccccacgtgggggcgctgagccctcagcagctggaagcactcacttacatctccgaggacggagacacgctggtccacctggcagtgattcatgaggccccagcggtgctgctctgttgcctggctttgctgccccaggaggtcctggacattcaaaataacctttaccagacagcactccatctggctgtacatctggaccaaccgggcgcagttcgggcactggtgctgaagggggccagccgggcactacaggaccggcatggtgacacagcccttcatgtggcctgccagcgccagcacttggcctgtgcccgctgcctgctggaagggcggccagagccaggcagaggaacatctcactctctggacctccagctgcaaaactggcaaggtctggcttgtctccacattgccacccttcagaagaaccaaccactcatggaattgctgcttcggaatggagctgacattgatgtgcaggagggcaccagtggtaagacagcgctgcacctggctgtggaaacccaagagcggggcctggtacagttcctgctccaggctggtgcccaggtagatgcccgcatgctgaacgggtgcacacccctgcacctggcagctggccggggtctcatgggcatctcatccactctgtgcaaggcgggtgctgactccctgctgcggaatgtggaggatgagacgccccaggacctgactgaggaatcccttgtccttttgccctttgatgacctgaagatctcagggaaactgctgctgtgtaccgactgaagccaggcagggtctgggatcctcagggctccacctctccatctggaagccggagccataactgctgcagtttgggcccaggctatgtgctcttctggtgccctagggactgctgtggccagagcctggggccagccagtacagtcctgagccgaggaggagggactgcaagtggaagagagccagtctggaaggaagagctttccaggtggacagggcttcttggaagacccccaaagccccaggtatcctgggtgaagcctgtttgcctctcttgaaaatggcaggtgctcttgttttacccatgttgggtcagcctgaaactgccaaccagtaggaagcatggactctcctgagtgagaagagactgaaataggagcaagcagaaccctgagaggtgtcccatcttattgctgttgaggaccctgaaacaccgttgtttaaagacttcacacagaaggctctgaactgagccactggggaagggaagtttcagtaacatgacactaaaatggcagagacgttaaaaaaagtttttcccttctagagctgttttgcgcgcatgcatgtctgtgtgcattggggctttttagacaggcctgccctgtgactttgtggtagaggcagagagaaggaaattgtcccctgagcacggtagggccttgctgggtggggtcagaggccagtagttccaggcctttctctgtgtccagcacagacccttgtccttgctgtggaaatgatgagggatggagggacaagaggaagaatgagaggacacacgccctggagccctcaccactgccctgggggttgccatctggaggagcctggggataagggtaacccagggaggctgggcacgagggagctgactccacgtttttccccccgttcctcaccttcgagggccctgctaggtcacccctatgctggcatgaagagcatggggcaataaaccagcacagtctctgaccacttggagcgtctcatccagtgagagagacagccgttaaaagcataaacatccaaataaagatgcctttccaagttgcagtgggtgctatgaagggaaaagaatagtgggaa

SEQ ID NO: 427091 - DNA, 1966 bp, Homo sapiens
ggaattccaatgaatgaatgaatgaatgagtgaatgaatcaacgaaggagtgagtcaaggcccgggaaccacagactccaagcctacgcagagcccgggaagggggattccggaggggcggggcctctttccggaagcgcccgccgggggcggggagggggcggggccatccgcgtgaggcgaccctgttggtccggaggggcggggcgaggaggaggaccggccttgggcggttcggctgcccacagtaaccgctgggtggacctggccagcgctccgaaccttgtcctcgctgcgcgccggcccctcggagccccacagcccgggaaggaggccgccgcgggccgggcgcccgctctgccaagcggacccgcaacccggaaaggcggcgcggcggagcctggagccggatcctgctcagaccgggccccggccggccagagccgcgggcatgtcggaggcgcggaaggggccggacgaggcggaggagagccagtacgactctggcattgagtctctgcgctctctgcgctccctacccgagtccacctcggctccagcctccgggccctcggacggcagcccccagccctgcacccatcctccgggacccgtcaaggaaccacaggagaaggaagacgcggatggggagcgggctgattccacctatggctcctcctcgctcacctacaccctgtccttgctggggggccccgaggctgaggacccggccccacgcctgccactcccccacgtgggggcgctgagccctcagcagctggaagcactcacttacatctccgaggacggagacacacagcactccatctggctgtacatctggaccaaccgggcgcagttcgggcactggtgctgaagggggccagccgggcactacaggaccggcatggtgacacagcccttcatgtggcctgccagcgccagcacttggcctgtgcccgctgcctgctggaagggcggccagagccaggcagaggaacatctcactctctggacctccagctgcaaaactggcaaggtctggcttgtctccacattgccacccttcagaagaaccaaccactcatggaattgctgcttcggaatggagctgacattgatgtgcaggagggcaccagtggtaagacagcgctgcacctggctgtggaaacccaagagcggggcctggtacagttcctgctccaggctggtgcccaggtagatgcccgcatgctgaacgggtgcacacccctgcacctggcagctggccggggtctcatgggcatctcatccactctgtgcaaggcgggtgctgactccctgctgcggaatgtggaggatgagacgccccaggacctgactgaggaatcccttgtccttttgccctttgatgacctgaagatctcagggaaactgctgctgtgtaccgactgaagccaggcagggtctgggatcctcagggctccacctctccatctggaagccggagccataactgctgcagtttgggcccaggctatgtgctcttctggtgccctagggactgctgtggccagagcctggggccagccagtacagtcctgagccgaggaggagggactgcaagtggaagagagccagtctggaaggaagagctttccaggtggacagggcttcttggaagacccccaaagccccaggtatcctgggtgaagcctgtttgcctctcttgaaaatggcaggtgctcttgttttacccatgttgggtcagcctgaaactgccaaccagtaggaagcatggactctcctgagtgagaagagactgaaataggagcaagcagaaccctgagaggtgtcccatcttattgctgttgaggaccctgaaacaccgttgtttaaagacttcacacagaaggctctgaactgagccactggggaagggaagtttcagtaacatgacactaaaatggcagagacgttaaaaaaa

SEQ ID NO: 427092 - DNA, 1936 bp, Homo sapiens
ggaattccaatgaatgaatgaatgaatgagtgaatgaatcaacgaaggagtgagtcaaggcccgggaaccacagactccaagcctacgcagagcccgggaagggggattccggaggggcggggcctctttccggaagcgcccgccgggggcggggagggggcggggccatccgcgtgaggcgaccctgttggtccggaggggcggggcgaggaggaggaccggccttgggcggttcggctgcccacagtaaccgctgggtggacctggccagcgctccgaaccttgtcctcgctgcgcgccggcccctcggagccccacagcccgggaaggaggccgccgcgggccgggcgcccgctctgccaagcggacccgcaacccggaaaggcggcgcggcggagcctggagccggatcctgctcagaccgggccccggccggccagagccgcgggcatgtcggaggcgcggaaggggccggacgaggcggaggagagccagtacgactctggcattgagtctctgcgctctctgcgctccctacccgagtccacctcggctccagcctccgggccctcggacggcagcccccagccctgcacccatcctccgggacccgtcaaggaaccacaggagaaggaagacgcggatggggagcgggctgattccacctatggctcctcctcgctcacctacaccctgtccttgctggggggccccgaggctgaggacccggccccacgcctgccactcccccacgtgggggcgctgagccctcagcagctggaagcactcacttacatctccgaggacggagacacgctggtccacctggcagtgattcatgaggccccagcggtgctgctctgttgcctggctttgctgccccaggaggtcctggacattcaaaataacctttaccagacagcactccatctggctgtacatctggaccaaccgggcgcagttcgggcactggtgctgaagggggccagccgggcactacaggaccggcatggtgacacagcccttcatgtggcctgccagcgccagcacttggcctgtgcccgctgcctgctggaagggcggccagagccaggcagaggaacatctcactctctggacctccagctgcaaaactggcaaggtctggcttgtctccacattgccacccttcagaagaaccaaccactcatggaattgctgcttcggaatggagctgacattgatgtgcaggagggcaccagtggtaagacagcgctgcacctggctgtggaaacccaagagcggggcctggtacagttcctgctccaggctggtgcccaggtagatgcccgcatgctgaacgggtgcacacccctgcacctggcagctggccggggtctcatgggcatctcatccactctgtgcaaggcgggtgctgactccctgctgcggaatgtggaggatgagacgccccaggacctgactgaggaatcccttgtccttttgccctttgatgacctgaagatctcagggaaactgctgctgtgtaccgactgaagccagtacagtcctgagccgaggaggagggactgcaagtggaagagagccagtctggaaggaagagctttccaggtggacagggcttcttggaagacccccaaagccccaggtatcctgggtgaagcctgtttgcctctcttgaaaatggcaggtgctcttgttttacccatgttgggtcagcctgaaactgccaaccagtaggaagcatggactctcctgagtgagaagagactgaaataggagcaagcagaaccctgagaggtgtcccatcttattgctgttgaggaccctgaaacaccgttgtttaaagacttcacacagaaggctctgaactgagccactggggaagggaagtttcagtaacatgacactaaaatggcagagacgttaaaaaaa

SEQ ID NO: 427093 - DNA, 680 bp, Homo sapiens
caacaggtttccctgggtcccctttcccaagtcaccttttcccatgtcctctgatcttgcttctctccattctccttctcagtcccttgtccttttgccctttgatgacctgaagatctcagggaaactgctgctgtgtaccgactgaagccaggcagggtctgggatcctcagggctccacctctccatctggaagccggagccataactgctgcagtttgggcccaggctatgtgctcttctggtgccctagggactgctgtggccagagcctggggccagccagtacagtcctgagccgaggaggagggactgcaagtggaagagagccagtctggaaggaagagctttccaggtggacagggcttcttggaagacccccaaagccccaggtatcctgggtgaagcctgtttgcctctcttgaaaatggcaggtgctcttgttttacccatgttgggtcagcctgaaactgccaaccagtaggaagcatggactctcctgagtgagaagagactgaaataggagcaagcagaaccctgagaggtgtcccatcttattgctgttgaggaccctgaaacaccgttgtttaaagacttcacacagaaggctctgaactgagccactggggaagggaagtttcagtaacatgacactaaaatggcagagacgttaaaaaaa

SEQ ID NO: 427094 - DNA, 2069 bp, Homo sapiens
ggaattccaatgaatgaatgaatgaatgagtgaatgaatcaacgaaggagtgagtcaaggcccgggaaccacagactccaagcctacgcagagcccgggaagggggattccggaggggcggggcctctttccggaagcgcccgccgggggcggggagggggcggggccatccgcgtgaggcgaccctgttggtccggaggggcggggcgaggaggaggaccggccttgggcggttcggctgcccacagtaaccgctgggtggacctggccagcgctccgaaccttgtcctcgctgcgcgccggcccctcggagccccacagcccgggaaggaggccgccgcgggccgggcgcccgctctgccaagcggacccgcaacccggaaaggcggcgcggcggagcctggagccggatcctgctcagaccgggccccggccggccagagccgcgggcatgtcggaggcgcggaaggggccggacgaggcggaggagagccagtacgactctggcattgagtctctgcgctctctgcgctccctacccgagtccacctcggctccagcctccgggccctcggacggcagcccccagccctgcacccatcctccgggacccgtcaaggaaccacaggagaaggaagacgcggatggggagcgggctgattccacctatggctcctcctcgctcacctacaccctgtccttgctggggggccccgaggctgaggacccggccccacgcctgccactcccccacgtgggggcgctgagccctcagcagctggaagcactcacttacatctccgaggacggagacacgctggtccacctggcagtgattcatgaggccccagcggtgctgctctgttgcctggctttgctgccccaggaggtcctggacattcaaaataacctttaccagacagcactccatctggctgtacatctggaccaaccgggcgcagttcgggcactggtgctgaagggggccagccgggcactacaggaccggcatggtgacacagcccttcatgtggcctgccagcgccagcacttggcctgtgcccgctgcctgctggaagggcggccagagccaggcagaggaacatctcactctctggacctccagctgcaaaactggcaaggtctggcttgtctccacattgccacccttcagaagaaccaaccactcatggaattgctgcttcggaatggagctgacattgatgtgcaggagggcaccagtggtaagacagcgctgcacctggctgtggaaacccaagagcggggcctggtacagttcctgctccaggctggtgcccaggtagatgcccgcatgctgaacgggtgcacacccctgcacctggcagctggccggggtctcatgggcatctcatccactctgtgcaaggcgggtgctgactccctgctgcggaatgtggaggatgagacgccccaggacctgactgaggaatcccttgtccttttgccctttgatgacctgaagatctcagggaaactgctgctgtgtaccgactgaagccaggcagggtctgggatcctcagggctccacctctccatctggaagccggagccataactgctgcagtttgggcccaggctatgtgctcttctggtgccctagggactgctgtggccagagcctggggccagccagtacagtcctgagccgaggaggagggactgcaagtggaagagagccagtctggaaggaagagctttccaggtggacagggcttcttggaagacccccaaagccccaggtatcctgggtgaagcctgtttgcctctcttgaaaatggcaggtgctcttgttttacccatgttgggtcagcctgaaactgccaaccagtaggaagcatggactctcctgagtgagaagagactgaaataggagcaagcagaaccctgagaggtgtcccatcttattgctgttgaggaccctgaaacaccgttgtttaaagacttcacacagaaggctctgaactgagccactggggaagggaagtttcagtaacatgacactaaaatggcagagacgttaaaaaaa

SEQ ID NO: 427095 - DNA, 2123 bp, Homo sapiens
ggaattccaatgaatgaatgaatgaatgagtgaatgaatcaacgaaggagtgagtcaaggcccgggaaccacagactccaagcctacgcagagcccgggaagggggattccggaggggcggggcctctttccggaagcgcccgccgggggcggggagggggcggggccatccgcgtgaggcgaccctgttggtccggaggggcggggcgaggaggaggaccggccttgggcggttcggctgcccacagtaaccgctgggtggacctggccagcgctccgaaccttgtcctcgctgcgcgccggcccctcggagccccacagcccgggaaggaggccgccgcgggccgggcgcccgctctgccaagcggacccgcaacccggaaaggcggcgcggcggagcctggagccggatcctgctcagaccgggccccggccggccagagccgcgggcatgtcggaggcgcggaaggggccggacgaggcggaggagagccagtacgactctggcattgagtctctgcgctctctgcgctccctacccgagtccacctcggctccagcctccgggccctcggacggcagcccccagccctgcacccatcctccgggacccgtcaaggaaccacaggagaaggaagacgcggatggggagcgggctgattccacctatggctcctcctcgctcacctacaccctgtccttgctggggggccccgaggctgaggacccggccccacgcctgccactcccccacgtgggggcgctgagccctcagcagctggaagcactcacttacatctccgaggacggagacacgctggtccacctggcagtgattcatgaggccccagcggtgctgctctgttgcctggctttgctgccccaggaggtcctggacattcaaaataacctttaccagacagcactccatctggctgtacatctggaccaaccgggcgcagttcgggcactggtgctgaagggggccagccgggcactacaggaccggcatggtgacacagcccttcatgtggcctgccagcgccagcacttggcctgtgcccgctgcctgctggaagggcggccagagccaggcagaggaacatctcactctctggacctccagctgcaaaactggcaaggtctggcttgtctccacattgccacccttcagaagaaccaaccactcatggaattgctgcttcggaatggagctgacattgatgtgcaggagggcaccagtggtaagacagcgctgcacctggctgtggaaacccaagagcggggcctggtacagttcctgctccaggctggtgcccaggtagatgcccgcatgctgaacgggtgcacacccctgcacctggcagctggccggggtctcatgggcatctcatccactctgtgcaaggcgggtgctgactccctgctgcggaatgtggaggatgagacgccccaggacctgactgaggaatcccttgtccttttgccctttgatgacctgaagatctcagggaaactgctgctgtgtaccgactgaagccaggcagggtctgggatcctcagggctccacctctccatctggaagccggagccataactgctgcagtttgggcccaggctatgtgctcttctggtgccctagggactgctgtggccagagcctggggccagccagtacagtcctgagccgaggaggagggactgcaagtggaagagagccagtctggaaggaagagctttccaggtggacagggcttcttggaagacccccaaagccccaggtatcctgggtgaagcctgtttgcctctcttgaaaatggcaggtgctcttgttttacccatgttgggtcagcctgaaactgccaaccagtaggaagcatggactctcctgagtgagaagagactgaaataggagcaagcagaaccctgagaggtgtcccatcttattgctgttgaggaccctgaaacaccgttgtttaaagacttcacacagaaggctctgaactgagccactggggaagggaagtttcagtaacatgacactaaaatggcagagacgttaaaaaaaaaaatggttataagatagattaaaaaaactttagggggggcccggtccccaatg

SEQ ID NO: 427096 - DNA, 1306 bp, Homo sapiens
  misc_feature (1236)..(1236): n is a, c, g, or t
  misc_feature (1291)..(1291): n is a, c, g, or t
ggaattccaatgaatgaatgaatgaatgagtgaatgaatcaacgaaggagtgagtcaaggcccgggaaccacagactccaagcctacgcagagcccgggaagggggattccggaggggcggggcctctttccggaagcgcccgccgggggcggggagggggcggggccatccgcgtgaggcgaccctgttggtccggaggggcggggcgaggaggaggaccggccttgggcggttcggctgcccacagtaaccgctgggtggacctggccagcgctccgaaccttgtcctcgctgcgcgccggcccctcggagccccacagcccgggaaggaggccgccgcgggccgggcgcccgctctgccaagcggacccgcaacccggaaaggcggcgcggcggagcctggagccggatcctgctcagaccgggccccggccggccagagccgcgggcatgtcggaggcgcggaaggggccggacgaggcggaggagagccagtacgactctggcattgagtctctgcgctctctgcgctccctacccgagtccacctcggctccagcctccgggccctcggacggcagcccccagccctgcacccatcctccgggacccgtcaaggaaccacaggagaaggaagacgcggatggggagcgggctgattccacctatggctcctcctcgctcacctacaccctgtccttgctggggggccccgaggctgaggacccggccccacgcctgccactcccccacgtgggggcgctgagccctcagcagctggaagcactcacttacatctccgaggacggagacacgctggtccacctggcagtgattcatgaggccccagcggtgctgctctgttgcctggctttgctgccccaggaggtcctggacattcaaaataacctttaccagacagcactccatctggctgtacatctggaccaaccgggcgcagttcgggcactggtgctgaagggggccagccgggcactacaggaccggcatggtgacacagcccttcatgtggcctgccagcgccagcacttggcctgtgcccgctgcctgctggaagggcggccagagccaggcagaggaacatctcactctctggacctccagctgcaaaactggcaaggtctggcttgtctccacattgccacccttcagaagaaccaaccactcatggaattgctgcttcggaatggagctgacattgatgtgcaggaggnacagtggtaaaaacctgcactggctgtgaaaccaaaacgggctggtaattctgcncagctgtgccagtaa

SEQ ID NO: 427097 - DNA, 1265 bp, Homo sapiens
gtggaggttgtaatgagccaagatcactccaccctgggccacagaggaagactccgtctcaaaaaaacaaaaattcccataaaaaaaatagatgtttctcacatgttgagcatatatggatttcatttttaatatgattgtagaaacattagatttaaagcatattgaaaaagaaaacagtatattctttaggagcttcaaaaaagggttttggtttagttcaaagggtgaaagaagatcttttattattttggtaaataacttctaaggaaacaaaccaccctcacatgcactatctcatttgtatttctgtcaattctgaaaggccagcatttggccagtattatttgaatctgtattgtattttttaaccagaagaatgaaggtttatagcttcattcttttggaagaggaggctggagaccacaggttaaatgcaggtgcatcgctcttggccggccctggcagggtcctttctccctccttttacactcgcagacaagcttgtggatgctcaataaggacagctgccgtttggacagagattaatcatttatttgtgaaggttttttctgccttgctttcttgttcttttttaaatcttcacattgttttgatcccaaaatgtttgtgttgtccttactcaaaactaggaaaaacaattatgtggtaagaggctcagagccacttacttaaatctcaactagatttatttgtgagaacatctgttttctgatatttagacacttcctcttccattgctgtttcctatgactcatgcacagttatttgttcaggtttcatggaatttcccaagtgtatttacctttgtttggtttttaaaatgtaaattatattgccccaataaatgagtatgtgtgtcagggggactgtggctgggtcattgcatgtggaaggggagtttacagaagagaactcctagaagagctttacttaactatgaaaattttcaaagaataggacatttctaataagtccctaagagtgtcctgaaggacatgttttggttctgaaacatagtttctataatcatccttaaaaaataacttgtttctgcttaataggctttactatgaatatacctccatatattattgagttagaatgtgagaaaaggagattaatttttgaagtacaaatatagtgagttagtgagtgtaggcatcctgactgcctagtcataactttgatgaagtagaaataccaacatcctcaatatgaagatatgcagcagccccaccaaa

SEQ ID NO: 427098 - DNA, 252 bp, Homo sapiens
aaaacattcaatgactccttgataccatcaggataaagctttaaaaatttcccaaagtgctgagattacaggcatgagcaaccacacctggccgatacatacctatattaaacattagtatgttcatgttagaataatgtaccttttgaatttcataaacttggagaacatttatattgatgatggatgaaagaactttcttggatggatgaagagagtaacgctgtgaaacaaccagcaggtggcgaaaac

SEQ ID NO: 427099 - DNA, 455 bp, Homo sapiens
ataatcaatctgatgtaccatttccatgtaaagggaaaaaaaattgaataaaagtggccctttacttagagtaactaagcaagactctcctgaaattactccactagctttgattttaagtattaaggcagaattaggctgggtgtggtggctcacgccagtaatcccagcactttgggaggctgagacaggcgaatcacgaggtcaggagttcgagaccagcctggccaacatggtgaaaccccgtctctatcccaaagtgctgagattacaggcatgagcaaccacacctggccgatacatacctatattaaacattagtatgttcatgttagaataatgtaccttttgaatttcataaacttggagaacatttatattgatgatggatgaaagaactttcttggatggatgaagagagtaacgctgtgaaacaaccagcaggtggcgaaaac

SEQ ID NO: 427100 - DNA, 1218 bp, Homo sapiens
aaactgcctgtcatagtctgctctctggtctccagtaatttacatacctccatgtcgaaaatacactgaccccctcccaggtctcatcccattgtagcgttagctcagagtccagagttttattacctaaattaggtccggttggatgagccccccaggtatagttccttaagcacagctcctcaagtacagttcttctcaatctgtgaacttgtggaaccaaagagacaagttatcctttccccatgtacctagcatacaatggtgagacaggcattagataaccaatatacacatttctgtacataaaaggggagaatgggaggcacaaaaaggagtcattgattttatttgctgttccaaaatccaggaaatgttggagtttcttttatcaggcctcaaagcagaagaataattctccgtggttcttggctctaccctctagactcttggttttgtcttctgagtcttcctttttcatcaaagctagagtgtgtttttacctgagttcttttctcaggctgcttctttccagtagaattttaggggaactagtggtctctattttgtactgtttctgtcctttttgatccaagatggcagtgtttctactgatacagaagattttgtgggcctcctgtgattctccttgggatttactccattagacaaaagccacactcataaatatcttctttatgagacctaagcttcttacagactctgtttttcggttgaaaggatctgtgaaacataatcttctgaacagccttttgtatgactgaatagcacaatcagccctccgtatccacaggttccacatcccagattcaaccaactgtggactgaaaatacttgagagcctggtgtggtggctcatgcctgtaatcccaccactttgggaggctgaggtgggaggattgcttgaggcagtttgagaccagcctggtcaatataacgagaccccatccctttgaaaaaaaaaaagaaagaaacgaaaaaatactggaaaaaaaaaaaaaagtcgtgaaaatgttatgttgttgctgatatgtactgtacagttaggcctgtacttaacatgtacagacttttcttgtcattatttcctgaacaatatagtataacaactatttacatagcatttgcattgtattagttatcataaatatctaggaatgatttaaagtatatggagggccagaatattagggtcac

SEQ ID NO: 427101 - DNA, 852 bp, Homo sapiens
gcccctttctccatataatcttatctctcttttcaagtccttggaaacctctataatttgattgcatcataataaattaccccaaagattagtggcttaaaataacaaacatatatcatactttctgtgggtcaggaatccaggcccagcttagctgggtcctctggctcaagatttctcatgaggtggcatttaagctgttggccagggctggggtctcatctgaaggctcaaacaggaagatctgcttttaagcttatttatgtggttactggtaggattctgttccttgtgggttgctgaactgagggccttagttccttgctggctgttgtctgggggcttccctcagttctttgctacatggacttctccataggacagctcagaacatggcacctgggctatctgacaagtgaacaagagagcatgtgcctatgcagaaaccatggcctcttataacttaatctcagaattgacattctacttgtgctacattctgttcactaaatgcagcccacactcaagaggaaggaattacccatgggtgtgaataccaggaggtgcagggatcattgtgagccatcttagaaactgcctgtcatagtctgctctctggtctccagtaatttacatacctccatgtcgaaaatacactgaccccctcccaggtctcatcccattgtagcgttagctcagagtccagagttttattacctaaattaggtccggttggatgagccccccaggtatagttccttaagcacagctcctcaagtacagttcttctcaatctgtgaacttgtggaaccaaagagacaagttatcctttccccatgtacctagcataca

SEQ ID NO: 427102 - DNA, 1800 bp, Homo sapiens
cttgtatgtatagcagcatacttggacatgaaacacacttctggttagattccagtcaagttctataggtgttattggtaggcagaaaggctgttgtagaattcttctggtgattttcagtccctgacccaggtatattgtcctttgagtcccagattaactaactatagcagctaagcatttgaatcagacttctcatagcaatgttatgggctgtctgatatattcaggatttgttgagcagataagctgtgtgtgatcttactcattctcagccatgccgcagacatacccatttccctttagtaattttttaatacagagaatgctattaactgttactggatatcaaataattttatttttctaatagtattttccaaatatttcttaaaattcttaaaatttaggttaaagtttgctggtctcttacatttaataaagctgggacttgaagacttaccatagttttcaactgcctttgcaagttcataaacttctaagggtaaaaagtgaataagataaattcagagttttaaggtaaaggctttatattagctttttttttttttaaaggttttttgtggggtttttttgttttttttttttttgggatggagtctcgctctgtcacccatgattgtgccacttcaccctgggcaacagagaaagaccctgtctcaataaaaaagaagagaaaaactggagtgagaactctcctcctctcataatcatagtatccacgttaggaaaatgcttctgagagtaacttaaagtactgtgtgtgcatcttccttcaaaaccttgcttttttctccgtttttgtaaggtgagaaagggaaaaaccttcaccgtagaaatactgtcttgagattaagatacaaataaaacatgttaaacctccatctaaagacattgcaacttattaaaacagaaaaatgtacctttgttatgtctttccaaatatccacacccacaccctgttcagctttgttaataatacagagatcagaaatgtgaagcacaaatgctgcttctccccctcctgttcccatgtcagagatggagaagaaagcacagtgagctgttcaccagtccagcggtgacctcggagtcctttgtaacagtgtttccaataacttctgccaataaaacagaatttgagttagaacctatctgctgtccctcaactagtgtctgatagctgagaatgtaattcgtttgtgtgtctattagaaaattaggcaggcaccacagacagtagcaacataaaggaacctgcttagaagaggtttttatggtgtgattgtgtttttttttttttaatttttgtttcctgaagtagaatccatagctcaaaacaagttttaagcctgagaaaatataatttgaggtgttttttatgctcctaatgaaaagatgaatgaatgcatcattaaaccttaacagtagagcagaatttcactgttacaaaccacatgggttctcctggttgtgctgctgttctctacctgtgtgtcactgagtttgagcatcattattgtttgaatcagaggacccactggaatcaaggcttcttggaattgcgcaagaatctgagaaaacttcaatctttaccagcatttcttaatgctttccatgacttttgtgcaattatataagttcagtttagacaaaatgctgttactttttaaggcattactaataactgaaaatagttacgtcattgcccatcaagggaaaagcacttgtaactgtcatttaaaaaaaataaaactataaaacaatataaaaaaaaat

SEQ ID NO: 427103 - DNA, 1419 bp, Homo sapiens
gtcaactagtacacgactctggtctgggggcgtggtcatgctgtaatcccagcagtttgggaagctgaggtgggtgtgatcacaatggtcaggagatcaagaccagcgcgggtctgggcaacatggagagaccttgtctcaacaaaaaaatttaaagttagccaggtgtggtggtttgcacctatagtcccagctactcaggaggctgaggtgggaggatcgcttgagcttaggaggtcaaggctgcagtgagccatgattgtgccacttcaccctgggcaacagagaaagaccctgtctcaataaaaaagaagagaaaaactggagtgagaactctcctcctctcataatcatagtatccacgttaggaaaatgcttctgagagtaacttaaagtactgtgtgtgcatcttccttcaaaaccttgcttttttctccgtttttgtaaggtgagaaagggaaaaaccttcaccgtagaaatactgtcttgagattaagatacaaataaaacatgttaaacctccatctaaagacattgcaacttattaaaacagaaaaatgtacctttgttatgtctttccaaatatccacacccacaccctgttcagctttgttaataatacagagatcagaaatgtgaagcacaaatgctgcttctccccctcctgttcccatgtcagagatggagaagaaagcacagtgagctgttcaccagtccagcggtgacctcggagtcctttgtaacagtgtttccaataacttctgccaataaaacagaatttgagttagaacctatctgctgtccctcaactagtgtctgatagctgagaatgtaattcgtttgtgtgtctattagaaaattaggcaggcaccacagacagtagcaacataaaggaacctgcttagaagaggtttttatggtgtgattgtgtttttttttttttaatttttgtttcctgaagtagaatccatagctcaaaacaagttttaagcctgagaaaatataatttgaggtgttttttatgctcctaatgaaaagatgaatgaatgcatcattaaaccttaacagtagagcagaatttcactgttacaaaccacatgggttctcctggttgtgctgctgttctctacctgtgtgtcactgagtttgagcatcattattgtttgaatcagaggacccactggaatcaaggcttcttggaattgcgcaagaatctgagaaaacttcaatctttaccagcatttcttaatgctttccatgacttttgtgcaattatataagttcagtttagacaaaatgctgttactttttaaggcattactaataactgaaaatagttacgtcattgcccatcaagggaaaagcacttgtaactgtcatttaaaaaaaataaaactataaaacaatataaaaaaaaat

SEQ ID NO: 427104 - DNA, 1248 bp, Homo sapiens
gttttgatacatatataatgatcagatcagaacaattagcatatccatcacattgaacatttatcatttatttgtgttgagcccatgattgtgccacttcaccctgggcaacagagaaagaccctgtctcaataaaaaagaagagaaaaactggagtgagaactctcctcctctcataatcatagtatccacgttaggaaaatgcttctgagagtaacttaaagtactgtgtgtgcatcttccttcaaaaccttgcttttttctccgtttttgtaaggtgagaaagggaaaaaccttcaccgtagaaatactgtcttgagattaagatacaaataaaacatgttaaacctccatctaaagacattgcaacttattaaaacagaaaaatgtacctttgttatgtctttccaaatatccacacccacaccctgttcagctttgttaataatacagagatcagaaatgtgaagcacaaatgctgcttctccccctcctgttcccatgtcagagatggagaagaaagcacagtgagctgttcaccagtccagcggtgacctcggagtcctttgtaacagtgtttccaataacttctgccaataaaacagaatttgagttagaacctatctgctgtccctcaactagtgtctgatagctgagaatgtaattcgtttgtgtgtctattagaaaattaggcaggcaccacagacagtagcaacataaaggaacctgcttagaagaggtttttatggtgtgattgtgtttttttttttttaatttttgtttcctgaagtagaatccatagctcaaaacaagttttaagcctgagaaaatataatttgaggtgttttttatgctcctaatgaaaagatgaatgaatgcatcattaaaccttaacagtagagcagaatttcactgttacaaaccacatgggttctcctggttgtgctgctgttctctacctgtgtgtcactgagtttgagcatcattattgtttgaatcagaggacccactggaatcaaggcttcttggaattgcgcaagaatctgagaaaacttcaatctttaccagcatttcttaatgctttccatgacttttgtgcaattatataagttcagtttagacaaaatgctgttactttttaaggcattactaataactgaaaatagttacgtcattgcccatcaagggaaaagcacttgtaactgtcatttaaaaaaaataaaactataaaacaatataaaaaaaaat

SEQ ID NO: 427105 - DNA, 661 bp, Homo sapiens
cttgtatgtatagcagcatacttggacatgaaacacacttctggttagattccagtcaagttctataggtgttattggtaggcagaaaggctgttgtagaattcttctggtgattttcagtccctgacccaggtatattgtcctttgagtcccagattaactaactatagcagctaagcatttgaatcagacttctcatagcaatgttatgggctgtctgatatattcaggatttgttgagcagataagctgtgtgtgatcttactcattctcagccatgccgcagacatacccatttccctttagtaattttttaatacagagaatgctattaactgttactggatatcaaataattttatttttctaatagtattttccaaatatttcttaaaattcttaaaatttaggttaaagtttgctggtctcttacatttaataaagctgggacttgaagacttaccatagttttcaactgcctttgcaagttcataaacttctaagggtaaaaagtgaataagataaattcagagttttaaggtaaaggctttatattagctttttttttttttaaaggttttttgtggggtttttttgttttttttttttttgggatggagtctcgctctgtcacccaggctggagtgcagtggcacgatct

SEQ ID NO: 427106 - DNA, 2342 bp, Homo sapiens
gttttgatacatatataatgatcagatcagaacaattagcatatccatcacattgaacatttatcatttatttgtgttgagcctttagttcttttttttttttgagatagagtctcactctgtcacccaggctggagtacagtggtgtgatcttggctcactgcaacctccacccaccggcttcaaccaattctcctgcctcagcctccctagtaactgggattacaggcacctgccaccacacccaatttttgtatttttagtagagacggggtttcaccatcttggccaggccaggctggtcttgatctcctgaccttgtgatccacccacctcagcttcccaaactgctgggattacaggcatgagccacggcccccagccagagacagtcttgctttgtcgccaggctggagtgtagtggcgccatcttggctcactgcaacctccaactccctggttcaagcagttctcctgcctcagcctcccaagtagctgggattacaggcacgcaccaccatgcccagctaatttttgtatttttagtagagacagggtttcaccatgttggccaggatggtcttgatctcctgacctcgtgatctgcccactttggcctcccaaagtgctgggattacaggtgtgagccaccgtgcccagccgagcctttagttctaagtataataaataatatatataccaggcattcctattaaaaatcttaacttaaaaaaaattactcaaatgttactactggaatttttctccctgaattgaagatacatggttagatcattaacaataccacctaaatgaaggaaacatatctggatatccagtgtcacatacttttatgtatttatttcaggaattactattttgtcaccataattaggaaacagactgtgttctttatttgaaacacaacagtataaatactatagtaaagttgggtgcagtggatcacggctgtaatcccagcactttgggagaccgaggagggatggtcacttgagcccaggagtttgagaccagcctaggcaacatggagagaccttgtctcaacaaaaaaatttaaagttagccaggtgtggtggtttgcacctatagtcccagctactcaggaggctgaggtgggaggatcgcttgagcttaggaggtcaaggctgcagtgagccatgattgtgccacttcaccctgggcaacagagaaagaccctgtctcaataaaaaagaagagaaaaactggagtgagaactctcctcctctcataatcatagtatccacgttaggaaaatgcttctgagagtaacttaaagtactgtgtgtgcatcttccttcaaaaccttgcttttttctccgtttttgtaaggtgagaaagggaaaaaccttcaccgtagaaatactgtcttgagattaagatacaaataaaacatgttaaacctccatctaaagacattgcaacttattaaaacagaaaaatgtacctttgttatgtctttccaaatatccacacccacaccctgttcagctttgttaataatacagagatcagaaatgtgaagcacaaatgctgcttctccccctcctgttcccatgtcagagatggagaagaaagcacagtgagctgttcaccagtccagcggtgacctcggagtcctttgtaacagtgtttccaataacttctgccaataaaacagaatttgagttagaacctatctgctgtccctcaactagtgtctgatagctgagaatgtaattcgtttgtgtgtctattagaaaattaggcaggcaccacagacagtagcaacataaaggaacctgcttagaagaggtttttatggtgtgattgtgtttttttttttttaatttttgtttcctgaagtagaatccatagctcaaaacaagttttaagcctgagaaaatataatttgaggtgttttttatgctcctaatgaaaagatgaatgaatgcatcattaaaccttaacagtagagcagaatttcactgttacaaaccacatgggttctcctggttgtgctgctgttctctacctgtgtgtcactgagtttgagcatcattattgtttgaatcagaggacccactggaatcaaggcttcttggaattgcgcaagaatctgagaaaacttcaatctttaccagcatttcttaatgctttccatgacttttgtgcaattatataagttcagtttagacaaaatgctgttactttttaaggcattactaataactgaaaatagttacgtcattgcccatcaagggaaaagcacttgtaactgtcatttaaaaaaaataaaactataaaacaatataaaaaaaaat

SEQ ID NO: 427107 - DNA, 6666 bp, Homo sapiens
tgctggccagaaggttcggttgcgcgtgtgccatggactcagccgcccggtgatattgacaataggagagagaaaggggcattgactgggacccaccgcgggtagcgaaaggtggctctggcagcggcggctccagctcctgcggctcctcctccttattctgtccccttctcttgctgccgctgcagatccagtcttcctccctcccttccccccctccccacgtcgtcgccgccgccgccgggtccggggcaacgagctgaggcgccgcccgccaggaatgtgagcgaggagccaccggcggagccgcaacggggtcggtgccgatttgatgggacgggcccgcgggggaggatcgtgaggccgccgccgccaccggaacgctgaggttcgggtccggccgtgaggcctagaggctccgccgccgcggaaccggagggaccccgtaccggacagccgtcgccccaggctccccgcagctgcccggacctccccctgcacgtcccggtcccgccgcccgcccccgctgcggccacctcgcccgtctcccgcccctccaagccacagatcatcttcggattcttccccagaagcttcaagtagggatatgtcctcagcaccaactactcctccatcagtggataaagtagacggattttctcggaagtccgtcagaaaagccagacagaagaggtcgcaaagttcctcacagtttaggtctcaaggcaagcctattgagttaacacctctgccgctgctaaaagacgttccatcctcagagcagcctgaactgttcctaaagaaacttcagcagtgctgtgtcatttttgacttcatggacacgctatctgatcttaaaatgaaagaatacaagcgctccactcttaatgaactggtggactacattacaataagcagaggctgtttgacagagcagacttaccctgaagtagttagaatggtatcttgcaatatattcagaactctccctcctagtgacagcaatgaatttgatccagaagaagatgaacctacccttgaggcatcgtggccacacttacagcttgtatatgaatttttcatacgatttttggaaagccaagaattccaacccagcattgccaaaaaatatatagatcagaaatttgtattacagcttctggagctatttgacagcgaagaccctcgggaacgggactacttaaaaacagtcttacacagaatttatggcaagtttcttggtcttagagcatttatccgaaaacagattaacaatatttttctaaggtttgtttatgaaacagaacacttcaatggtgtagctgaactgctggaaatattaggaagtattatcaatggctttgctttacctcttaaggcagaacacaaacagtttctggtgaaagtattgatccctttacacactgtcaggagcttatcactcttccatgcacagctggcatattgtatagtacagtttctggagaaagatccttcactcacagaaccagttattagggggttaatgaaattttggcctaaaacatgtagtcaaaaagaggtcatgttccttggggaactggaagaaatattggatgtgattgaaccttcacaatttgttaaaatccaagaacctttgtttaaacaaatcgccaagtgtgtatctagcccccattttcaggtggcagaaagagcactctattattggaataatgaatacatcatgagtttgatagaagaaaactctaacgtcatccttcccatcatgttttccagcctttataggatttcaaaagaacattggaatccggctattgtggcgttggtgtacaatgtgttgaaggcatttatggaaatgaacagcaccatgtttgacgagctgacagccacatacaagtcagatcgtcagcgtgagaaaaagaaagaaaaggagcgtgaagaattgtggaaaaaattggaggatctggagttaaagagaggtcttagacgtgatggaataattccaacttaacaaaaacaatgacaacaacattactaacctgtggagtcacacgtttatgtagtagaagatggagcaacagttttctgtattgtgcaactttacagtagatttcacctttgtttcattattacagcagcactgtatatacctgtctctaagtaaaggaaaaaacaaaataaggacttcaatccaaagtttggacagtagatggacttctcagaactttgcaaacataatcattgttctcaccctcttttaaaaaaaaaaaatcggtcttcaaagatctgttgatgaaattgctatgttaaaattccattatcgggagttccttatttatcactagcagagagtatgatacaattttcaaatgtgaacaatcttaaatttagcttgtctttctgctaagctgttaaatgtatttatagtaaaggaagaaaaaaagactgtcatttccttataagtttgtgtaacatcctcctctggataacttgactgtaatttaacatctttttcttttgcacatcttcctgagttgaatgtccacgtggaatggggtcatgaattataaaagtccctgataaaagttttgtttactggggtgaacatctttccagtaaccaggtagtcctggtactcctttagttttaaaattaggagttaagagagaagaggtgataaacatagtagggaagggaatatcggattcatgcatcagtttatggtgaatccaaatcaatgtcttgaatcctttgaaaacaggcactgggacatcacaggcttcagtacctgaccagtattagttgcatatatcattgaacacacataccagagatgttttagaaatgtgagaaaaacatccttttggaccatttgaaataagaaagacaaacactaaacaatacaaccatgaaattgatcaccgggattgcaaatctaattgggaaaagagttgagcaaacagcttggactgtttggagttgttgccttactttttaatatgtatttataaagtattccagcaaaagaggatgtagcctctgggaaaaaacaaacatgttacagtgttttttgtagattctcgttctatatctcatcacagcgccagccctgtttttagccggaaaggattcaggataaacattattatgcattctgaattggatgcatattcctaactactgtatttgttaccaaaagtggttctacaaatgctactgaaaaaaatctggaaattcctaatgtcctgagtattaataataaagtttaaaaatgcttttatatcaaaggtgcatcgtgaccaaattgtttaagaaaaaaaaacaaaaaaaaaaaatctagggctgtattttatatatatatatatatatatatatatatatatatcttattggctctctgctttgtatttaaatgaagaatcttacatcttgggtaggtaaactgctgataaaatttgtgtacagtatgtacttacctaatgcagttgcattattacgtactgaaagatatgtgtttggaggtttatttccaggatgcatttgcttgttttggtcatggcagcagtgagttggtaatcctaaaccatcacttccagcagtattcatggtatagagctgatctgtgttcatatgttgaattgtgatagtagcaaacatgaacatatgaactattgttgctcttaatagaaatacaatataaatatgggcttgtatattttcttccttacatttaaatataaagtagaatacgcagttttattattttcaagaaaaagaaagagaagctgctgacctttctcccccataaagtttttcaggatgatcaggtcacagtgtgtacgtaagagtcagctaattatggatattgtcatctcggtaactttgtaaaaaaacaaacaaaactggcattgttaattccaaaaagaaaaaaaaaagcagtaaaaaaaaaaagtcatatgcaacaccagacgcaacatggtttaatggaattaatagttttttttttttttttttttaaagaacattgatggggattcactgtaaagttggcagaggctgccaaagacgaaacaactgactttaaaaatgctggaacaatgtgataaaaaataaatttgtaacaaatcttctcctttttagcccttgtcattttagccctttagtttcaactctgcattatatttagtttatatagtgtaaacttttgtttgccattaattcatctttttaggtagaagacattaaaatcacaggtttatgaagaatctctgctcattggaatgaaatgcagtcatttgaaatgagaaaggccaggatccttttttgtaccttaccctgtcttcaagagtaaaggtgaacacttacagctctcctccttgatgtcaattttgtatgttgatcattccaaactgagaagaataaagccacattttagacatatttatagaatcaattaaagctatatgtctaaaattcgtagggcaacttctgagaagaaacaccgtctttttcttttttaatggaaagtgacaatgtgacattagtcatgttgtgtgcggtgacgcagagtaactgaggtaatctgactgttgcactatgtgacatatttcaggacgtacttgctgcatttgcagcagccctctctctctgtcccttcccacaattctgctgttgctgcaacttgagttaattgtgacaaatgcatctttgtgttatattttgtttgcttcataatttccagaactatatataaatatattttttaaatagcaaatattgtagttagtgagtgatgatcactccaaccttatccttaccatattggtttcagggataggattaagagtgtctttggaagagaaaaatacacacaaccctgtggtttagaatgacgctgaggccttaggctgtgggcctagaacaactatgtgagtgaattcacccatctcatactttgaatcaagcatgcattcctgtttctcattgtgaagtatccccagttgttttccttcagtgttgagtttttgtccttttaaattttattatattttgctctccctaacatttgactgttttttataaaagaaaagaaaaaaaaagaaataaataataccctcgatgccactggatactcacaagcagggttatgctccttcatcttgggcttgtttgcctaaatgaaagggtttaatttattttgtacctcctatgcgtgggatagtccagggtgcagagccaggacttgcttgtaattgcacctgctatacttaaatgtatagccctaggctcaatcacactatggaaagaaacaaaaaaagtatatttagagctttaaaagcttttttattttttgtggggatgagggtgggatgggaaagggatgtatggatgttattggcatttttaagtgtttagagttttttggggtttggggtggttttttttccttgttttccttttttccttttaattggatgcactgacctggcccaggaaatgaagagattctcttttgatgctattaccaatgttatcataaagtgacagtcacctgtaacaaaaaggtggcaccagacatgatcactgatgttttatttgcacatcaatatttttatttttgtattctggctcagctgcttctctgagtggagttaaggaatgagccacaaagatttttgtagtaggtatattggcattgcattttatattcctctatatttaattttgaaaacctaaaagaaggattgtgcatcttgagagaaagttgagcaaattgtgatctagcggaatgttaatttgtgctgcttcttgtgcacgatagcagcagtagtatctctcttggaaataaacatcccatattatgatgtctatgaatataggtttccttttcttccttccctccctccttcccccacctttctcttttttttttctctctcagcttctcttttcctccttccctcttcccttcctctttctttactttttttgaaatcacttattgtaaataagttgtaatccaaacctcatgtatcaatggggaattttcaaatataaatattaccaatgcattttctggttgttgtctgatttttgattgaagtataatgagaatgacatgtctgttgcttttggtttgaggacttcgctttagcttcataaatcttttggtattttagtatttcattgttttagcaggagagggcagcaaaagttcattttccctgttagtaatgctgtggttcatgatcggttttaaatttagctgtgtgtgtgtttttttaaacagcatctctttgtgagtagaggtaaaaatgaaacatttttgatatgaaaagttgcatatgaaaattatagactggttcaaccagacagtgaagacttctgatccacatcaaacttaaaatgccacaaaacaatcttccacctctggctaaaacatgctacttccttttcaaacaccacaaaatacaagctgagtcttaaacacttggaatttaaaatgtttttctttggaaatgatttgctttcttcaaagtggtaacagaaacaaaaatgaaggtgctccccaaaaagaaatgtaaccttcccctttcacagatgtgtgagaggttctgtactgtgggtgcatcataataaagaagcagtgaagagttttcaggtgac

SEQ ID NO: 427108 - DNA, 6645 bp, Homo sapiens
tgctggccagaaggttcggttgcgcgtgtgccatggactcagccgcccggtgatattgacaataggagagagaaaggggcattgactgggacccaccgcgggtagcgaaaggtggctctggcagcggcggctccagctcctgcggctcctcctccttattctgtccccttctcttgctgccgctgcagatccagtcttcctccctcccttccccccctccccacgtcgtcgccgccgccgccgggtccggggcaacgagctgaggcgccgcccgccaggaatgtgagcgaggagccaccggcggagccgcaacggggtcggtgccgatttgatgggacgggcccgcgggggaggatcgtgaggccgccgccgccaccggaacgctgaggttcgggtccggccgtgaggcctagaggctccgccgccgcggaaccggagggaccccgtaccggacagccgtcgccccaggctccccgcagctgcccggacctccccctgcacgtcccggtcccgccgcccgcccccgctgcggccacctcgcccgtctcccgcccctccaagccacagatcatcttcggattcttccccagaagcttcaagtagggatatgtcctcagcaccaactactcctccatcagtggataaagtagacggattttctcggaagtccgtcagaaaagccagacagaagaggtcgcaaagttcctcacagtttaggtctcaaggcaagcctattgagttaacacctctgccgctgctaaaagacgttccatcctcagagcagcctgaactgttcctaaagaaacttcagcagtgctgtgtcatttttgacttcatggacacgctatctgatcttaaaatgaaagaatacaagcgctccactcttaatgaactggtggactacattacaataagcagaggctgtttgacagagcagacttaccctgaagtagttagaatggtatcttgcaatatattcagaactctccctcctagtgacagcaatgaatttgatccagaagaagatgaacctacccttgaggcatcgtggccacacttacagcttgtatatgaatttttcatacgatttttggaaagccaagaattccaacccagcattgccaaaaaatatatagatcagaaatttgtattacagcttctggagctatttgacagcgaagaccctcgggaacgggactacttaaaaacagtcttacacagaatttatggcaagtttcttggtcttagagcatttatccgaaaacagattaacaatatttttctaaggtttgtttatgaaacagaacacttcaatggtgtagctgaactgctggaaatattaggaagtattatcaatggctttgctttacctcttaaggcagaacacaaacagtttctggtgaaagtattgatccctttacacactgtcaggagcttatcactcttccatgcacagctggcatattgtatagtacagtttctggagaaagatccttcactcacagaaccagttattagggggttaatgaaattttggcctaaaacatgtagtcaaaaagaggtcatgttccttggggaactggaagaaatattggatgtgattgaaccttcacaatttgttaaaatccaagaacctttgtttaaacaaatcgccaagtgtgtatctagcccccattttcaggtggcagaaagagcactctattattggaataatgaatacatcatgagtttgatagaagaaaactctaacgtcatccttcccatcatgttttccagcctttataggatttcaaaagaacattggaatccggctattgtggcgttggtgtacaatgtgttgaaggcatttatggaaatgaacagcaccatgtttgacgagctgacagccacatacaagtcagatcgtcagcgtgagaaaaagaaagaaaaggagcgtgaagaattgtggaaaaaattggaggatctggagttaaagagaggtcttagacgtgatggaataattccaacttaacaaaaacaatgacaacaacattactaacctgtggagtcacacgtttatgtagtagaagatggagcaacagttttctgtattgtgcaactttacagtagatttcacctttgtttcattattacagcagcactgtatatacctgtctctaagtaaaggaaaaaacaaaataaggacttcaatccaaagtttggacagtagatggacttctcagaactttgcaaacataatcattgttctcaccctcttttaaaaaaaaaaaatcggtcttcaaagatctgttgatgaaattgctatgttaaaattccattatcgggagttccttatttatcactagcagagagtatgatacaattttcaaatgtgaacaatcttaaatttagcttgtctttctgctaagctgttaaatgtatttatagtaaaggaagaaaaaaagactgtcatttccttataagtttgtgtaacatcctcctctggataacttgactgtaatttaacatctttttcttttgcacatcttcctgagttgaatgtccacgtggaatggggtcatgaattataaaagtccctgataaaagttttgtttactggggtgaacatctttccagtaaccaggtagtcctggtactcctttagttttaaaattaggagttaagagagaagaggtgataaacatagtagggaagggaatatcggattcatgcatcagtttatggtgaatccaaatcaatgtcttgaatcctttgaaaacaggcactgggacatcacaggcttcagtacctgaccagtattagttgcatatatcattgaacacacataccagagatgttttagaaatgtgagaaaaacatccttttggaccatttgaaataagaaagacaaacactaaacaatacaaccatgaaattgatcaccgggattgcaaatctaattgggaaaagagttgagcaaacagcttggactgtttggagttgttgccttactttttaatatgtatttataaagtattccagcaaaagaggatgtagcctctgggaaaaaacaaacatgttacagtgttttttgtagattctcgttctatatctcatcacagcgccagccctgtttttagccggaaaggattcaggataaacattattatgcattctgaattggatgcatattcctaactactgtatttgttaccaaaagtggttctacaaatgctactgaaaaaaatctggaaattcctaatgtcctgagtattaataataaagtttaaaaatgcttttatatcaaaggtgcatcgtgaccaaattgtttaagaaaaaaaaacaaaaaaaaaaaatctagggctgtattttatatatatataatcttattggctctctgctttgtatttaaatgaagaatcttacatcttgggtaggtaaactgctgataaaatttgtgtacagtatgtacttacctaatgcagttgcattattacgtactgaaagatatgtgtttggaggtttatttccaggatgcatttgcttgttttggtcatggcagcagtgagttggtaatcctaaaccatcacttccagcagtattcatggtatagagctgatctgtgttcatatgttgaattgtgatagtagcaaacatgaacatatgaactattgttgctcttaatagaaatacaatataaatatgggcttgtatattttcttccttacatttaaatataaagtagaatacgcagttttattattttcaagaaaaagaaagagaagctgctgacctttctcccccataaagtttttcaggatgatcaggtcacagtgtgtacgtaagagtcagctaattatggatattgtcatctcggtaactttgtaaaaaaacaaacaaaactggcattgttaattccaaaaagaaaaaaaaaagcagtaaaaaaaaaaagtcatatgcaacaccagacgcaacatggtttaatggaattaatagttttttttttttttttttttaaagaacattgatggggattcactgtaaagttggcagaggctgccaaagacgaaacaactgactttaaaaatgctggaacaatgtgataaaaaataaatttgtaacaaatcttctcctttttagcccttgtcattttagccctttagtttcaactctgcattatatttagtttatatagtgtaaacttttgtttgccattaattcatctttttaggtagaagacattaaaatcacaggtttatgaagaatctctgctcattggaatgaaatgcagtcatttgaaatgagaaaggccaggatccttttttgtaccttaccctgtcttcaagagtaaaggtgaacacttacagctctcctccttgatgtcaattttgtatgttgatcattccaaactgagaagaataaagccacattttagacatatttatagaatcaattaaagctatatgtctaaaattcgtagggcaacttctgagaagaaacaccgtctttttcttttttaatggaaagtgacaatgtgacattagtcatgttgtgtgcggtgacgcagagtaactgaggtaatctgactgttgcactatgtgacatatttcaggacgtacttgctgcatttgcagcagccctctctctctgtcccttcccacaattctgctgttgctgcaacttgagttaattgtgacaaatgcatctttgtgttatattttgtttgcttcataatttccagaactatatataaatatattttttaaatagcaaatattgtagttagtgagtgatgatcactccaaccttatccttaccatattggtttcagggataggattaagagtgtctttggaagagaaaaatacacacaaccctgtggtttagaatgacgctgaggccttaggctgtgggcctagaacaactatgtgagtgaattcacccatctcatactttgaatcaagcatgcattcctgtttctcattgtgaagtatccccagttgttttccttcagtgttgagtttttgtccttttaaattttattatattttgctctccctaacatttgactgttttttataaaagaaaagaaaaaaaaagaaataaataataccctcgatgccactggatactcacaagcagggttatgctccttcatcttgggcttgtttgcctaaatgaaagggtttaatttattttgtacctcctatgcgtgggatagtccagggtgcagagccaggacttgcttgtaattgcacctgctatacttaaatgtatagccctaggctcaatcacactatggaaagaaacaaaaaaagtatatttagagctttaaaagcttttttattttttgtggggatgagggtgggatgggaaagggatgtatggatgttattggcatttttaagtgtttagagttttttggggtttggggtggttttttttccttgttttccttttttccttttaattggatgcactgacctggcccaggaaatgaagagattctcttttgatgctattaccaatgttatcataaagtgacagtcacctgtaacaaaaaggtggcaccagacatgatcactgatgttttatttgcacatcaatatttttatttttgtattctggctcagctgcttctctgagtggagttaaggaatgagccacaaagatttttgtagtaggtatattggcattgcattttatattcctctatatttaattttgaaaacctaaaagaaggattgtgcatcttgagagaaagttgagcaaattgtgatctagcggaatgttaatttgtgctgcttcttgtgcacgatagcagcagtagtatctctcttggaaataaacatcccatattatgatgtctatgaatataggtttccttttcttccttccctccctccttcccccacctttctcttttttttttctctctcagcttctcttttcctccttccctcttcccttcctctttctttactttttttgaaatcacttattgtaaataagttgtaatccaaacctcatgtatcaatggggaattttcaaatataaatattaccaatgcattttctggttgttgtctgatttttgattgaagtataatgagaatgacatgtctgttgcttttggtttgaggacttcgctttagcttcataaatcttttggtattttagtatttcattgttttagcaggagagggcagcaaaagttcattttccctgttagtaatgctgtggttcatgatcggttttaaatttagctgtgtgtgtgtttttttaaacagcatctctttgtgagtagaggtaaaaatgaaacatttttgatatgaaaagttgcatatgaaaattatagactggttcaaccagacagtgaagacttctgatccacatcaaacttaaaatgccacaaaacaatcttccacctctggctaaaacatgctacttccttttcaaacaccacaaaatacaagctgagtcttaaacacttggaatttaaaatgtttttctttggaaatgatttgctttcttcaaagtggtaacagaaacaaaaatgaaggtgctccccaaaaagaaatgtaaccttcccctttcacagatgtgtgagaggttctgtactgtgggtgcatcataataaagaagcagtgaagagttttcaggtgac

SEQ ID NO: 427109 - DNA, 4678 bp, Homo sapiens
tgctggccagaaggttcggttgcgcgtgtgccatggactcagccgcccggtgatattgacaataggagagagaaaggggcattgactgggacccaccgcgggtagcgaaaggtggctctggcagcggcggctccagctcctgcggctcctcctccttattctgtccccttctcttgctgccgctgcagatccagtcttcctccctcccttccccccctccccacgtcgtcgccgccgccgccgggtccggggcaacgagctgaggcgccgcccgccaggaatgtgagcgaggagccaccggcggagccgcaacggggtcggtgccgatttgatgggacgggcccgcgggggaggatcgtgaggccgccgccgccaccggaacgctgaggttcgggtccggccgtgaggcctagaggctccgccgccgcggaaccggagggaccccgtaccggacagccgtcgccccaggctccccgcagctgcccggacctccccctgcacgtcccggtcccgccgcccgcccccgctgcggccacctcgcccgtctcccgcccctccaagccacagatcatcttcggattcttccccagaagcttcaagtagggatatgtcctcagcaccaactactcctccatcagtggataaagtagacggattttctcggaagtccgtcagaaaagccagacagaagaggtcgcaaagttcctcacagtttaggtctcaaggcaagcctattgagttaacacctctgccgctgctaaaagacgttccatcctcagagcagcctgaactgttcctaaagaaacttcagcagtgctgtgtcatttttgacttcatggacacgctatctgatcttaaaatgaaagaatacaagcgctccactcttaatgaactggtggactacattacaataagcagaggctgtttgacagagcagacttaccctgaagtagttagaatggtatcttgcaatatattcagaactctccctcctagtgacagcaatgaatttgatccagaagaagatgaacctacccttgaggcatcgtggccacacttacagcttgtatatgaatttttcatacgatttttggaaagccaagaattccaacccagcattgccaaaaaatatatagatcagaaatttgtattacagcttctggagctatttgacagcgaagaccctcgggaacgggactacttaaaaacagtcttacacagaatttatggcaagtttcttggtcttagagcatttatccgaaaacagattaacaatatttttctaaggtttgtttatgaaacagaacacttcaatggtgtagctgaactgctggaaatattaggaagtattatcaatggctttgctttacctcttaaggcagaacacaaacagtttctggtgaaagtattgatccctttacacactgtcaggagcttatcactcttccatgcacagctggcatattgtatagtacagtttctggagaaagatccttcactcacagaaccagttattagggggttaatgaaattttggcctaaaacatgtagtcaaaaagaggtcatgttccttggggaactggaagaaatattggatgtgattgaaccttcacaatttgttaaaatccaagaacctttgtttaaacaaatcgccaagtgtgtatctagcccccattttcaggtggcagaaagagcactctattattggaataatgaatacatcatgagtttgatagaagaaaactctaacgtcatccttcccatcatgttttccagcctttataggatttcaaaagaacattggaatccggctattgtggcgttggtgtacaatgtgttgaaggcatttatggaaatgaacagcaccatgtttgacgagctgacagccacatacaagtcagatcgtcagcgtgagaaaaagaaagaaaaggagcgtgaagaattgtggaaaaaattggaggatctggagttaaagagaggtcttagacgtgatggaataattccaacttaacaaaaacaatgacaacaacattactaacctgtggagtcacacgtttatgtagtagaagatggagcaacagttttctgtattgtgcaactttacagtagatttcacctttgtttcattattacagcagcactgtatatacctgtctctaagtaaaggaaaaaacaaaataaggacttcaatccaaagtttggacagtagatggacttctcagaactttgcaaacataatcattgttctcaccctcttttaaaaaaaaaaaatcggtcttcaaagatctgttgatgaaattgctatgttaaaattccattatcgggagttccttatttatcactagcagagagtatgatacaattttcaaatgtgaacaatcttaaatttagcttgtctttctgctaagctgttaaatgtatttatagtaaaggaagaaaaaaagactgtcatttccttataagtttgtgtaacatcctcctctggataacttgactgtaatttaacatctttttcttttgcacatcttcctgagttgaatgtccacgtggaatggggtcatgaattataaaagtccctgataaaagttttgtttactggggtgaacatctttccagtaaccaggtagtcctggtactcctttagttttaaaattaggagttaagagagaagaggtgataaacatagtagggaagggaatatcggattcatgcatcagtttatggtgaatccaaatcaatgtcttgaatcctttgaaaacaggcactgggacatcacaggcttcagtacctgaccagtattagttgcatatatcattgaacacacataccagagatgttttagaaatgtgagaaaaacatccttttggaccatttgaaataagaaagacaaacactaaacaatacaaccatgaaattgatcaccgggattgcaaatctaattgggaaaagagttgagcaaacagcttggactgtttggagttgttgccttactttttaatatgtatttataaagtattccagcaaaagaggatgtagcctctgggaaaaaacaaacatgttacagtgttttttgtagattctcgttctatatctcatcacagcgccagccctgtttttagccggaaaggattcaggataaacattattatgcattctgaattggatgcatattcctaactactgtatttgttaccaaaagtggttctacaaatgctactgaaaaaaatctggaaattcctaatgtcctgagtattaataataaagtttaaaaatgcttttatatcaaaggtgcatcgtgaccaaattgtttaagaaaaaaaaacaaaaaaaaaaaatctagggctgtattttatatatatataatcttattggctctctgctttgtatttaaatgaagaatcttacatcttgggtaggtaaactgctgataaaatttgtgtacagtatgtacttacctaatgcagttgcattattacgtactgaaagatatgtgtttggaggtttatttccaggatgcatttgcttgttttggtcatggcagcagtgagttggtaatcctaaaccatcacttccagcagtattcatggtatagagctgatctgtgttcatatgttgaattgtgatagtagcaaacatgaacatatgaactattgttgctcttaatagaaatacaatataaatatgggcttgtatattttcttccttacatttaaatataaagtagaatacgcagttttattattttcaagaaaaagaaagagaagctgctgacctttctcccccataaagtttttcaggatgatcaggtcacagtgtgtacgtaagagtcagctaattatggatattgtcatctcggtaactttgtaaaaaaacaaacaaaactggcattgttaatttccatatgaagaagaagttaagaacccgcagtcaatgacaaaaagaaaggtcgttttgcaaacacacagcatgcgacagggttgtcaagtgggaaaatttacatcacgtttttctctggtttgtgtctttttctctttgaaaaaacagccttcttgccggggcgaattccgaccggcttaatgtatgtggccataaggagtgtgctacacagtaataacacacctaactcgagtatttgtacaaaacctgggctggaggactccaagtcgtgagttgattcaaaacgaaaaaataactctctggggataacccaattctttctgccccttctgttcaacgcgcctatggtcttattctctataggggcccctgtttttaagttgtctcaaaactctctcgtgttctaaattatctttaacgattgcagtcaccttgcgggggaaacacgtttgggggggggcgcccaccattcgaatgttcgcatgctttttcgacagggcgtgagagacgtgactattacacacttgcgccggcgcgtgttttatgcgcgaaagacattgctcctgggctccccatgggcgaaagttgaagataccgggccggctcctttgttggacttttcgtgacaccggcgcgccgagtgagtcctccttgttggggaagctctgtaaacgccgtggccttacccagcgggcgtaaccgctgtgcgaatccgcttttggacgaggcggtcctctcctccttggggggtgggccagcctccggggtttgtggtgcggca

SEQ ID NO: 427110 - DNA, 6469 bp, Homo sapiens
tgctggccagaaggttcggttgcgcgtgtgccatggactcagccgcccggtgatattgacaataggagagagaaaggggcattgactgggacccaccgcgggtagcgaaaggtggctctggcagcggcggctccagctcctgcggctcctcctccttattctgtccccttctcttgctgccgctgcagatccagtcttcctccctcccttccccccctccccacgtcgtcgccgccgccgccgggtccggggcaacgagctgaggcgccgcccgccaggaatgtgagcgaggagccaccggcggagccgcaacggggtcggtgccgatttgatgggacgggcccgcgggggaggatcgtgaggccgccgccgccaccggaacgctgaggttcgggtccggccgtgaggcctagaggctccgccgccgcggaaccggagggaccccgtaccggacagccgtcgccccaggctccccgcagctgcccggacctccccctgcacgtcccggtcccgccgcccgcccccgctgcggccacctcgcccgtctcccgcccctccaagccacagatcatcttcggattcttccccagaagcttcaagtagggatatgtcctcagcaccaactactcctccatcagtggataaagtagacggattttctcggaagtccgtcagaaaagccagacagaagaggtcgcaaagttcctcacagtttaggtctcaaggcaagcctattgagttaacacctctgccgctgctaaaaggtatcttgcaatatattcagaactctccctcctagtgacagcaatgaatttgatccagaagaagatgaacctacccttgaggcatcgtggccacacttacagcttgtatatgaatttttcatacgatttttggaaagccaagaattccaacccagcattgccaaaaaatatatagatcagaaatttgtattacagcttctggagctatttgacagcgaagaccctcgggaacgggactacttaaaaacagtcttacacagaatttatggcaagtttcttggtcttagagcatttatccgaaaacagattaacaatatttttctaaggtttgtttatgaaacagaacacttcaatggtgtagctgaactgctggaaatattaggaagtattatcaatggctttgctttacctcttaaggcagaacacaaacagtttctggtgaaagtattgatccctttacacactgtcaggagcttatcactcttccatgcacagctggcatattgtatagtacagtttctggagaaagatccttcactcacagaaccagttattagggggttaatgaaattttggcctaaaacatgtagtcaaaaagaggtcatgttccttggggaactggaagaaatattggatgtgattgaaccttcacaatttgttaaaatccaagaacctttgtttaaacaaatcgccaagtgtgtatctagcccccattttcaggtggcagaaagagcactctattattggaataatgaatacatcatgagtttgatagaagaaaactctaacgtcatccttcccatcatgttttccagcctttataggatttcaaaagaacattggaatccggctattgtggcgttggtgtacaatgtgttgaaggcatttatggaaatgaacagcaccatgtttgacgagctgacagccacatacaagtcagatcgtcagcgtgagaaaaagaaagaaaaggagcgtgaagaattgtggaaaaaattggaggatctggagttaaagagaggtcttagacgtgatggaataattccaacttaacaaaaacaatgacaacaacattactaacctgtggagtcacacgtttatgtagtagaagatggagcaacagttttctgtattgtgcaactttacagtagatttcacctttgtttcattattacagcagcactgtatatacctgtctctaagtaaaggaaaaaacaaaataaggacttcaatccaaagtttggacagtagatggacttctcagaactttgcaaacataatcattgttctcaccctcttttaaaaaaaaaaaatcggtcttcaaagatctgttgatgaaattgctatgttaaaattccattatcgggagttccttatttatcactagcagagagtatgatacaattttcaaatgtgaacaatcttaaatttagcttgtctttctgctaagctgttaaatgtatttatagtaaaggaagaaaaaaagactgtcatttccttataagtttgtgtaacatcctcctctggataacttgactgtaatttaacatctttttcttttgcacatcttcctgagttgaatgtccacgtggaatggggtcatgaattataaaagtccctgataaaagttttgtttactggggtgaacatctttccagtaaccaggtagtcctggtactcctttagttttaaaattaggagttaagagagaagaggtgataaacatagtagggaagggaatatcggattcatgcatcagtttatggtgaatccaaatcaatgtcttgaatcctttgaaaacaggcactgggacatcacaggcttcagtacctgaccagtattagttgcatatatcattgaacacacataccagagatgttttagaaatgtgagaaaaacatccttttggaccatttgaaataagaaagacaaacactaaacaatacaaccatgaaattgatcaccgggattgcaaatctaattgggaaaagagttgagcaaacagcttggactgtttggagttgttgccttactttttaatatgtatttataaagtattccagcaaaagaggatgtagcctctgggaaaaaacaaacatgttacagtgttttttgtagattctcgttctatatctcatcacagcgccagccctgtttttagccggaaaggattcaggataaacattattatgcattctgaattggatgcatattcctaactactgtatttgttaccaaaagtggttctacaaatgctactgaaaaaaatctggaaattcctaatgtcctgagtattaataataaagtttaaaaatgcttttatatcaaaggtgcatcgtgaccaaattgtttaagaaaaaaaaacaaaaaaaaaaaatctagggctgtattttatatatatatatatatatatatatatatatatatcttattggctctctgctttgtatttaaatgaagaatcttacatcttgggtaggtaaactgctgataaaatttgtgtacagtatgtacttacctaatgcagttgcattattacgtactgaaagatatgtgtttggaggtttatttccaggatgcatttgcttgttttggtcatggcagcagtgagttggtaatcctaaaccatcacttccagcagtattcatggtatagagctgatctgtgttcatatgttgaattgtgatagtagcaaacatgaacatatgaactattgttgctcttaatagaaatacaatataaatatgggcttgtatattttcttccttacatttaaatataaagtagaatacgcagttttattattttcaagaaaaagaaagagaagctgctgacctttctcccccataaagtttttcaggatgatcaggtcacagtgtgtacgtaagagtcagctaattatggatattgtcatctcggtaactttgtaaaaaaacaaacaaaactggcattgttaattccaaaaagaaaaaaaaaagcagtaaaaaaaaaaagtcatatgcaacaccagacgcaacatggtttaatggaattaatagttttttttttttttttttttaaagaacattgatggggattcactgtaaagttggcagaggctgccaaagacgaaacaactgactttaaaaatgctggaacaatgtgataaaaaataaatttgtaacaaatcttctcctttttagcccttgtcattttagccctttagtttcaactctgcattatatttagtttatatagtgtaaacttttgtttgccattaattcatctttttaggtagaagacattaaaatcacaggtttatgaagaatctctgctcattggaatgaaatgcagtcatttgaaatgagaaaggccaggatccttttttgtaccttaccctgtcttcaagagtaaaggtgaacacttacagctctcctccttgatgtcaattttgtatgttgatcattccaaactgagaagaataaagccacattttagacatatttatagaatcaattaaagctatatgtctaaaattcgtagggcaacttctgagaagaaacaccgtctttttcttttttaatggaaagtgacaatgtgacattagtcatgttgtgtgcggtgacgcagagtaactgaggtaatctgactgttgcactatgtgacatatttcaggacgtacttgctgcatttgcagcagccctctctctctgtcccttcccacaattctgctgttgctgcaacttgagttaattgtgacaaatgcatctttgtgttatattttgtttgcttcataatttccagaactatatataaatatattttttaaatagcaaatattgtagttagtgagtgatgatcactccaaccttatccttaccatattggtttcagggataggattaagagtgtctttggaagagaaaaatacacacaaccctgtggtttagaatgacgctgaggccttaggctgtgggcctagaacaactatgtgagtgaattcacccatctcatactttgaatcaagcatgcattcctgtttctcattgtgaagtatccccagttgttttccttcagtgttgagtttttgtccttttaaattttattatattttgctctccctaacatttgactgttttttataaaagaaaagaaaaaaaaagaaataaataataccctcgatgccactggatactcacaagcagggttatgctccttcatcttgggcttgtttgcctaaatgaaagggtttaatttattttgtacctcctatgcgtgggatagtccagggtgcagagccaggacttgcttgtaattgcacctgctatacttaaatgtatagccctaggctcaatcacactatggaaagaaacaaaaaaagtatatttagagctttaaaagcttttttattttttgtggggatgagggtgggatgggaaagggatgtatggatgttattggcatttttaagtgtttagagttttttggggtttggggtggttttttttccttgttttccttttttccttttaattggatgcactgacctggcccaggaaatgaagagattctcttttgatgctattaccaatgttatcataaagtgacagtcacctgtaacaaaaaggtggcaccagacatgatcactgatgttttatttgcacatcaatatttttatttttgtattctggctcagctgcttctctgagtggagttaaggaatgagccacaaagatttttgtagtaggtatattggcattgcattttatattcctctatatttaattttgaaaacctaaaagaaggattgtgcatcttgagagaaagttgagcaaattgtgatctagcggaatgttaatttgtgctgcttcttgtgcacgatagcagcagtagtatctctcttggaaataaacatcccatattatgatgtctatgaatataggtttccttttcttccttccctccctccttcccccacctttctcttttttttttctctctcagcttctcttttcctccttccctcttcccttcctctttctttactttttttgaaatcacttattgtaaataagttgtaatccaaacctcatgtatcaatggggaattttcaaatataaatattaccaatgcattttctggttgttgtctgatttttgattgaagtataatgagaatgacatgtctgttgcttttggtttgaggacttcgctttagcttcataaatcttttggtattttagtatttcattgttttagcaggagagggcagcaaaagttcattttccctgttagtaatgctgtggttcatgatcggttttaaatttagctgtgtgtgtgtttttttaaacagcatctctttgtgagtagaggtaaaaatgaaacatttttgatatgaaaagttgcatatgaaaattatagactggttcaaccagacagtgaagacttctgatccacatcaaacttaaaatgccacaaaacaatcttccacctctggctaaaacatgctacttccttttcaaacaccacaaaatacaagctgagtcttaaacacttggaatttaaaatgtttttctttggaaatgatttgctttcttcaaagtggtaacagaaacaaaaatgaaggtgctccccaaaaagaaatgtaaccttcccctttcacagatgtgtgagaggttctgtactgtgggtgcatcataataaagaagcagtgaagagttttcaggtgac

SEQ ID NO: 427111 - DNA, 6576 bp, Homo sapiens
tgctggccagaaggttcggttgcgcgtgtgccatggactcagccgcccggtgatattgacaataggagagagaaaggggcattgactgggacccaccgcgggtagcgaaaggtggctctggcagcggcggctccagctcctgcggctcctcctccttattctgtccccttctcttgctgccgctgcagatccagtcttcctccctcccttccccccctccccacgtcgtcgccgccgccgccgggtccggggcaacgagctgaggcgccgcccgccaggaatgtgagcgaggagccaccggcggagccgcaacggggtcggtgccgatttgatgggacgggcccgcgggggaggatcgtgaggccgccgccgccaccggaacgctgaggttcgggtccggccgtgaggcctagaggctccgccgccgcggaaccggagggaccccgtaccggacagccgtcgccccaggctccccgcagctgcccggacctccccctgcacgtcccggtcccgccgcccgcccccgctgcggccacctcgcccgtctcccgcccctccaagccacagatcatcttcggattcttccccagaagcttcaagtagggatatgtcctcagcaccaactactcctccatcagtggataaagtagacggattttctcggaagtccgtcagaaaagccagacagaagaggtcgcaaagttcctcacagtttaggtctcaaggcaagcctattgagttaacacctctgccgctgctaaaaggtatcttgcaatatattcagaactctccctcctagtgacagcaatgaatttgatccagaagaagatgaacctacccttgaggcatcgtggccacacttacagcttgtatatgaatttttcatacgatttttggaaagccaagaattccaacccagcattgccaaaaaatatatagatcagaaatttgtattacagcttctggagctatttgacagcgaagaccctcgggaacgggactacttaaaaacagtcttacacagaatttatggcaagtttcttggtcttagagcatttatccgaaaacagattaacaatatttttctaaggtttgtttatgaaacagaacacttcaatggtgtagctgaactgctggaaatattaggaagtattatcaatggctttgctttacctcttaaggcagaacacaaacagtttctggtgaaagtattgatccctttacacactgtcaggagcttatcactcttccatgcacagctggcatattgtatagtacagtttctggagaaagatccttcactcacagaaccagttattagggggttaatgaaattttggcctaaaacatgtagtcaaaaagaggtcatgttccttggggaactggaagaaatattggatgtgattgaaccttcacaatttgttaaaatccaagaacctttgtttaaacaaatcgccaagtgtgtatctagcccccattttcaggtggcagaaagagcactctattattggaataatgaatacatcatgagtttgatagaagaaaactctaacgtcatccttcccatcatgttttccagcctttataggatttcaaaagaacattggaatccggctattgtggcgttggtgtacaatgtgttgaaggcatttatggaaatgaacagcaccatgtttgacgagctgacagccacatacaagtcagatcgtcagcgtgagaaaaagaaagaaaaggagcgtgaagaattgtggaaaaaattggaggatctggagttaaagagaggtcttagacgtgatggaataattccaacttaacaaaaacaatgacaacaacattactaacctgtggagtcacacgtttatgtagtagaagatggagcaacagttttctgtattgtgcaactttacagtagatttcacctttgtttcattattacagcagcactgtatatacctgtctctaagtaaaggaaaaaacaaaataaggacttcaatccaaagtttggacagtagatggacttctcagaactttgcaaacataatcattgttctcaccctcttttaaaaaaaaaaaatcggtcttcaaagatctgttgatgaaattgctatgttaaaattccattatcgggagttccttatttatcactagcagagagtatgatacaattttcaaatgtgaacaatcttaaatttagcttgtctttctgctaagctgttaaatgtatttatagtaaaggaagaaaaaaagactgtcatttccttataagtttgtgtaacatcctcctctggataacttgactgtaatttaacatctttttcttttgcacatcttcctgagttgaatgtccacgtggaatggggtcatgaattataaaagtccctgataaaagttttgtttactggggtgaacatctttccagtaaccaggtagtcctggtactcctttagttttaaaattaggagttaagagagaagaggtgataaacatagtagggaagggaatatcggattcatgcatcagtttatggtgaatccaaatcaatgtcttgaatcctttgaaaacaggcactgggacatcacaggcttcagtacctgaccagtattagttgcatatatcattgaacacacataccagagatgttttagaaatgtgagaaaaacatccttttggaccatttgaaataagaaagacaaacactaaacaatacaaccatgaaattgatcaccgggattgcaaatctaattgggaaaagagttgagcaaacagcttggactgtttggagttgttgccttactttttaatatgtatttataaagtattccagcaaaagaggatgtagcctctgggaaaaaacaaacatgttacagtgttttttgtagattctcgttctatatctcatcacagcgccagccctgtttttagccggaaaggattcaggataaacattattatgcattctgaattggatgcatattcctaactactgtatttgttaccaaaagtggttctacaaatgctactgaaaaaaatctggaaattcctaatgtcctgagtattaataataaagtttaaaaatgcttttatatcaaaaaaaaaaaaaaaaaaaaaaaaaaaaaaaaaaaaaaaaaaaaaaaaaaaaaaaaaaaaaaaaaaaaaaaaaaaaaaaaaaaaaaaaaaaaaaaaaaaaaaaaaaaaaaaaaaaaaaaaaaaaaaaaaaaagaagaaaaaaaaacaaaaaaaaaaaatctagggctgtattttatatatatatatatatatatatatatatatatatcttattggctctctgctttgtatttaaatgaagaatcttacatcttgggtaggtaaactgctgataaaatttgtgtacagtatgtacttacctaatgcagttgcattattacgtactgaaagatatgtgtttggaggtttatttccaggatgcatttgcttgttttggtcatggcagcagtgagttggtaatcctaaaccatcacttccagcagtattcatggtatagagctgatctgtgttcatatgttgaattgtgatagtagcaaacatgaacatatgaactattgttgctcttaatagaaatacaatataaatatgggcttgtatattttcttccttacatttaaatataaagtagaatacgcagttttattattttcaagaaaaagaaagagaagctgctgacctttctcccccataaagtttttcaggatgatcaggtcacagtgtgtacgtaagagtcagctaattatggatattgtcatctcggtaactttgtaaaaaaacaaacaaaactggcattgttaattccaaaaagaaaaaaaaaagcagtaaaaaaaaaaagtcatatgcaacaccagacgcaacatggtttaatggaattaatagttttttttttttttttttttaaagaacattgatggggattcactgtaaagttggcagaggctgccaaagacgaaacaactgactttaaaaatgctggaacaatgtgataaaaaataaatttgtaacaaatcttctcctttttagcccttgtcattttagccctttagtttcaactctgcattatatttagtttatatagtgtaaacttttgtttgccattaattcatctttttaggtagaagacattaaaatcacaggtttatgaagaatctctgctcattggaatgaaatgcagtcatttgaaatgagaaaggccaggatccttttttgtaccttaccctgtcttcaagagtaaaggtgaacacttacagctctcctccttgatgtcaattttgtatgttgatcattccaaactgagaagaataaagccacattttagacatatttatagaatcaattaaagctatatgtctaaaattcgtagggcaacttctgagaagaaacaccgtctttttcttttttaatggaaagtgacaatgtgacattagtcatgttgtgtgcggtgacgcagagtaactgaggtaatctgactgttgcactatgtgacatatttcaggacgtacttgctgcatttgcagcagccctctctctctgtcccttcccacaattctgctgttgctgcaacttgagttaattgtgacaaatgcatctttgtgttatattttgtttgcttcataatttccagaactatatataaatatattttttaaatagcaaatattgtagttagtgagtgatgatcactccaaccttatccttaccatattggtttcagggataggattaagagtgtctttggaagagaaaaatacacacaaccctgtggtttagaatgacgctgaggccttaggctgtgggcctagaacaactatgtgagtgaattcacccatctcatactttgaatcaagcatgcattcctgtttctcattgtgaagtatccccagttgttttccttcagtgttgagtttttgtccttttaaattttattatattttgctctccctaacatttgactgttttttataaaagaaaagaaaaaaaaagaaataaataataccctcgatgccactggatactcacaagcagggttatgctccttcatcttgggcttgtttgcctaaatgaaagggtttaatttattttgtacctcctatgcgtgggatagtccagggtgcagagccaggacttgcttgtaattgcacctgctatacttaaatgtatagccctaggctcaatcacactatggaaagaaacaaaaaaagtatatttagagctttaaaagcttttttattttttgtggggatgagggtgggatgggaaagggatgtatggatgttattggcatttttaagtgtttagagttttttggggtttggggtggttttttttccttgttttccttttttccttttaattggatgcactgacctggcccaggaaatgaagagattctcttttgatgctattaccaatgttatcataaagtgacagtcacctgtaacaaaaaggtggcaccagacatgatcactgatgttttatttgcacatcaatatttttatttttgtattctggctcagctgcttctctgagtggagttaaggaatgagccacaaagatttttgtagtaggtatattggcattgcattttatattcctctatatttaattttgaaaacctaaaagaaggattgtgcatcttgagagaaagttgagcaaattgtgatctagcggaatgttaatttgtgctgcttcttgtgcacgatagcagcagtagtatctctcttggaaataaacatcccatattatgatgtctatgaatataggtttccttttcttccttccctccctccttcccccacctttctcttttttttttctctctcagcttctcttttcctccttccctcttcccttcctctttctttactttttttgaaatcacttattgtaaataagttgtaatccaaacctcatgtatcaatggggaattttcaaatataaatattaccaatgcattttctggttgttgtctgatttttgattgaagtataatgagaatgacatgtctgttgcttttggtttgaggacttcgctttagcttcataaatcttttggtattttagtatttcattgttttagcaggagagggcagcaaaagttcattttccctgttagtaatgctgtggttcatgatcggttttaaatttagctgtgtgtgtgtttttttaaacagcatctctttgtgagtagaggtaaaaatgaaacatttttgatatgaaaagttgcatatgaaaattatagactggttcaaccagacagtgaagacttctgatccacatcaaacttaaaatgccacaaaacaatcttccacctctggctaaaacatgctacttccttttcaaacaccacaaaatacaagctgagtcttaaacacttggaatttaaaatgtttttctttggaaatgatttgctttcttcaaagtggtaacagaaacaaaaatgaaggtgctccccaaaaagaaatgtaaccttcccctttcacagatgtgtgagaggttctgtactgtgggtgcatcataataaagaagcagtgaagagttttcaggtgac

SEQ ID NO: 427112 - DNA, 6639 bp, Homo sapiens
tgctggccagaaggttcggttgcgcgtgtgccatggactcagccgcccggtgatattgacaataggagagagaaaggggcattgactgggacccaccgcgggtagcgaaaggtggctctggcagctccttattctgtccccttctcttgctgccgctgcagatccagtcttcctccctcccttccccccctccccacgtcgtcgccgccgccgccgggtccggggcaacgagctgaggcgccgcccgccaggaatgtgagcgaggagccaccggcggagccgcaacggggtcggtgccgatttgatgggacgggcccgcgggggaggatcgtgaggccgccgccgccaccggaacgctgaggttcgggtccggccgtgaggcctagaggctccgccgccgcggaaccggagggaccccgtaccggacagccgtcgccccaggctccccgcagctgcccggacctccccctgcacgtcccggtcccgccgcccgcccccgctgcggccacctcgcccgtctcccgcccctccaagccacagatcatcttcggattcttccccagaagcttcaagtagggatatgtcctcagcaccaactactcctccatcagtggataaagtagacggattttctcggaagtccgtcagaaaagccagacagaagaggtcgcaaagttcctcacagtttaggtctcaaggcaagcctattgagttaacacctctgccgctgctaaaagacgttccatcctcagagcagcctgaactgttcctaaagaaacttcagcagtgctgtgtcatttttgacttcatggacacgctatctgatcttaaaatgaaagaatacaagcgctccactcttaatgaactggtggactacattacaataagcagaggctgtttgacagagcagacttaccctgaagtagttagaatggtatcttgcaatatattcagaactctccctcctagtgacagcaatgaatttgatccagaagaagatgaacctacccttgaggcatcgtggccacacttacagcttgtatatgaatttttcatacgatttttggaaagccaagaattccaacccagcattgccaaaaaatatatagatcagaaatttgtattacagcttctggagctatttgacagcgaagaccctcgggaacgggactacttaaaaacagtcttacacagaatttatggcaagtttcttggtcttagagcatttatccgaaaacagattaacaatatttttctaaggtttgtttatgaaacagaacacttcaatggtgtagctgaactgctggaaatattaggaagtattatcaatggctttgctttacctcttaaggcagaacacaaacagtttctggtgaaagtattgatccctttacacactgtcaggagcttatcactcttccatgcacagctggcatattgtatagtacagtttctggagaaagatccttcactcacagaaccagttattagggggttaatgaaattttggcctaaaacatgtagtcaaaaagaggtcatgttccttggggaactggaagaaatattggatgtgattgaaccttcacaatttgttaaaatccaagaacctttgtttaaacaaatcgccaagtgtgtatctagcccccattttcaggtggcagaaagagcactctattattggaataatgaatacatcatgagtttgatagaagaaaactctaacgtcatccttcccatcatgttttccagcctttataggatttcaaaagaacattggaatccggctattgtggcgttggtgtacaatgtgttgaaggcatttatggaaatgaacagcaccatgtttgacgagctgacagccacatacaagtcagatcgtcagcgtgagaaaaagaaagaaaaggagcgtgaagaattgtggaaaaaattggaggatctggagttaaagagaggtcttagacgtgatggaataattccaacttaacaaaaacaatgacaacaacattactaacctgtggagtcacacgtttatgtagtagaagatggagcaacagttttctgtattgtgcaactttacagtagatttcacctttgtttcattattacagcagcactgtatatacctgtctctaagtaaaggaaaaaacaaaataaggacttcaatccaaagtttggacagtagatggacttctcagaactttgcaaacataatcattgttctcaccctcttttaaaaaaaaaaaatcggtcttcaaagatctgttgatgaaattgctatgttaaaattccattatcgggagttccttatttatcactagcagagagtatgatacaattttcaaatgtgaacaatcttaaatttagcttgtctttctgctaagctgttaaatgtatttatagtaaaggaagaaaaaaagactgtcatttccttataagtttgtgtaacatcctcctctggataacttgactgtaatttaacatctttttcttttgcacatcttcctgagttgaatgtccacgtggaatggggtcatgaattataaaagtccctgataaaagttttgtttactggggtgaacatctttccagtaaccaggtagtcctggtactcctttagttttaaaattaggagttaagagagaagaggtgataaacatagtagggaagggaatatcggattcatgcatcagtttatggtgaatccaaatcaatgtcttgaatcctttgaaaacaggcactgggacatcacaggcttcagtacctgaccagtattagttgcatatatcattgaacacacataccagagatgttttagaaatgtgagaaaaacatccttttggaccatttgaaataagaaagacaaacactaaacaatacaaccatgaaattgatcaccgggattgcaaatctaattgggaaaagagttgagcaaacagcttggactgtttggagttgttgccttactttttaatatgtatttataaagtattccagcaaaagaggatgtagcctctgggaaaaaacaaacatgttacagtgttttttgtagattctcgttctatatctcatcacagcgccagccctgtttttagccggaaaggattcaggataaacattattatgcattctgaattggatgcatattcctaactactgtatttgttaccaaaagtggttctacaaatgctactgaaaaaaatctggaaattcctaatgtcctgagtattaataataaagtttaaaaatgcttttatatcaaaggtgcatcgtgaccaaattgtttaagaaaaaaaaacaaaaaaaaaaaatctagggctgtattttatatatatatatatatatatatatatatatatatcttattggctctctgctttgtatttaaatgaagaatcttacatcttgggtaggtaaactgctgataaaatttgtgtacagtatgtacttacctaatgcagttgcattattacgtactgaaagatatgtgtttggaggtttatttccaggatgcatttgcttgttttggtcatggcagcagtgagttggtaatcctaaaccatcacttccagcagtattcatggtatagagctgatctgtgttcatatgttgaattgtgatagtagcaaacatgaacatatgaactattgttgctcttaatagaaatacaatataaatatgggcttgtatattttcttccttacatttaaatataaagtagaatacgcagttttattattttcaagaaaaagaaagagaagctgctgacctttctcccccataaagtttttcaggatgatcaggtcacagtgtgtacgtaagagtcagctaattatggatattgtcatctcggtaactttgtaaaaaaacaaacaaaactggcattgttaattccaaaaagaaaaaaaaaagcagtaaaaaaaaaaagtcatatgcaacaccagacgcaacatggtttaatggaattaatagttttttttttttttttttttaaagaacattgatggggattcactgtaaagttggcagaggctgccaaagacgaaacaactgactttaaaaatgctggaacaatgtgataaaaaataaatttgtaacaaatcttctcctttttagcccttgtcattttagccctttagtttcaactctgcattatatttagtttatatagtgtaaacttttgtttgccattaattcatctttttaggtagaagacattaaaatcacaggtttatgaagaatctctgctcattggaatgaaatgcagtcatttgaaatgagaaaggccaggatccttttttgtaccttaccctgtcttcaagagtaaaggtgaacacttacagctctcctccttgatgtcaattttgtatgttgatcattccaaactgagaagaataaagccacattttagacatatttatagaatcaattaaagctatatgtctaaaattcgtagggcaacttctgagaagaaacaccgtctttttcttttttaatggaaagtgacaatgtgacattagtcatgttgtgtgcggtgacgcagagtaactgaggtaatctgactgttgcactatgtgacatatttcaggacgtacttgctgcatttgcagcagccctctctctctgtcccttcccacaattctgctgttgctgcaacttgagttaattgtgacaaatgcatctttgtgttatattttgtttgcttcataatttccagaactatatataaatatattttttaaatagcaaatattgtagttagtgagtgatgatcactccaaccttatccttaccatattggtttcagggataggattaagagtgtctttggaagagaaaaatacacacaaccctgtggtttagaatgacgctgaggccttaggctgtgggcctagaacaactatgtgagtgaattcacccatctcatactttgaatcaagcatgcattcctgtttctcattgtgaagtatccccagttgttttccttcagtgttgagtttttgtccttttaaattttattatattttgctctccctaacatttgactgttttttataaaagaaaagaaaaaaaaagaaataaataataccctcgatgccactggatactcacaagcagggttatgctccttcatcttgggcttgtttgcctaaatgaaagggtttaatttattttgtacctcctatgcgtgggatagtccagggtgcagagccaggacttgcttgtaattgcacctgctatacttaaatgtatagccctaggctcaatcacactatggaaagaaacaaaaaaagtatatttagagctttaaaagcttttttattttttgtggggatgagggtgggatgggaaagggatgtatggatgttattggcatttttaagtgtttagagttttttggggtttggggtggttttttttccttgttttccttttttccttttaattggatgcactgacctggcccaggaaatgaagagattctcttttgatgctattaccaatgttatcataaagtgacagtcacctgtaacaaaaaggtggcaccagacatgatcactgatgttttatttgcacatcaatatttttatttttgtattctggctcagctgcttctctgagtggagttaaggaatgagccacaaagatttttgtagtaggtatattggcattgcattttatattcctctatatttaattttgaaaacctaaaagaaggattgtgcatcttgagagaaagttgagcaaattgtgatctagcggaatgttaatttgtgctgcttcttgtgcacgatagcagcagtagtatctctcttggaaataaacatcccatattatgatgtctatgaatataggtttccttttcttccttccctccctccttcccccacctttctcttttttttttctctctcagcttctcttttcctccttccctcttcccttcctctttctttactttttttgaaatcacttattgtaaataagttgtaatccaaacctcatgtatcaatggggaattttcaaatataaatattaccaatgcattttctggttgttgtctgatttttgattgaagtataatgagaatgacatgtctgttgcttttggtttgaggacttcgctttagcttcataaatcttttggtattttagtatttcattgttttagcaggagagggcagcaaaagttcattttccctgttagtaatgctgtggttcatgatcggttttaaatttagctgtgtgtgtgtttttttaaacagcatctctttgtgagtagaggtaaaaatgaaacatttttgatatgaaaagttgcatatgaaaattatagactggttcaaccagacagtgaagacttctgatccacatcaaacttaaaatgccacaaaacaatcttccacctctggctaaaacatgctacttccttttcaaacaccacaaaatacaagctgagtcttaaacacttggaatttaaaatgtttttctttggaaatgatttgctttcttcaaagtggtaacagaaacaaaaatgaaggtgctccccaaaaagaaatgtaaccttcccctttcacagatgtgtgagaggttctgtactgtgggtgcatcataataaagaagcagtgaagagttttcaggtgac

SEQ ID NO: 427113 - DNA, 6546 bp, Homo sapiens
tgctggccagaaggttcggttgcgcgtgtgccatggactcagccgcccggtgatattgacaataggagagagaaaggggcattgactgggacccaccgcgggtagcgaaaggtggctctggcagcggcggctccagctcctgcggctcctcctccttattctgtccccttctcttgctgccgctgcagatccagtcttcctccctcccttccccccctccccacgtcgtcgccgccgccgccgggtccggggcaacgagctgaggcgccgcccgccaggaatgtgagcgaggagccaccggcggagccgcaacggggtcggtgccgatttgatgggacgggcccgcgggggaggatcgtgaggccgccgccgccaccggaacgctgaggttcgggtccggccgtgaggcctagaggctccgccgccgcggaaccggagggaccccgtaccggacagccgtcgccccaggctccccgcagctgcccggacctccccctgcacgtcccggtcccgccgcccgcccccgctgcggccacctcgcccgtctcccgcccctccaagccacagatcatcttcggattcttccccagaagcttcaagtagggatatgtcctcagcaccaactactcctccatcagtggataaagtagacggattttctcggaagtccgtcagaaaagccagacagaagaggtcgcaaagttcctcacagtttaggtctcaaggcaagcctattgagttaacacctctgccgctgctaaaagacgttccatcctcagagcagcctgaactgttcctaaagaaacttcagcagtgctgtgtcatttttgacttcatggacacgctatctgatcttaaaatgaaagaatacaagcgctccactcttaatgaactggtggactacattacaataagcagaggctgtttgacagagcagacttaccctgaagtagttagaatggtatcttgcaatatattcagaactctccctcctagtgacagcaatgaatttgatccagaagaagatgaacctacccttgaggcatcgtggccacacttacagcttgtatatgaatttttcatacgatttttggaaagccaagaattccaacccagcattgccaaaaaatatatagatcagaaatttgtattacagcttctggagctatttgacagcgaagaccctcgggaacgggactacttaaaaacagtcttacacagaatttatggcaagtttcttggtcttagagcatttatccgaaaacagattaacaatatttttctaaggtttgtttatgaaacagaacacttcaatggtgtagctgaactgctggaaatattaggaagtattatcaatggctttgctttacctcttaaggcagaacacaaacagtttctggtgaaagtattgatccctttacacactgtcaggagcttatcactcttccatgcacagctggcatattgtatagtacagtttctggagaaagatccttcactcacagaaccagttattagggggttaatgaaattttggcctaaaacatgtagtcaaaaagaggtggcagaaagagcactctattattggaataatgaatacatcatgagtttgatagaagaaaactctaacgtcatccttcccatcatgttttccagcctttataggatttcaaaagaacattggaatccggctattgtggcgttggtgtacaatgtgttgaaggcatttatggaaatgaacagcaccatgtttgacgagctgacagccacatacaagtcagatcgtcagcgtgagaaaaagaaagaaaaggagcgtgaagaattgtggaaaaaattggaggatctggagttaaagagaggtcttagacgtgatggaataattccaacttaacaaaaacaatgacaacaacattactaacctgtggagtcacacgtttatgtagtagaagatggagcaacagttttctgtattgtgcaactttacagtagatttcacctttgtttcattattacagcagcactgtatatacctgtctctaagtaaaggaaaaaacaaaataaggacttcaatccaaagtttggacagtagatggacttctcagaactttgcaaacataatcattgttctcaccctcttttaaaaaaaaaaaatcggtcttcaaagatctgttgatgaaattgctatgttaaaattccattatcgggagttccttatttatcactagcagagagtatgatacaattttcaaatgtgaacaatcttaaatttagcttgtctttctgctaagctgttaaatgtatttatagtaaaggaagaaaaaaagactgtcatttccttataagtttgtgtaacatcctcctctggataacttgactgtaatttaacatctttttcttttgcacatcttcctgagttgaatgtccacgtggaatggggtcatgaattataaaagtccctgataaaagttttgtttactggggtgaacatctttccagtaaccaggtagtcctggtactcctttagttttaaaattaggagttaagagagaagaggtgataaacatagtagggaagggaatatcggattcatgcatcagtttatggtgaatccaaatcaatgtcttgaatcctttgaaaacaggcactgggacatcacaggcttcagtacctgaccagtattagttgcatatatcattgaacacacataccagagatgttttagaaatgtgagaaaaacatccttttggaccatttgaaataagaaagacaaacactaaacaatacaaccatgaaattgatcaccgggattgcaaatctaattgggaaaagagttgagcaaacagcttggactgtttggagttgttgccttactttttaatatgtatttataaagtattccagcaaaagaggatgtagcctctgggaaaaaacaaacatgttacagtgttttttgtagattctcgttctatatctcatcacagcgccagccctgtttttagccggaaaggattcaggataaacattattatgcattctgaattggatgcatattcctaactactgtatttgttaccaaaagtggttctacaaatgctactgaaaaaaatctggaaattcctaatgtcctgagtattaataataaagtttaaaaatgcttttatatcaaaggtgcatcgtgaccaaattgtttaagaaaaaaaaacaaaaaaaaaaaatctagggctgtattttatatatatatatatatatatatatatatatatatcttattggctctctgctttgtatttaaatgaagaatcttacatcttgggtaggtaaactgctgataaaatttgtgtacagtatgtacttacctaatgcagttgcattattacgtactgaaagatatgtgtttggaggtttatttccaggatgcatttgcttgttttggtcatggcagcagtgagttggtaatcctaaaccatcacttccagcagtattcatggtatagagctgatctgtgttcatatgttgaattgtgatagtagcaaacatgaacatatgaactattgttgctcttaatagaaatacaatataaatatgggcttgtatattttcttccttacatttaaatataaagtagaatacgcagttttattattttcaagaaaaagaaagagaagctgctgacctttctcccccataaagtttttcaggatgatcaggtcacagtgtgtacgtaagagtcagctaattatggatattgtcatctcggtaactttgtaaaaaaacaaacaaaactggcattgttaattccaaaaagaaaaaaaaaagcagtaaaaaaaaaaagtcatatgcaacaccagacgcaacatggtttaatggaattaatagttttttttttttttttttttaaagaacattgatggggattcactgtaaagttggcagaggctgccaaagacgaaacaactgactttaaaaatgctggaacaatgtgataaaaaataaatttgtaacaaatcttctcctttttagcccttgtcattttagccctttagtttcaactctgcattatatttagtttatatagtgtaaacttttgtttgccattaattcatctttttaggtagaagacattaaaatcacaggtttatgaagaatctctgctcattggaatgaaatgcagtcatttgaaatgagaaaggccaggatccttttttgtaccttaccctgtcttcaagagtaaaggtgaacacttacagctctcctccttgatgtcaattttgtatgttgatcattccaaactgagaagaataaagccacattttagacatatttatagaatcaattaaagctatatgtctaaaattcgtagggcaacttctgagaagaaacaccgtctttttcttttttaatggaaagtgacaatgtgacattagtcatgttgtgtgcggtgacgcagagtaactgaggtaatctgactgttgcactatgtgacatatttcaggacgtacttgctgcatttgcagcagccctctctctctgtcccttcccacaattctgctgttgctgcaacttgagttaattgtgacaaatgcatctttgtgttatattttgtttgcttcataatttccagaactatatataaatatattttttaaatagcaaatattgtagttagtgagtgatgatcactccaaccttatccttaccatattggtttcagggataggattaagagtgtctttggaagagaaaaatacacacaaccctgtggtttagaatgacgctgaggccttaggctgtgggcctagaacaactatgtgagtgaattcacccatctcatactttgaatcaagcatgcattcctgtttctcattgtgaagtatccccagttgttttccttcagtgttgagtttttgtccttttaaattttattatattttgctctccctaacatttgactgttttttataaaagaaaagaaaaaaaaagaaataaataataccctcgatgccactggatactcacaagcagggttatgctccttcatcttgggcttgtttgcctaaatgaaagggtttaatttattttgtacctcctatgcgtgggatagtccagggtgcagagccaggacttgcttgtaattgcacctgctatacttaaatgtatagccctaggctcaatcacactatggaaagaaacaaaaaaagtatatttagagctttaaaagcttttttattttttgtggggatgagggtgggatgggaaagggatgtatggatgttattggcatttttaagtgtttagagttttttggggtttggggtggttttttttccttgttttccttttttccttttaattggatgcactgacctggcccaggaaatgaagagattctcttttgatgctattaccaatgttatcataaagtgacagtcacctgtaacaaaaaggtggcaccagacatgatcactgatgttttatttgcacatcaatatttttatttttgtattctggctcagctgcttctctgagtggagttaaggaatgagccacaaagatttttgtagtaggtatattggcattgcattttatattcctctatatttaattttgaaaacctaaaagaaggattgtgcatcttgagagaaagttgagcaaattgtgatctagcggaatgttaatttgtgctgcttcttgtgcacgatagcagcagtagtatctctcttggaaataaacatcccatattatgatgtctatgaatataggtttccttttcttccttccctccctccttcccccacctttctcttttttttttctctctcagcttctcttttcctccttccctcttcccttcctctttctttactttttttgaaatcacttattgtaaataagttgtaatccaaacctcatgtatcaatggggaattttcaaatataaatattaccaatgcattttctggttgttgtctgatttttgattgaagtataatgagaatgacatgtctgttgcttttggtttgaggacttcgctttagcttcataaatcttttggtattttagtatttcattgttttagcaggagagggcagcaaaagttcattttccctgttagtaatgctgtggttcatgatcggttttaaatttagctgtgtgtgtgtttttttaaacagcatctctttgtgagtagaggtaaaaatgaaacatttttgatatgaaaagttgcatatgaaaattatagactggttcaaccagacagtgaagacttctgatccacatcaaacttaaaatgccacaaaacaatcttccacctctggctaaaacatgctacttccttttcaaacaccacaaaatacaagctgagtcttaaacacttggaatttaaaatgtttttctttggaaatgatttgctttcttcaaagtggtaacagaaacaaaaatgaaggtgctccccaaaaagaaatgtaaccttcccctttcacagatgtgtgagaggttctgtactgtgggtgcatcataataaagaagcagtgaagagttttcaggtgac

SEQ ID NO: 427114 - DNA, 1418 bp, Homo sapiens
tgctggccagaaggttcggttgcgcgtgtgccatggactcagccgcccggtgatattgacaataggagagagaaaggggcattgactgggacccaccgcgggtagcgaaaggtggctctggcagcggcggctccagctcctgcggctcctcctccttattctgtccccttctcttgctgccgctgcagatccagtcttcctccctcccttccccccctccccacgtcgtcgccgccgccgccgggtccggggcaacgagctgaggcgccgcccgccaggaatgtgagcgaggagccaccggcggagccgcaacggggtcggtgccgatttgatgggacgggcccgcgggggaggatcgtgaggccgccgccgccaccggaacgctgaggttcgggtccggccgtgaggcctagaggctccgccgccgcggaaccggagggaccccgtaccggacagccgtcgccccaggctccccgcagctgcccggacctccccctgcacgtcccggtcccgccgcccgcccccgctgcggccacctcgcccgtctcccgcccctccaagccacagatcatcttcggattcttccccagaagcttcaagtagggatatgtcctcagcaccaactactcctccatcagtggataaagtagacggattttctcggaagtccgtcagaaaagccagacagaagaggtcgcaaagttcctcacagtttaggtctcaaggcaagcctattgagttaacacctctgccgctgctaaaagacgttccatcctcagagcagcctgaactgttcctaaagaaacttcagcagtgctgtgtcatttttgacttcatggacacgctatctgatcttaaaatgaaagaatacaagcgctccactcttaatgaactggtggactacattacaataagcagaggctgtttgacagagcagacttaccctgaagtagttagaatggtatcttgcaatatattcagaactctccctcctagtgacagcaatgaatttgatccagaagaagatgaacctacccttgaggcatcgtggccacacttacagcttgtatatgaatttttcatacgatttttggaaagccaagaattccaacccagcattgccaaaaaatatatagatcagaaatttgtattacagcttctggagctatttgacagcgaagaccctcgggaacgggactacttaaaaacagtcttacacagaatttatggcaagtttcttggtcttagagcatttatccgaaaacagattaacaatatttttctaaggtttgttacagaaaccaaagacctaaatcttgtcaccaagaaacatgttacatgattttaataagttccctgatagaagagctggggtgctctggggaaatattggagggtcatccattccacattaaaga

SEQ ID NO: 427115 - DNA, 274 bp, Homo sapiens
tattcatattattacttttattgttgttattttgtatttgtatttctttagtggaatataagctccttgtctgacttgtttatcatgatatgcccaaagactagcactgtgcttggcacataatagatattcaacacattttttgaggaaggaagaaggggattttaaataatagaattcctaaatccttttctgaaaccgcctttgacagctataatgtctttcatttacaacagcttctggagctatttgacagcgaagaccctcgggaacg

SEQ ID NO: 427116 - DNA, 436 bp, Homo sapiens
tagggatatgtcctcagcaccaactactcctccatcagtggataaagtagacggattttctcggaagtccgtcagaaaagccagacagaagaggtcgcaaagttcctcacagtttaggtctcaaggcaagcctattgagttaacacctctgccgctgctaaaaggtaaggctcatgaccaggtgatgcattctttttcaattgatctttctacatctatatataatttcctttttgtagagttttatatgtgttgcaaattgaagggatgggatacttcacatacattgaagttactaatgtgtgaccaaatatacccactctcctttttaaaggctcaatttagtctgtctttgggcaagttaaaagaaacattatcaggagaatatctcacattgatgagtaggtaaactaagtactagagaaactttaagatg

SEQ ID NO: 427117 - DNA, 962 bp, Homo sapiens
ctcccgccggcgcacccctccctcggctccgcccgcggcccgcttcttcctcccgcgggcggcccagccctagcgccccgcgctccgcgggcagccccctgccgccgcgccatgtccgccggctggttccggcgccgcttcctgcctggggagccgctccccgcgccgcggccgcctgggccgcatgccagccccgtgccctaccgacggccccgcttccttcgcggctccagctccagccccggggcggccgacgcctcgcgccgcccagactcccggcccgtgcgcagccccgcacgaggacgcacgctaccctggaatgcaggctacgccgagattatcaatgcagagaaatctgaattcaatgaggatcaagccgcctgtgggaagctgtgcatccggagatgtgagtttggggctgaagaagagtggctgaccctgtgcccagaggaggatgaggtgatcgggcgggagctggaggcctcaggccagatgggcggctgcacagccctggtggctgtgtccctgcagggaaagctgtacatggccaatgctggggatagcagggccatcttggtgcggagagatgagatacggccactgagcttcgagttcaccccagagactgagcggcagcggatccagcagctggcctttgtctatcctgagcttctggctggtgagttcacccgactggagttccctcggcggctgaagggggatgacttgggacagaaggttttgttcagggatcaccacatgagtggctggagctacaaacgtgtggagaaatcggatctcaagtacccactgatccatggacagggtaggcaggctcggttactaggaacactggctgtctcccggggcctgggagaccatcagctcagagtcctggacacaaacatccagctcaagcccttcttgctctctgtgccacaggtaagggggcaacgctgtcc

SEQ ID NO: 427118 - DNA, 2276 bp, Homo sapiens
ctcccgccggcgcacccctccctcggctccgcccgcggcccgcttcttcctcccgcgggcggcccagccctagcgccccgcgctccgcgggcagccccctgccgccgcgccatgtccgccggctggttccggcgccgcttcctgcctggggagccgctccccgcgccgcggccgcctgggccgcatgccagccccgtgccctaccgacggccccgcttccttcgcggctccagctccagccccggggcggccgacgcctcgcgccgcccagactcccggcccgtgcgcagccccgcacgaggacgcacgctaccctggaatgcaggctacgccgagattatcaatgcagagaaatctgaattcaatgaggatcaagccgcctgtgggaagctgtgcatccggagatgtgagtttggggctgaagaagagtggctgaccctgtgcccagaggagttcctgacaggccattactgggcactgttcgatgggcacggcggtcctgcagcagccatcttggctgccaacaccctgcactcctgcttgcgccggcagctggaggccgtggtggaaggcttggtggccactcagccccccatgcacctcaatggccgctgcatctgccccagtgaccctcagtttgtggaggaaaagggcatcagggcagaagacttggtgatcggggcattggagagtgcctttcaggaatgtgatgaggtgatcgggcgggagctggaggcctcaggccagatgggcggctgcacagccctggtggctgtgtccctgcagggaaagctgtacatggccaatgctggggatagcagggccatcttggtgcggagagatgagatacggccactgagcttcgagttcaccccagagactgagcggcagcggatccagcagctggcctttgtctatcctgagcttctggctggtgagttcacccgactggagttccctcggcggctgaagggggatgacttgggacagaaggttttgttcagggatcaccacatgagtggctggagctacaaacgtgtggagaaatcggatctcaagtacccactgatccatggacagggtaggcaggctcggttactaggaacactggctgtctcccggggcctgggagaccatcagctcagagtcctggacacaaacatccagctcaagcccttcttgctctctgtgccacaggtgactgtgctggatgtggaccagctggagctacaggaggatgatgtggttgtcatggcaactgatggactctgggatgtactgtccaacgagcaggtggcatggctggtgcggagcttcctccctgggaaccaagaggacccacacaggttctcaaagctggcccagatgctgatacacagcacacagggaaaggaagacagtctcacagaggaagggcaggtgtcctacgatgacgtctctgtgttcgtgattcccttgcacagtcagggccaagagagcagtgaccactgaggattcagacactgtatcccagaactgctctagtgcccgggtgtggtctgggcatccctccagtgtgaccaagagcaaatcctgcctgccctatccctagccaccgcccagtgctctcactatccacctcaacacacatccatctcaagaggaacatttataccaggcagtcagagctggaagtgtatggagagcccagcccaccaggtcctgccttttgcggtgataaccttctctggcagagtgactttacaacttaactaggaaacccatgtgaggctcctcagacaggatcttgaacagcccaaagtatcattctcagataggggcacccaagctaagggtattagccaaagatgccaggatgggtagctagcccatgtttagatccaggtctccaattcatggttatcagggcatgtgttcaacaacccccaaagtccacgcaggtggcttgtagaaacctttgggcagcctcatgtctgctaaaacagccatcttcaagacagcccctgaaaagagaccagttcaggtcctgccctgctgttctttgctggagatgaggaacaggtgctggggctaaagtttggggtagagcacaagggacaagaggaactcttggagttggctgggtgagagggctctccatttgctacctgtagtagcctgcctcttaactggttgcttctccctagttccagccctgccctggtctgatgccccaacactgcccttgctttgttttccctgtcacctccctattattaaatgttttctacagaaga

SEQ ID NO: 427119 - DNA, 2301 bp, Homo sapiens
ctcccgccggcgcacccctccctcggctccgcccgcggcccgcttcttcctcccgcgggcggcccagccctagcgccccgcgctccgcgggcagccccctgccgccgcgccatgtccgccggctggttccggcgccgcttcctgcctggggagccgctccccgcgccgcggccgcctgggccgcatgccagccccgtgccctaccgacggccccgcttccttcgcggctccagctccagccccggggcggccgacgcctcgcgccgcccagactcccggcccgtgcgcagccccgcacgaggacgcacgctaccctggaatgcaggctacgccgagattatcaatgcagagaaatctgaattcaatgaggatcaagccgcctgtgggaagctgtgcatccggagatgtgagtttggggctgaagaagagtggctgaccctgtgcccagaggagttcctgacaggccattactgggcactgttcgatgggcacggcggtcctgcagcagccatcttggctgccaacaccctgcactcctgcttgcgccggcagctggaggccgtggtggaaggcttggtggccactcagccccccatgcacctcaatggccgctgcatctgccccagtgaccctcagtttgtggaggaaaagggcatcagggcagaagacttggtgatcggggcattggagagtgcctttcaggaatgtgatgaggtgatcgggcgggagctggaggcctcaggccagatgggcggctgcacagccctggtggctgtgtccctgcagggaaagctgtacatggccaatgctggggatagcagggccatcttggtgcggagagatgagatacggccactgagcttcgagttcaccccagagactgagcggcagcggatccagcagctggcctttgtctatcctgagcttctggctggtgagttcacccgactggagttccctcggcggctgaagggggatgacttgggacagaaggttttgttcagggatcaccacatgagtggctggagctacaaacgtgtggagaaatcggatctcaagtacccactgatccatggacagggtaggcaggctcggttactaggaacactggctgtctcccggggcctgggagaccatcagctcagagtcctggacacaaacatccagctcaagcccttcttgctctctgtgccacaggtgactgtgctggatgtggaccagctggagctacaggaggatgatgtggttgtcatggcaactgatggactctgggatgtactgtccaacgagcaggtggcatggctggtgcggagcttcctccctgggaaccaagaggacccacacagtctatctgcaggatggtcttcacaggttctcaaagctggcccagatgctgatacacagcacacagggaaaggaagacagtctcacagaggaagggcaggtgtcctacgatgacgtctctgtgttcgtgattcccttgcacagtcagggccaagagagcagtgaccactgaggattcagacactgtatcccagaactgctctagtgcccgggtgtggtctgggcatccctccagtgtgaccaagagcaaatcctgcctgccctatccctagccaccgcccagtgctctcactatccacctcaacacacatccatctcaagaggaacatttataccaggcagtcagagctggaagtgtatggagagcccagcccaccaggtcctgccttttgcggtgataaccttctctggcagagtgactttacaacttaactaggaaacccatgtgaggctcctcagacaggatcttgaacagcccaaagtatcattctcagataggggcacccaagctaagggtattagccaaagatgccaggatgggtagctagcccatgtttagatccaggtctccaattcatggttatcagggcatgtgttcaacaacccccaaagtccacgcaggtggcttgtagaaacctttgggcagcctcatgtctgctaaaacagccatcttcaagacagcccctgaaaagagaccagttcaggtcctgccctgctgttctttgctggagatgaggaacaggtgctggggctaaagtttggggtagagcacaagggacaagaggaactcttggagttggctgggtgagagggctctccatttgctacctgtagtagcctgcctcttaactggttgcttctccctagttccagccctgccctggtctgatgccccaacactgcccttgctttgttttccctgtcacctccctattattaaatgttttctacagaaga

SEQ ID NO: 427120 - DNA, 2922 bp, Homo sapiens
ctcccgccggcgcacccctccctcggctccgcccgcggcccgcttcttcctcccgcgggcggcccagccctagcgccccgcgctccgcgggcagccccctgccgccgcgccatgtccgccggctggttccggcgccgcttcctgcctggggagccgctccccgcgccgcggccgcctgggccgcatgccagccccgtgccctaccgacggccccgcttccttcgcggctccagctccagccccggggcggccgacgcctcgcgccgcccagactcccggcccgtgcgcagccccgcacgaggacgcacgctaccctggaatgcaggctacgccgagtgagtgcccctccccgacccccagctcaggcccgggcctgaacccgcttcgggtcctgcgcccgcctagaaagcgggaggagctgagtgacagtccccacccacctgtggacagccccttcttgccctcacctccgaatcctgacaacttcccggtcatcccgacccagcgttttccttgggattccgacctccccctcagagaagacaggaggtcgggaaggacctgcagcccaggggcttccaagatgaggcccagagactcggtagagttccagcattcggggctttggagatttcccctcgccctctacccccaacatctcaccctgggtatgacctgcgctgtatggaacagggctttgggctgcgacaggacaggggcaggaatggcaacctacccttaccgtctagccctgggtcaccaggtaggctccagaggagctgggccctgacttttaccttagccatgaggccagtgaagttaggaagcttacatcgtggttgtctaagtgtgtgttagggacagcactggggagctgttgccccagagggaggggtcttctccctgtgctggcttgggtccctgtgcccatggggacataggtgtgtccctggagggtcgcttaccatttcccggcctcaggattatcaatgcagagaaatctgaattcaatgaggatcaagccgcctgtgggaagctgtgcatccggagatgtgagtttggggctgaagaagagtggctgaccctgtgcccagaggagttcctgacaggccattactgggcactgttcgatgggcacggcggtcctgcagcagccatcttggctgccaacaccctgcactcctgcttgcgccggcagctggaggccgtggtggaaggcttggtggccactcagccccccatgcacctcaatggccgctgcatctgccccagtgaccctcagtttgtggaggaaaagggcatcagggcagaagacttggtgatcggggcattggagagtgcctttcaggaatgtgatgaggtgatcgggcgggagctggaggcctcaggccagatgggcggctgcacagccctggtggctgtgtccctgcagggaaagctgtacatggccaatgctggggatagcagggccatcttggtgcggagagatgagatacggccactgagcttcgagttcaccccagagactgagcggcagcggatccagcagctggcctttgtctatcctgagcttctggctggtgagttcacccgactggagttccctcggcggctgaagggggatgacttgggacagaaggttttgttcagggatcaccacatgagtggctggagctacaaacgtgtggagaaatcggatctcaagtacccactgatccatggacagggtaggcaggctcggttactaggaacactggctgtctcccggggcctgggagaccatcagctcagagtcctggacacaaacatccagctcaagcccttcttgctctctgtgccacaggtgactgtgctggatgtggaccagctggagctacaggaggatgatgtggttgtcatggcaactgatggactctgggatgtactgtccaacgagcaggtggcatggctggtgcggagcttcctccctgggaaccaagaggacccacacaggttctcaaagctggcccagatgctgatacacagcacacagggaaaggaagacagtctcacagaggaagggcaggtgtcctacgatgacgtctctgtgttcgtgattcccttgcacagtcagggccaagagagcagtgaccactgaggattcagacactgtatcccagaactgctctagtgcccgggtgtggtctgggcatccctccagtgtgaccaagagcaaatcctgcctgccctatccctagccaccgcccagtgctctcactatccacctcaacacacatccatctcaagaggaacatttataccaggcagtcagagctggaagtgtatggagagcccagcccaccaggtcctgccttttgcggtgataaccttctctggcagagtgactttacaacttaactaggaaacccatgtgaggctcctcagacaggatcttgaacagcccaaagtatcattctcagataggggcacccaagctaagggtattagccaaagatgccaggatgggtagctagcccatgtttagatccaggtctccaattcatggttatcagggcatgtgttcaacaacccccaaagtccacgcaggtggcttgtagaaacctttgggcagcctcatgtctgctaaaacagccatcttcaagacagcccctgaaaagagaccagttcaggtcctgccctgctgttctttgctggagatgaggaacaggtgctggggctaaagtttggggtagagcacaagggacaagaggaactcttggagttggctgggtgagagggctctccatttgctacctgtagtagcctgcctcttaactggttgcttctccctagttccagccctgccctggtctgatgccccaacactgcccttgctttgttttccctgtcacctccctattattaaatgttttctacagaaga

SEQ ID NO: 427121 - DNA, 2623 bp, Homo sapiens
ctcccgccggcgcacccctccctcggctccgcccgcggcccgcttcttcctcccgcgggcggcccagccctagcgccccgcgctccgcgggcagccccctgccgccgcgccatgtccgccggctggttccggcgccgcttcctgcctggggagccgctccccgcgccgcggccgcctgggccgcatgccagccccgtgccctaccgacggccccgcttccttcgcggctccagctccagccccggggcggccgacgcctcgcgccgcccagactcccggcccgtgcgcagccccgcacgaggacgcacgctaccctggaatgcaggctacgccgagattatcaatgcagagaaatctgaattcaatgaggatcaagccgcctgtgggaagctgtgcatccggagatgtgagtttggggctgaagaagagtggctgaccctgtgcccagaggagttcctgacaggccattactgggcactgttcgatgggcacggcggtcctgcagcagccatcttggctgccaacaccctgcactcctgcttgcgccggcagctggaggccgtggtggaaggcttggtggccactcagccccccatgcacctcaatggccgctgcatctgccccagtgaccctcagtttgtggaggaaaagggcatcagggcagaagacttggtgatcggggcattggagagtgcctttcaggaatgtgatgaggtgatcgggcgggagctggaggcctcaggccagatgggcggctgcacagccctggtggctgtgtccctgcagggaaagctgtacatggccaatgctggggatagcagggccatcttggtgcggagagatgagatacggccactgagcttcgagttcaccccagagactgagcggcagcggatccagcagctggcctttgtctatcctgagcttctggctggtgagttcacccgactggagttccctcggcggctgaagggggatgacttgggacagaaggttttgttcagggatcaccacatgagtggctggagctacaaacgtgtggagaaatcggatctcaagtacccactgatccatggacagggtaggcaggctcggttactaggaacactggctgtctcccggggcctgggagaccatcagctcagagtcctggacacaaacatccagctcaagcccttcttgctctctgtgccacaggtgactgtgctggatgtggaccagctggagctacaggaggatgatgtggttgtcatggcaactgatggactctgggatgtactgtccaacgagcaggtggcatggctggtgcggagcttcctccctgggaaccaagaggacccacacaggtactgtagctgctggggacctgcctgggcctgggttggtgccagcagcaagcccaagtagttatggctgagaagacagagcactgacaatgagctggcagctggccaggatcagggctgtctcaagcttcttggaggaggcagggagaccgtgggttccgaaaatccctggatttagactctcatggtccagcccgtggccctcccagacttgctgcttgcttggtccacagtcggactgcattgcttgggtccccatgtccagccttgtgcagtgagttctcctaaggtctggccttgcccctttgctctgcccctgaagtctatctgcaggatggtcttcacaggttctcaaagctggcccagatgctgatacacagcacacagggaaaggaagacagtctcacagaggaagggcaggtgtcctacgatgacgtctctgtgttcgtgattcccttgcacagtcagggccaagagagcagtgaccactgaggattcagacactgtatcccagaactgctctagtgcccgggtgtggtctgggcatccctccagtgtgaccaagagcaaatcctgcctgccctatccctagccaccgcccagtgctctcactatccacctcaacacacatccatctcaagaggaacatttataccaggcagtcagagctggaagtgtatggagagcccagcccaccaggtcctgccttttgcggtgataaccttctctggcagagtgactttacaacttaactaggaaacccatgtgaggctcctcagacaggatcttgaacagcccaaagtatcattctcagataggggcacccaagctaagggtattagccaaagatgccaggatgggtagctagcccatgtttagatccaggtctccaattcatggttatcagggcatgtgttcaacaacccccaaagtccacgcaggtggcttgtagaaacctttgggcagcctcatgtctgctaaaacagccatcttcaagacagcccctgaaaagagaccagttcaggtcctgccctgctgttctttgctggagatgaggaacaggtgctggggctaaagtttggggtagagcacaagggacaagaggaactcttggagttggctgggtgagagggctctccatttgctacctgtagtagcctgcctcttaactggttgcttctccctagttccagccctgccctggtctgatgccccaacactgcccttgctttgttttccctgtcacctccctattattaaatgttttctacagaaga

SEQ ID NO: 427122 - DNA, 2882 bp, Homo sapiens
ctcccgccggcgcacccctccctcggctccgcccgcggcccgcttcttcctcccgcgggcggcccagccctagcgccccgcgctccgcgggcagccccctgccgccgcgccatgtccgccggctggttccggcgccgcttcctgcctggggagccgctccccgcgccgcggccgcctgggccgcatgccagccccgtgccctaccgacggccccgcttccttcgcggctccagctccagccccggggcggccgacgcctcgcgccgcccagactcccggcccgtgcgcagccccgcacgaggacgcacgctaccctggaatgcaggctacgccgagattatcaatgcagagaaatctgaattcaatgaggatcaagccgcctgtgggaagctgtgcatccggagatgtgagtttggggctgaagaagagtggctgaccctgtgcccagaggagttcctgacaggccattactgggcactgttcgatgggcacggcggtcctgcagcagccatcttggctgccaacaccctgcactcctgcttgcgccggcagctggaggccgtggtggaaggcttggtggccactcagccccccatgcacctcaatggccgctgcatctgccccagtgaccctcagtttgtggaggaaaagggcatcagggcagaagacttggtgatcggggcattggagagtgcctttcaggaatgtgatgaggtgatcgggcgggagctggaggcctcaggccagatgggcggctgcacagccctggtggctgtgtccctgcagggaaagctgtacatggccaatgctggggatagcagggccatcttggtgcggagagatgagatacggccactgagcttcgagttcaccccagagactgagcggcagcggatccagcagctggcctttgtctatcctgagcttctggctggtgagttcacccgactggagttccctcggcggctgaagggggatgacttgggacagaaggttttgttcagggatcaccacatgagtggctggagctacaaacgtgtggagaaatcggatctcaagtacccactgatccatggacagggtaggcaggctcggttactaggaacactggctgtctcccggggcctgggagaccatcagctcagagtcctggacacaaacatccagctcaagcccttcttgctctctgtgccacaggtgactgtgctggatgtggaccagctggagctacaggaggatgatgtggttgtcatggcaactgatggactctgggatgtactgtccaacgagcaggtggcatggctggtgcggagcttcctccctgggaaccaagaggacccacacaggttctcaaagctggcccagatgctgatacacagcacacagggaaaggaagacagtctcacagaggaagggcaggtgtcctacgatgacgtctctgtgttcgtgattcccttgcacagtcagggccaagagagcagtgaccactgaggattcagacactgtatcccagaactgctctagtgcccgggtgtggtctgggcatccctccagtgtgaccaagagcaaatcctgcctgccctatccctagccaccgcccagtgctctcactatccacctcaacacacatccatctcaagaggaacatttataccaggcagtcagagctggaagtgtatggagagcccagcccaccaggtcctgccttttgcggtgataaccttctctggcagagtgactttacaacttaactaggaaacccatgtgaggctcctcagacaggatcttgaacagcccaaagtatcattctcagataggggcacccaagctaagggtattagccaaagatgccaggatgggtagctagcccatgtttagatccaggtctccaattcatggttatcagggcatgtgttcaacaacccccaaagtccacgcaggtggcttgtagaaacctttgggcagcctcatgtctgctaaaacagccatcttcaagacagcccctgaaaagagaccagttcaggtcctgccctgctgttctttgctggagatgaggaacaggtgctggggctaaagtttggggtagagcacaagggacaagaggaactcttggagttggctgggtgagagggctctccatttgctacctgtagtagcctgcctcttaactggttgcttctccctagttccagccctgccctggtctgatgccccaacactgcccttgctttgttttccctgtcacctccctattattaaatgttttctacagaagaaaaaaaaacatggaaaaaaaaaatatcactaaaaaaaagaaactaagaaataggaaaaaacaggggcgcgcacaaagctggcccagggagaccttcaatacttctgaaccctcagctttcttgtgtgaagaaggccccctctcacgtcaggctaattatccaaaggacgaaacaagagtactatgtcctcgccccagtctattgaccatgaaagcgaggtggcgtcctcagagtgaccggcacacacttgtggacgagtccaccgcaatgtgcagctgtgctgaaaggaatcactttatacccacgctgggtgtattcttgcagtggcgtaatgttctgaattccactttagtgctgaacgacactactgaaccccattattgttttttcccagtacgatgaatataaatttgatgcaagccacttaactgcattggtctgtcctatatttgagacaagaaatctgaatcttgaagccaccgggcgaggcattttcttgcaaaaacgacgcccaggggacaattactaaagaacacgggcaacacaaaaaggccgtaacagacaggacattgaaagcaaggtgggtatcgcaggaagaccaaatcc

SEQ ID NO: 427123 - DNA, 2021 bp, Homo sapiens
ctcccgccggcgcacccctccctcggctccgcccgcggcccgcttcttcctcccgcgggcggcccagccctagcgccccgcgctccgcgggcagccccctgccgccgcgccatgtccgccggctggttccggcgccgcttcctgcctggggagccgctccccgcgccgcggccgcctgggccgcatgccagccccgtgccctaccgacggccccgcttccttcgcggctccagctccagccccggggcggccgacgcctcgcgccgcccagactcccggcccgtgcgcagccccgcacgaggacgcacgctaccctggaatgcaggctacgccgagattatcaatgcagagaaatctgaattcaatgaggatcaagccgcctgtgggaagctgtgcatccggagatgtgagtttggggctgaagaagagtggctgaccctgtgcccagaggaggatgaggtgatcgggcgggagctggaggcctcaggccagatgggcggctgcacagccctggtggctgtgtccctgcagggaaagctgtacatggccaatgctggggatagcagggccatcttggtgcggagagatgagatacggccactgagcttcgagttcaccccagagactgagcggcagcggatccagcagctggcctttgtctatcctgagcttctggctggtgagttcacccgactggagttccctcggcggctgaagggggatgacttgggacagaaggttttgttcagggatcaccacatgagtggctggagctacaaacgtgtggagaaatcggatctcaagtacccactgatccatggacagggtaggcaggctcggttactaggaacactggctgtctcccggggcctgggagaccatcagctcagagtcctggacacaaacatccagctcaagcccttcttgctctctgtgccacaggtgactgtgctggatgtggaccagctggagctacaggaggatgatgtggttgtcatggcaactgatggactctgggatgtactgtccaacgagcaggtggcatggctggtgcggagcttcctccctgggaaccaagaggacccacacaggttctcaaagctggcccagatgctgatacacagcacacagggaaaggaagacagtctcacagaggaagggcaggtgtcctacgatgacgtctctgtgttcgtgattcccttgcacagtcagggccaagagagcagtgaccactgaggattcagacactgtatcccagaactgctctagtgcccgggtgtggtctgggcatccctccagtgtgaccaagagcaaatcctgcctgccctatccctagccaccgcccagtgctctcactatccacctcaacacacatccatctcaagaggaacatttataccaggcagtcagagctggaagtgtatggagagcccagcccaccaggtcctgccttttgcggtgataaccttctctggcagagtgactttacaacttaactaggaaacccatgtgaggctcctcagacaggatcttgaacagcccaaagtatcattctcagataggggcacccaagctaagggtattagccaaagatgccaggatgggtagctagcccatgtttagatccaggtctccaattcatggttatcagggcatgtgttcaacaacccccaaagtccacgcaggtggcttgtagaaacctttgggcagcctcatgtctgctaaaacagccatcttcaagacagcccctgaaaagagaccagttcaggtcctgccctgctgttctttgctggagatgaggaacaggtgctggggctaaagtttggggtagagcacaagggacaagaggaactcttggagttggctgggtgagagggctctccatttgctacctgtagtagcctgcctcttaactggttgcttctccctagttccagccctgccctggtctgatgccccaacactgcccttgctttgttttccctgtcacctccctattattaaatgttttctacagaaga

SEQ ID NO: 427124 - DNA, 2287 bp, Homo sapiens
ctcccgccggcgcacccctccctcggctccgcccgcggcccgcttcttcctcccgcgggcggcccagccctagcgccccgcgctccgcgggcagccccctgccgccgcgccatgtccgccggctggttccggcgccgcttcctgcctggggagccgctccccgcgccgcggccgcctgggccgcatgccagccccgtgccctaccgacggccccgcttccttcgcggctccagctccagccccggggcggccgacgcctcgcgccgcccagactcccggcccgtgcgcagccccgcacgaggacgcacgctaccctggaatgcaggctacgccgagtgagtgcccctccccgacccccagctcaggcccgggcctgaacccgcttcgggtcctgcgcccgcctagaaagcgggaggagctgagtgacagtccccacccacctgtggacagccccttcttgccctcacctccgaatcctgacaacttcccggtcatcccgacccagcgttttccttgggattccgacctccccctcagagaagacaggaggtcgggaaggacctgcagcccaggggcttccaagatgaggcccagagactcggattatcaatgcagagaaatctgaattcaatgaggatcaagccgcctgtgggaagctgtgcatccggagatgtgagtttggggctgaagaagagtggctgaccctgtgcccagaggaggatgaggtgatcgggcgggagctggaggcctcaggccagatgggcggctgcacagccctggtggctgtgtccctgcagggaaagctgtacatggccaatgctggggatagcagggccatcttggtgcggagagatgagatacggccactgagcttcgagttcaccccagagactgagcggcagcggatccagcagctggcctttgtctatcctgagcttctggctggtgagttcacccgactggagttccctcggcggctgaagggggatgacttgggacagaaggttttgttcagggatcaccacatgagtggctggagctacaaacgtgtggagaaatcggatctcaagtacccactgatccatggacagggtaggcaggctcggttactaggaacactggctgtctcccggggcctgggagaccatcagctcagagtcctggacacaaacatccagctcaagcccttcttgctctctgtgccacaggtgactgtgctggatgtggaccagctggagctacaggaggatgatgtggttgtcatggcaactgatggactctgggatgtactgtccaacgagcaggtggcatggctggtgcggagcttcctccctgggaaccaagaggacccacacaggttctcaaagctggcccagatgctgatacacagcacacagggaaaggaagacagtctcacagaggaagggcaggtgtcctacgatgacgtctctgtgttcgtgattcccttgcacagtcagggccaagagagcagtgaccactgaggattcagacactgtatcccagaactgctctagtgcccgggtgtggtctgggcatccctccagtgtgaccaagagcaaatcctgcctgccctatccctagccaccgcccagtgctctcactatccacctcaacacacatccatctcaagaggaacatttataccaggcagtcagagctggaagtgtatggagagcccagcccaccaggtcctgccttttgcggtgataaccttctctggcagagtgactttacaacttaactaggaaacccatgtgaggctcctcagacaggatcttgaacagcccaaagtatcattctcagataggggcacccaagctaagggtattagccaaagatgccaggatgggtagctagcccatgtttagatccaggtctccaattcatggttatcagggcatgtgttcaacaacccccaaagtccacgcaggtggcttgtagaaacctttgggcagcctcatgtctgctaaaacagccatcttcaagacagcccctgaaaagagaccagttcaggtcctgccctgctgttctttgctggagatgaggaacaggtgctggggctaaagtttggggtagagcacaagggacaagaggaactcttggagttggctgggtgagagggctctccatttgctacctgtagtagcctgcctcttaactggttgcttctccctagttccagccctgccctggtctgatgccccaacactgcccttgctttgttttccctgtcacctccctattattaaatgttttctacagaaga

SEQ ID NO: 427125 - DNA, 2274 bp, Homo sapiens
  misc_feature (1561)..(1561): n is a, c, g, or t
  misc_feature (1600)..(1601): n is a, c, g, or t
  misc_feature (1688)..(1689): n is a, c, g, or t
  misc_feature (1694)..(1694): n is a, c, g, or t
  misc_feature (1705)..(1705): n is a, c, g, or t
  misc_feature (1707)..(1707): n is a, c, g, or t
  misc_feature (1709)..(1709): n is a, c, g, or t
  misc_feature (1722)..(1723): n is a, c, g, or t
  misc_feature (1732)..(1732): n is a, c, g, or t
  misc_feature (1763)..(1763): n is a, c, g, or t
  misc_feature (1797)..(1797): n is a, c, g, or t
  misc_feature (1803)..(1803): n is a, c, g, or t
  misc_feature (1806)..(1806): n is a, c, g, or t
  misc_feature (1812)..(1812): n is a, c, g, or t
  misc_feature (1822)..(1822): n is a, c, g, or t
  misc_feature (1869)..(1869): n is a, c, g, or t
  misc_feature (1883)..(1883): n is a, c, g, or t
  misc_feature (1899)..(1899): n is a, c, g, or t
  misc_feature (1927)..(1928): n is a, c, g, or t
  misc_feature (1947)..(1947): n is a, c, g, or t
ctcccgccggcgcacccctccctcggctccgcccgcggcccgcttcttcctcccgcgggcggcccagccctagcgccccgcgctccgcgggcagccccctgccgccgcgccatgtccgccggctggttccggcgccgcttcctgcctggggagccgctccccgcgccgcggccgcctgggccgcatgccagccccgtgccctaccgacggccccgcttccttcgcggctccagctccagccccggggcggccgacgcctcgcgccgcccagactcccggcccgtgcgcagccccgcacgaggacgcacgctaccctggaatgcaggctacgccgagattatcaatgcagagaaatctgaattcaatgaggatcaagccgcctgtgggaagctgtgcatccggagatgtgagtttggggctgaagaagagtggctgaccctgtgcccagaggagttcctgacaggccattactgggcactgttcgatgggcacggcggtcctgcagcagccatcttggctgccaacaccctgcactcctgcttgcgccggcagctggaggccgtggtggaaggcttggtggccactcagccccccatgcacctcaatggccgctgcatctgccccagtgaccctcagtttgtggaggaaaagggcatcagggcagaagacttggtgatcggggcattggagagtgcctttcaggaatgtgatgaggtgatcgggcgggagctggaggcctcaggccagatgggcggctgcacagccctggtggctgtgtccctgcagggaaagctgtacatggccaatgctggggatagcagggccatcttggtgcggagagatgagatacggccactgagcttcgagttcaccccagagactgagcggcagcggatccagcagctggcctttgtctatcctgagcttctggctggtgagttcacccgactggagttccctcggcggctgaagggggatgacttgggacagaaggttttgttcagggatcaccacatgagtggctggagctacaaacgtgtggagaaatcggatctcaagtacccactgatccatggacagggtaggcaggctcggttactaggaacactggctgtctcccggggcctgggagaccatcagctcagagtcctggacacaaacatccagctcaagcccttcttgctctctgtgccacaggtgactgtgctggatgtggaccagctggagctacaggaggatgatgtggttgtcatggcaactgatggactctgggatgtactgtccaacgagcaggtggcatggctggtgcggagcttcctccctgggaaccaagaggacccacacaggttctcaaagctggcccagatgctgatacacagcacacagggaaaggaagacagtctcacagaggaagggcaggtgtcctacgatgacgtctctgtgttcgtgattcccttgcacagtcagggccaagagagcagtgaccactgaggattcagacactgtatcccagaactgctctagtgcccgggtgtggtctgggcatccctccagagtaaanaaaaaaaaaaaatgaaaaaaaaaaaaaaaaaaaaaaacnnaaaactctaaaaaaaaaaaaaaaaaaaaaaaaaaaaaaaaaaaaaaaaaaaaaaaaaaaaaaaaaaacaaaaaatgaatgaaaaaannaacanacaaggtcctnantntaacggaaaaaannatctctggnaaaaaaaataaaaaaaaaaaaaaaaaaaaanaaaaaaaaaaaaaaaaaaaaaaactaaaaaaaancaaagnaanaaactnaaaaaggggnaacaaaacaaagggtataagaaaaaaaagcaaaaatgagaaacaaanaaatataaaaatcnaagacacaaaaaaaangaaaaaaagaaaaaaaaaaaaaaaaacnnaaaataaaaaaaagaagtnaaaaaaaaatttaggaaaaaaaaatataaaaaaacaccatcttcaagacagcccctgaaaagagaccagttcaggtcctgccctgctgttctttgctggagatgaggaacaggtgctggggctaaagtttggggtagagcacaagggacaagaggaactcttggagttggctgggtgagagggctctccatttgctacctgtagtagcctgcctcttaactggttgcttctccctagttccagccctgccctggtctgatgccccaacactgcccttgctttgttttccctgtcacctccctattattaaatgttttctacagaaga

SEQ ID NO: 427126 - DNA, 1122 bp, Homo sapiens
ctcccgccggcgcacccctccctcggctccgcccgcggcccgcttcttcctcccgcgggcggcccagccctagcgccccgcgctccgcgggcagccccctgccgccgcgccatgtccgccggctggttccggcgccgcttcctgcctggggagccgctccccgcgccgcggccgcctgggccgcatgccagccccgtgccctaccgacggccccgcttccttcgcggctccagctccagccccggggcggccgacgcctcgcgccgcccagactcccggcccgtgcgcagccccgcacgaggacgcacgctaccctggaatgcaggctacgccgagtgagtgcccctccccgacccccagctcaggcccgggcctgaacccgcttcgggtcctgcgcccgcctagaaagcgggaggagctgagtgacagtccccacccacctgtggacagccccttcttgccctcacctccgaatcctgacaacttcccggtcatcccgacccagcgttttccttgggattccgacctccccctcagagaagacaggaggtcgggaaggacctgcagcccaggggcttccaagatgaggcccagagactcggtagagttccagcattcggggctttggagatttcccctcgccctctacccccaacatctcaccctgggtatgacctgcgctgtatggaacagggctttgggctgcgacaggacaggggcaggaatggcaacctacccttaccgtctagccctgggtcaccaggtaggctccagaggagctgggccctgacttttaccttagccatgaggccagtgaagttaggaagcttacatcgtggttgtctaagtgtgtgttagggacagcactggggagctgttgccccagagggaggggtcttctccctgtgctggcttgggtccctgtgcccatggggacataggtgtgtccctggagggtcgcttaccatttcccggcctcaggattatcaatgcagagaaatctgaattcaatgaggatcaagccgcctgtgggaagctgtgcatccggagatgtgagtttggggctgaagaagagtggctgaccctgtgcccagaggaggggataatcactagtgaattcgc

SEQ ID NO: 427127 - DNA, 759 bp, Homo sapiens
tactccattttatttttcacattggccagtgtaaacttttaagtttacagttgctttgttatcttttcttacagggttacgactcactgattaaaaagagggactttttcaaatactttgcacttttgattgtgtattatggataccaaggaagagaagaaggaacggaaacaaagttattttgctcgactgaaaaagaaaaaacaagccaaacaaaatgcagagacagcctcagctgtagctacaaggactcatactgggaaggaagataataatacagtagttttagagccagacaagtgcaacattgctgtggaagaggaatatatgactgatgagaaaaaaaagagaaaaagtaatcagttaaaggagatcaggcgtacagaactaaagagatattatagtattggtgagtattcatggcgttactgcagtattttcatttaaaaaatctataagaatttttaaaagactatcatttgtgattgatcataataatggtaacagtttatggagcagctgctatgtgcccctggcccttgctttacatacataatcttgtgtaaggggatcacactaaaataatgtctcatttaaatttgtgttcccagcatttagcacagtgcccagaatgtattgtgtactactaaacgtttatctaatgaagagtcactttctctttatgagaaatatttttcttaatgtatgtagacatattcataaatatgctgatagaaatgcctgtactttttggcattt

SEQ ID NO: 427128 - DNA, 751 bp, Homo sapiens
caaaggtgaaagtgtccttttacagtctcacagcgatgcctggcaggaagtgtgtttgctctaaatcctaatttgggtgtgttcctgtagaaatgttgaaacttctcctgagggaaacagaaactcaatcatgcaggaaactagatactgagaaaacagttgtagctcagcgtggctacaagtaactgtggtgtggaagcagagtagagagaaaacttgttcctcattagagagagagccacacttctcactgctcacaatgagaggccaaagattacccttggacatccagattttctattgtgccagacctgacgaagagccttttgtgaaggtatgttggagtgcgtcccgagggctaataaggtgctggtgaattctcagtgatgtacctccgagtttcttttgaaagtcgttctaattagaaaggattgtgctgacatttctaccagcaggtgttttattcattgcggagagggttatggtgtggttggctcttctcattggagccagaaatccatatttgattttttttcattccacaggctcattttatacttgtgataaacacagagtttgctgaaaacagagggtttatttcattcatttaagctggttgtggagtctggatagtgtttcactcaggttccccagaaatggtgaactagaagttaattcttatgtaatctggcaaacccgcgatatttatgcaggaaatagaaacagtgaagcttcacagaatctggcgttc

SEQ ID NO: 427129 - DNA, 5407 bp, Homo sapiens
cgatccggacgcggggccccgcgggcgcgcgcctcggagctcccgcctcctcctcttgctcctcctcggcgtacggtcctcccctgacccctccttccacccgccgagaggatgcgctccccggcgcccagcagcagaggccaccgctcccagaaatgcatgcgaccgatccccttctcccggaccccaggagccggcgcccccgccctgtagggttacgactcactgattaaaaagagggactttttcaaatactttgcacttttgattgtgtattatggataccaaggaagagaagaaggaacggaaacaaagttattttgctcgactgaaaaagaaaaaacaagccaaacaaaatgcagagacagcctcagctgtagctacaaggactcatactgggaaggaagataataatacagtagttttagagccagacaagtgcaacattgctgtggaagaggaatatatgactgatgagaaaaaaaagagaaaaagtaatcagttaaaggagatcaggcgtacagaactaaagagatattatagtattgatgacaatcaaaacaaaacacatgataaaaaagagaagaagatggtggttcagaagccccatgggactatggaatacactgctggaaaccaggacaccctaaactccatagcactgaaatttaacatcactcccaataaattggtggaactgaataaacttttcacacatactattgttccaggccaggtcctttttgtgccagatgccaactctccttccagtaccttaaggctatcatcatccagtcctggtgctactgtctctccttcatcatcagatgcagaatatgataaattgcctgatgctgacttagcacgaaaggccttgaaacccattgaaagagtcttatcgtctacttctgaagaagatgagccaggtgtggtgaaatttttaaaaatgaattgtcgatacttcaccgatggaaagggtgtggttggcggtgttatgatagtgactcctaacaacatcatgtttgaccctcataaatctgatcctctggttattgaaaatgggtgtgaggagtatggtctcatctgccccatggaagaggttgtttccattgcgctctacaatgacatttctcacatgaagatcaaagatgccttgccatcgcctggagaatgggaagacctggcttcagaaaaggatatcaacccattcagtaagttcaaatctatcaacaaggaaaaacgacagcagaatggagagaaaattatgacttcggattccagaccaatagtacctttggagaagtccacaggacatacacctacaaagccctcaggcagctctgtgtcagagaaattaaagaaactggactcctctagggagacatcccatggttctcccacagtgactaagctcagcaaggaaccttccgacacttcttctgcatttgaatctacagccaaagaaaactttctaggggaagatgatgattttgttgacttggaagaactttcttctcaaactggtggtggaatgcacaaaaaagacaccttgaaggagtgcctttctcttgacccagaggaacgaaagaaagctgagtcacaaataaacaattctgccgtggaaatgcaggtgcagtcagccctagcctttttgggaacagagaatgatgttgaactgaagggggcgctagatttagaaacctgtgagaagcaagatataatgccagaagtggacaagcagtctggttcgccagaaagccgagtagaaaacacactgaacatacatgaagatttagataaagttaaactcattgaatattacctgactaagaacaaagaagggccacaggtatctgaaaatttgcagaaaacagaattaagtgatggaaaaagtattgaaccagggggaatagacattacccttagtagttctctttcccaggcgggtgatcccataactgagggcaataaagagccagataagacctgggtgaaaaagggagagcccctcccggtaaaactgaactcttctacagaagcaaatgtgattaaagaggctctagactcctctttggaatctactctggacaacagctgtcaaggtgcacaaatggataataaatctgaagttcagttgtggctgttaaagagaattcaggtacccattgaagatatacttccttcaaaagaagaaaaaagcaagaccccacccatgttcctgtgcatcaaagtgggaaaaccaatgagaaaatcctttgccactcacactgcagccatggtccagcagtacggcaaacggagaaagcagccagagtactggtttgctgttcctcgggagagggtggatcatttgtacacattctttgttcagtggtctcccgatgtctatggaaaagatgccaaagagcaaggctttgtggtggtggagaaggaagaactgaacatgattgacaacttcttcagtgagccaacaaccaagagctgggagatcatcactgttgaagaggcaaagcgcaggaagagcacatgcagctactatgaagacgaggacgaagaggtgctgcctgtcctacggccccacagcgcgctcctggagaatatgcacatcgagcagctggcccgacgccttcctgcaagggtgcaagggtatccatggagactggcctatagcacgttagagcacgggaccagcttaaagacgctctaccggaaatcggcatcactagacagtcctgtcctattggtcatcaaagatatggataatcagatttttggagcatatgcaactcatcctttcaagttcagtgaccactattatggcacaggcgaaacttttctctacacattcagccctcattttaaggtctttaagtggagtggagaaaattcatactttatcaatggagacataagttctttagaacttggtggtggagggggacgatttggtttatggctagatgctgatttataccacggacgaagcaactcttgcagcactttcaataatgatattctttccaaaaaggaagacttcatagttcaggatctggaggtgtgggcatttgattgaaattcagactgccttaaaatataacattaaaaagactgggttcgatcagccctcctaaagctggctggaaaaagaagccccagcccagcctgcctcatcccaccccaatgcttcctttctgccatcatctcagagcatgatcacattgcagaaagattctggaaggtccatgtagagggcagacattgaagaaagaaacttaaaatccaggttgttgaaaagactttgtactcccacttcctccaaatccatacagtgaggaatcagagtgtttatagatatatgagttgaatgcaatttttatttttggtaactgtgaaaaataagatactgtggatatatacatgccttgtgtatttatcagcataattttcattaccaaaatgtacagctattatttgccatggaaaaggttagtctcatttagaaaaatcgaaagtgcacagcacttaaagggaatatatgaggttttttttttaaaaaaaaaacttttatttattatttgtagtatattgtctgaaatgtgtcggcagttttttttcttttaatgtgtcaaatcttgaaatattaaatgtatacattttgtgctatgttttgggaacaaatctgtttgatttatatagttttatattgaattttttttgccctgattgtttagggtgataggtcttaagcagcatatatctatatatctgtatgtgggtatatagagatatatgtgtgtgtgtatgtatatgtacatatacatatatatgagtgtataattctaaatttctaaaaactcattatgaatgttcatcaatttgactattataggccagctttccatttagtcaataaaagcgtacatttttagttacttaccttgaacatattcgtgtgaaaaagaatacatcatttctcacagtcttaagttgatatttatagaaatgaatacctttgtgaacctagacttagaacaaatcctgcttttgaaaaaaaatgttttgcttcttacaaaatcatttgtgttaataacaaaaactttattttcggagtgttctttgtataacttttccaagcttttacattaacgagcaggcctctgtcttaaaagggactcagtatattaatttctgcattttttaaatcaaatgaaaaacgtcaaattggaccaattgtcttggtttcttgattcatttatttgagaaaaaaacaatacaaagaaatgcattcatatcaaaattggaatagaaaggaaaacctatttttaagatatcaacctattttcacatcataaaacatctattacataaaataaaggtccaggcatagtggctcttgcctgtaatcccagcactttgggaggccgaggcaggtggatcactcaaggtcacaagtttgagaccagtctggccaacatggtgaaaccccatctctactaaaagtacaaatattagccgactatgtggcgggcacctgtaatcccacctactcgggaggctgaggcaggagaattgcttgaatccgggaagcagaggttgtagtgagccaagatcgtgccactgcactctatcctgggtaacagcgagactctgtcttaaaaataataacaataataataataataaagacttacttaaccaatattattgattaccagacttttatgaaagccaaagactgcttgctagtaggaaaaaatttcaaataataaccaaagctgaaaaatggtctgtcataaattatttccccggtaatttttgaaaggaaaaatgtataacaagtactatttacatatctgcatttaaaaaagcaattcttagaatacttcctttacattattctcctattttagacattttgtgaaagagaacaaattgtccagtggcctcctgtcagatcaacaattattatactccttaattccatgcaaatttaaatgaatgctataaaattttaaatctgtagcctgggtgtacgtttcactcaagttctcctactgaggactcttgactaacagcatactggcagtttcaccttaacctgctcgttaaataatgtgttggtgtgagatatcaggaatgtctcatgatatcacgtttaccatttacaccatctgcaaccatatgctattaataaaatggaaaaaaacaaaatggtcattttgcatatacttcactctgacctagtttagtccatgatactataattgtgagagcatatccagatgctgtgttctctatgtaaaacagtattgtccattcagaaatgtgtgacccttcatttatggatattgactatatgtaatgcagtgctatcccaatattttcaataaaggactttatgcattca

SEQ ID NO: 427130 - DNA, 5407 bp, Homo sapiens
agaatttgcaagttaagacacatgtacctagccactgggacagggaggtcattgaggacctccagctgtgtgacccacagctgtgtgggtcagtttggtgtagttaaggggtctctgctggttctgttcttttaaatggtgccatgtgtacaaacaaggaacacttttctgatgattcaaaaaatactttgtcttcatcacagctcttttgagggttacgactcactgattaaaaagagggactttttcaaatactttgcacttttgattgtgtattatggataccaaggaagagaagaaggaacggaaacaaagttattttgctcgactgaaaaagaaaaaacaagccaaacaaaatgcagagacagcctcagctgtagctacaaggactcatactgggaaggaagataataatacagtagttttagagccagacaagtgcaacattgctgtggaagaggaatatatgactgatgagaaaaaaaagagaaaaagtaatcagttaaaggagatcaggcgtacagaactaaagagatattatagtattgatgacaatcaaaacaaaacacatgataaaaaagagaagaagatggtggttcagaagccccatgggactatggaatacactgctggaaaccaggacaccctaaactccatagcactgaaatttaacatcactcccaataaattggtggaactgaataaacttttcacacatactattgttccaggccaggtcctttttgtgccagatgccaactctccttccagtaccttaaggctatcatcatccagtcctggtgctactgtctctccttcatcatcagatgcagaatatgataaattgcctgatgctgacttagcacgaaaggccttgaaacccattgaaagagtcttatcgtctacttctgaagaagatgagccaggtgtggtgaaatttttaaaaatgaattgtcgatacttcaccgatggaaagggtgtggttggcggtgttatgatagtgactcctaacaacatcatgtttgaccctcataaatctgatcctctggttattgaaaatgggtgtgaggagtatggtctcatctgccccatggaagaggttgtttccattgcgctctacaatgacatttctcacatgaagatcaaagatgccttgccatcgcctggagaatgggaagacctggcttcagaaaaggatatcaacccattcagtaagttcaaatctatcaacaaggaaaaacgacagcagaatggagagaaaattatgacttcggattccagaccaatagtacctttggagaagtccacaggacatacacctacaaagccctcaggcagctctgtgtcagagaaattaaagaaactggactcctctagggagacatcccatggttctcccacagtgactaagctcagcaaggaaccttccgacacttcttctgcatttgaatctacagccaaagaaaactttctaggggaagatgatgattttgttgacttggaagaactttcttctcaaactggtggtggaatgcacaaaaaagacaccttgaaggagtgcctttctcttgacccagaggaacgaaagaaagctgagtcacaaataaacaattctgccgtggaaatgcaggtgcagtcagccctagcctttttgggaacagagaatgatgttgaactgaagggggcgctagatttagaaacctgtgagaagcaagatataatgccagaagtggacaagcagtctggttcgccagaaagccgagtagaaaacacactgaacatacatgaagatttagataaagttaaactcattgaatattacctgactaagaacaaagaagggccacaggtatctgaaaatttgcagaaaacagaattaagtgatggaaaaagtattgaaccagggggaatagacattacccttagtagttctctttcccaggcgggtgatcccataactgagggcaataaagagccagataagacctgggtgaaaaagggagagcccctcccggtaaaactgaactcttctacagaagcaaatgtgattaaagaggctctagactcctctttggaatctactctggacaacagctgtcaaggtgcacaaatggataataaatctgaagttcagttgtggctgttaaagagaattcaggtacccattgaagatatacttccttcaaaagaagaaaaaagcaagaccccacccatgttcctgtgcatcaaagtgggaaaaccaatgagaaaatcctttgccactcacactgcagccatggtccagcagtacggcaaacggagaaagcagccagagtactggtttgctgttcctcgggagagggtggatcatttgtacacattctttgttcagtggtctcccgatgtctatggaaaagatgccaaagagcaaggctttgtggtggtggagaaggaagaactgaacatgattgacaacttcttcagtgagccaacaaccaagagctgggagatcatcactgttgaagaggcaaagcgcaggaagagcacatgcagctactatgaagacgaggacgaagaggtgctgcctgtcctacggccccacagcgcgctcctggagaatatgcacatcgagcagctggcccgacgccttcctgcaagggtgcaagggtatccatggagactggcctatagcacgttagagcacgggaccagcttaaagacgctctaccggaaatcggcatcactagacagtcctgtcctattggtcatcaaagatatggataatcagatttttggagcatatgcaactcatcctttcaagttcagtgaccactattatggcacaggcgaaacttttctctacacattcagccctcattttaaggtctttaagtggagtggagaaaattcatactttatcaatggagacataagttctttagaacttggtggtggagggggacgatttggtttatggctagatgctgatttataccacggacgaagcaactcttgcagcactttcaataatgatattctttccaaaaaggaagacttcatagttcaggatctggaggtgtgggcatttgattgaaattcagactgccttaaaatataacattaaaaagactgggttcgatcagccctcctaaagctggctggaaaaagaagccccagcccagcctgcctcatcccaccccaatgcttcctttctgccatcatctcagagcatgatcacattgcagaaagattctggaaggtccatgtagagggcagacattgaagaaagaaacttaaaatccaggttgttgaaaagactttgtactcccacttcctccaaatccatacagtgaggaatcagagtgtttatagatatatgagttgaatgcaatttttatttttggtaactgtgaaaaataagatactgtggatatatacatgccttgtgtatttatcagcataattttcattaccaaaatgtacagctattatttgccatggaaaaggttagtctcatttagaaaaatcgaaagtgcacagcacttaaagggaatatatgaggttttttttttaaaaaaaaaacttttatttattatttgtagtatattgtctgaaatgtgtcggcagttttttttcttttaatgtgtcaaatcttgaaatattaaatgtatacattttgtgctatgttttgggaacaaatctgtttgatttatatagttttatattgaattttttttgccctgattgtttagggtgataggtcttaagcagcatatatctatatatctgtatgtgggtatatagagatatatgtgtgtgtgtatgtatatgtacatatacatatatatgagtgtataattctaaatttctaaaaactcattatgaatgttcatcaatttgactattataggccagctttccatttagtcaataaaagcgtacatttttagttacttaccttgaacatattcgtgtgaaaaagaatacatcatttctcacagtcttaagttgatatttatagaaatgaatacctttgtgaacctagacttagaacaaatcctgcttttgaaaaaaaatgttttgcttcttacaaaatcatttgtgttaataacaaaaactttattttcggagtgttctttgtataacttttccaagcttttacattaacgagcaggcctctgtcttaaaagggactcagtatattaatttctgcattttttaaatcaaatgaaaaacgtcaaattggaccaattgtcttggtttcttgattcatttatttgagaaaaaaacaatacaaagaaatgcattcatatcaaaattggaatagaaaggaaaacctatttttaagatatcaacctattttcacatcataaaacatctattacataaaataaaggtccaggcatagtggctcttgcctgtaatcccagcactttgggaggccgaggcaggtggatcactcaaggtcacaagtttgagaccagtctggccaacatggtgaaaccccatctctactaaaagtacaaatattagccgactatgtggcgggcacctgtaatcccacctactcgggaggctgaggcaggagaattgcttgaatccgggaagcagaggttgtagtgagccaagatcgtgccactgcactctatcctgggtaacagcgagactctgtcttaaaaataataacaataataataataataaagacttacttaaccaatattattgattaccagacttttatgaaagccaaagactgcttgctagtaggaaaaaatttcaaataataaccaaagctgaaaaatggtctgtcataaattatttccccggtaatttttgaaaggaaaaatgtataacaagtactatttacatatctgcatttaaaaaagcaattcttagaatacttcctttacattattctcctattttagacattttgtgaaagagaacaaattgtccagtggcctcctgtcagatcaacaattattatactccttaattccatgcaaatttaaatgaatgctataaaattttaaatctgtagcctgggtgtacgtttcactcaagttctcctactgaggactcttgactaacagcatactggcagtttcaccttaacctgctcgttaaataatgtgttggtgtgagatatcaggaatgtctcatgatatcacgtttaccatttacaccatctgcaaccatatgctattaataaaatggaaaaaaacaaaatggtcattttgcatatacttcactctgacctagtttagtccatgatactataattgtgagagcatatccagatgctgtgttctctatgtaaaacagtattgtccattcagaaatgtgtgacccttcatttatggatattgactatatgtaatgcagtgctatcccaatattttcaataaaggactttatgcattca

SEQ ID NO: 427131 - DNA, 5268 bp, Homo sapiens
tactccattttatttttcacattggccagtgtaaacttttaagtttacagttgctttgttatcttttcttacagggttacgactcactgattaaaaagagggactttttcaaatactttgcacttttgattgtgtattatggataccaaggaagagaagaaggaacggaaacaaagttattttgctcgactgaaaaagaaaaaacaagccaaacaaaatgcagagacagcctcagctgtagctacaaggactcatactgggaaggaagataataatacagtagttttagagccagacaagtgcaacattgctgtggaagaggaatatatgactgatgagaaaaaaaagagaaaaagtaatcagttaaaggagatcaggcgtacagaactaaagagatattatagtattgatgacaatcaaaacaaaacacatgataaaaaagagaagaagatggtggttcagaagccccatgggactatggaatacactgctggaaaccaggacaccctaaactccatagcactgaaatttaacatcactcccaataaattggtggaactgaataaacttttcacacatactattgttccaggccaggtcctttttgtgccagatgccaactctccttccagtaccttaaggctatcatcatccagtcctggtgctactgtctctccttcatcatcagatgcagaatatgataaattgcctgatgctgacttagcacgaaaggccttgaaacccattgaaagagtcttatcgtctacttctgaagaagatgagccaggtgtggtgaaatttttaaaaatgaattgtcgatacttcaccgatggaaagggtgtggttggcggtgttatgatagtgactcctaacaacatcatgtttgaccctcataaatctgatcctctggttattgaaaatgggtgtgaggagtatggtctcatctgccccatggaagaggttgtttccattgcgctctacaatgacatttctcacatgaagatcaaagatgccttgccatcgcctggagaatgggaagacctggcttcagaaaaggatatcaacccattcagtaagttcaaatctatcaacaaggaaaaacgacagcagaatggagagaaaattatgacttcggattccagaccaatagtacctttggagaagtccacaggacatacacctacaaagccctcaggcagctctgtgtcagagaaattaaagaaactggactcctctagggagacatcccatggttctcccacagtgactaagctcagcaaggaaccttccgacacttcttctgcatttgaatctacagccaaagaaaactttctaggggaagatgatgattttgttgacttggaagaactttcttctcaaactggtggtggaatgcacaaaaaagacaccttgaaggagtgcctttctcttgacccagaggaacgaaagaaagctgagtcacaaataaacaattctgccgtggaaatgcaggtgcagtcagccctagcctttttgggaacagagaatgatgttgaactgaagggggcgctagatttagaaacctgtgagaagcaagatataatgccagaagtggacaagcagtctggttcgccagaaagccgagtagaaaacacactgaacatacatgaagatttagataaagttaaactcattgaatattacctgactaagaacaaagaagggccacaggtatctgaaaatttgcagaaaacagaattaagtgatggaaaaagtattgaaccagggggaatagacattacccttagtagttctctttcccaggcgggtgatcccataactgagggcaataaagagccagataagacctgggtgaaaaagggagagcccctcccggtaaaactgaactcttctacagaagcaaatgtgattaaagaggctctagactcctctttggaatctactctggacaacagctgtcaaggtgcacaaatggataataaatctgaagttcagttgtggctgttaaagagaattcaggtacccattgaagatatacttccttcaaaagaagaaaaaagcaagaccccacccatgttcctgtgcatcaaagtgggaaaaccaatgagaaaatcctttgccactcacactgcagccatggtccagcagtacggcaaacggagaaagcagccagagtactggtttgctgttcctcgggagagggtggatcatttgtacacattctttgttcagtggtctcccgatgtctatggaaaagatgccaaagagcaaggctttgtggtggtggagaaggaagaactgaacatgattgacaacttcttcagtgagccaacaaccaagagctgggagatcatcactgttgaagaggcaaagcgcaggaagagcacatgcagctactatgaagacgaggacgaagaggtgctgcctgtcctacggccccacagcgcgctcctggagaatatgcacatcgagcagctggcccgacgccttcctgcaagggtgcaagggtatccatggagactggcctatagcacgttagagcacgggaccagcttaaagacgctctaccggaaatcggcatcactagacagtcctgtcctattggtcatcaaagatatggataatcagatttttggagcatatgcaactcatcctttcaagttcagtgaccactattatggcacaggcgaaacttttctctacacattcagccctcattttaaggtctttaagtggagtggagaaaattcatactttatcaatggagacataagttctttagaacttggtggtggagggggacgatttggtttatggctagatgctgatttataccacggacgaagcaactcttgcagcactttcaataatgatattctttccaaaaaggaagacttcatagttcaggatctggaggtgtgggcatttgattgaaattcagactgccttaaaatataacattaaaaagactgggttcgatcagccctcctaaagctggctggaaaaagaagccccagcccagcctgcctcatcccaccccaatgcttcctttctgccatcatctcagagcatgatcacattgcagaaagattctggaaggtccatgtagagggcagacattgaagaaagaaacttaaaatccaggttgttgaaaagactttgtactcccacttcctccaaatccatacagtgaggaatcagagtgtttatagatatatgagttgaatgcaatttttatttttggtaactgtgaaaaataagatactgtggatatatacatgccttgtgtatttatcagcataattttcattaccaaaatgtacagctattatttgccatggaaaaggttagtctcatttagaaaaatcgaaagtgcacagcacttaaagggaatatatgaggttttttttttaaaaaaaaaacttttatttattatttgtagtatattgtctgaaatgtgtcggcagttttttttcttttaatgtgtcaaatcttgaaatattaaatgtatacattttgtgctatgttttgggaacaaatctgtttgatttatatagttttatattgaattttttttgccctgattgtttagggtgataggtcttaagcagcatatatctatatatctgtatgtgggtatatagagatatatgtgtgtgtgtatgtatatgtacatatacatatatatgagtgtataattctaaatttctaaaaactcattatgaatgttcatcaatttgactattataggccagctttccatttagtcaataaaagcgtacatttttagttacttaccttgaacatattcgtgtgaaaaagaatacatcatttctcacagtcttaagttgatatttatagaaatgaatacctttgtgaacctagacttagaacaaatcctgcttttgaaaaaaaatgttttgcttcttacaaaatcatttgtgttaataacaaaaactttattttcggagtgttctttgtataacttttccaagcttttacattaacgagcaggcctctgtcttaaaagggactcagtatattaatttctgcattttttaaatcaaatgaaaaacgtcaaattggaccaattgtcttggtttcttgattcatttatttgagaaaaaaacaatacaaagaaatgcattcatatcaaaattggaatagaaaggaaaacctatttttaagatatcaacctattttcacatcataaaacatctattacataaaataaaggtccaggcatagtggctcttgcctgtaatcccagcactttgggaggccgaggcaggtggatcactcaaggtcacaagtttgagaccagtctggccaacatggtgaaaccccatctctactaaaagtacaaatattagccgactatgtggcgggcacctgtaatcccacctactcgggaggctgaggcaggagaattgcttgaatccgggaagcagaggttgtagtgagccaagatcgtgccactgcactctatcctgggtaacagcgagactctgtcttaaaaataataacaataataataataataaagacttacttaaccaatattattgattaccagacttttatgaaagccaaagactgcttgctagtaggaaaaaatttcaaataataaccaaagctgaaaaatggtctgtcataaattatttccccggtaatttttgaaaggaaaaatgtataacaagtactatttacatatctgcatttaaaaaagcaattcttagaatacttcctttacattattctcctattttagacattttgtgaaagagaacaaattgtccagtggcctcctgtcagatcaacaattattatactccttaattccatgcaaatttaaatgaatgctataaaattttaaatctgtagcctgggtgtacgtttcactcaagttctcctactgaggactcttgactaacagcatactggcagtttcaccttaacctgctcgttaaataatgtgttggtgtgagatatcaggaatgtctcatgatatcacgtttaccatttacaccatctgcaaccatatgctattaataaaatggaaaaaaacaaaatggtcattttgcatatacttcactctgacctagtttagtccatgatactataattgtgagagcatatccagatgctgtgttctctatgtaaaacagtattgtccattcagaaatgtgtgacccttcatttatggatattgactatatgtaatgcagtgctatcccaatattttcaataaaggactttatgcattca

SEQ ID NO: 427132 - DNA, 5440 bp, Homo sapiens
cgatccggacgcggggccccgcgggcgcgcgcctcggagctcccgcctcctcctcttgctcctcctcggcgtacggtcctcccctgacccctccttccacccgccgagaggatgcgctccccggcgcccagcagcagaggccaccgctcccagaaatgcatgcgaccgatccccttctcccggaccccaggagccggcgcccccgccctgtagggttacgactcactgattaaaaagagggactttttcaaatactttgcacttttgattgtgtattatggataccaaggaagagaagaaggaacggaaacaaagttattttgctcgactgaaaaagaaaaaacaagccaaacaaaatgcagagacagcctcagctgtagctacaaggactcatactgggaaggaagataataatacagtagttttagagccagacaagtgcaacattgctgtggaagaggaatatatgactgatgagaaaaaaaagagaaaaagtaatcagttaaaggagatcaggcgtacagaactaaagagatattatagtattgatgacaatcaaaacaaaacacatgataaaaaagagaagaagatggtggttcagaagccccatgggactatggaatacactgctggaaaccaggacaccctaaactccatagcactgaaatttaacatcactcccaataaattggtggaactgaataaacttttcacacatactattgttccaggccaggtcctttttgtgccagatgccaactctccttccagtaccttaaggctatcatcatccagtcctggtgctactgtctctccttcatcatcagatgcagaatatgataaattgcctgatgctgacttagcacgaaaggccttgaaacccattgaaagagtcttatcgtctacttctgaagaagatgagccaggtgtggtgaaatttttaaaaatgaattgtcgatacttcaccgatggaaagggtgtggttggcggtgttatgatagtgactcctaacaacatcatgtttgaccctcataaatctgatcctctggttattgaaaatgggtgtgaggagtatggtctcatctgccccatggaagaggttgtttccattgcgctctacaatgacatttctcacatgaagatcaaagatgccttgccatctgacctacctcaggatctttgtcctctgtacaggcctggagaatgggaagacctggcttcagaaaaggatatcaacccattcagtaagttcaaatctatcaacaaggaaaaacgacagcagaatggagagaaaattatgacttcggattccagaccaatagtacctttggagaagtccacaggacatacacctacaaagccctcaggcagctctgtgtcagagaaattaaagaaactggactcctctagggagacatcccatggttctcccacagtgactaagctcagcaaggaaccttccgacacttcttctgcatttgaatctacagccaaagaaaactttctaggggaagatgatgattttgttgacttggaagaactttcttctcaaactggtggtggaatgcacaaaaaagacaccttgaaggagtgcctttctcttgacccagaggaacgaaagaaagctgagtcacaaataaacaattctgccgtggaaatgcaggtgcagtcagccctagcctttttgggaacagagaatgatgttgaactgaagggggcgctagatttagaaacctgtgagaagcaagatataatgccagaagtggacaagcagtctggttcgccagaaagccgagtagaaaacacactgaacatacatgaagatttagataaagttaaactcattgaatattacctgactaagaacaaagaagggccacaggtatctgaaaatttgcagaaaacagaattaagtgatggaaaaagtattgaaccagggggaatagacattacccttagtagttctctttcccaggcgggtgatcccataactgagggcaataaagagccagataagacctgggtgaaaaagggagagcccctcccggtaaaactgaactcttctacagaagcaaatgtgattaaagaggctctagactcctctttggaatctactctggacaacagctgtcaaggtgcacaaatggataataaatctgaagttcagttgtggctgttaaagagaattcaggtacccattgaagatatacttccttcaaaagaagaaaaaagcaagaccccacccatgttcctgtgcatcaaagtgggaaaaccaatgagaaaatcctttgccactcacactgcagccatggtccagcagtacggcaaacggagaaagcagccagagtactggtttgctgttcctcgggagagggtggatcatttgtacacattctttgttcagtggtctcccgatgtctatggaaaagatgccaaagagcaaggctttgtggtggtggagaaggaagaactgaacatgattgacaacttcttcagtgagccaacaaccaagagctgggagatcatcactgttgaagaggcaaagcgcaggaagagcacatgcagctactatgaagacgaggacgaagaggtgctgcctgtcctacggccccacagcgcgctcctggagaatatgcacatcgagcagctggcccgacgccttcctgcaagggtgcaagggtatccatggagactggcctatagcacgttagagcacgggaccagcttaaagacgctctaccggaaatcggcatcactagacagtcctgtcctattggtcatcaaagatatggataatcagatttttggagcatatgcaactcatcctttcaagttcagtgaccactattatggcacaggcgaaacttttctctacacattcagccctcattttaaggtctttaagtggagtggagaaaattcatactttatcaatggagacataagttctttagaacttggtggtggagggggacgatttggtttatggctagatgctgatttataccacggacgaagcaactcttgcagcactttcaataatgatattctttccaaaaaggaagacttcatagttcaggatctggaggtgtgggcatttgattgaaattcagactgccttaaaatataacattaaaaagactgggttcgatcagccctcctaaagctggctggaaaaagaagccccagcccagcctgcctcatcccaccccaatgcttcctttctgccatcatctcagagcatgatcacattgcagaaagattctggaaggtccatgtagagggcagacattgaagaaagaaacttaaaatccaggttgttgaaaagactttgtactcccacttcctccaaatccatacagtgaggaatcagagtgtttatagatatatgagttgaatgcaatttttatttttggtaactgtgaaaaataagatactgtggatatatacatgccttgtgtatttatcagcataattttcattaccaaaatgtacagctattatttgccatggaaaaggttagtctcatttagaaaaatcgaaagtgcacagcacttaaagggaatatatgaggttttttttttaaaaaaaaaacttttatttattatttgtagtatattgtctgaaatgtgtcggcagttttttttcttttaatgtgtcaaatcttgaaatattaaatgtatacattttgtgctatgttttgggaacaaatctgtttgatttatatagttttatattgaattttttttgccctgattgtttagggtgataggtcttaagcagcatatatctatatatctgtatgtgggtatatagagatatatgtgtgtgtgtatgtatatgtacatatacatatatatgagtgtataattctaaatttctaaaaactcattatgaatgttcatcaatttgactattataggccagctttccatttagtcaataaaagcgtacatttttagttacttaccttgaacatattcgtgtgaaaaagaatacatcatttctcacagtcttaagttgatatttatagaaatgaatacctttgtgaacctagacttagaacaaatcctgcttttgaaaaaaaatgttttgcttcttacaaaatcatttgtgttaataacaaaaactttattttcggagtgttctttgtataacttttccaagcttttacattaacgagcaggcctctgtcttaaaagggactcagtatattaatttctgcattttttaaatcaaatgaaaaacgtcaaattggaccaattgtcttggtttcttgattcatttatttgagaaaaaaacaatacaaagaaatgcattcatatcaaaattggaatagaaaggaaaacctatttttaagatatcaacctattttcacatcataaaacatctattacataaaataaaggtccaggcatagtggctcttgcctgtaatcccagcactttgggaggccgaggcaggtggatcactcaaggtcacaagtttgagaccagtctggccaacatggtgaaaccccatctctactaaaagtacaaatattagccgactatgtggcgggcacctgtaatcccacctactcgggaggctgaggcaggagaattgcttgaatccgggaagcagaggttgtagtgagccaagatcgtgccactgcactctatcctgggtaacagcgagactctgtcttaaaaataataacaataataataataataaagacttacttaaccaatattattgattaccagacttttatgaaagccaaagactgcttgctagtaggaaaaaatttcaaataataaccaaagctgaaaaatggtctgtcataaattatttccccggtaatttttgaaaggaaaaatgtataacaagtactatttacatatctgcatttaaaaaagcaattcttagaatacttcctttacattattctcctattttagacattttgtgaaagagaacaaattgtccagtggcctcctgtcagatcaacaattattatactccttaattccatgcaaatttaaatgaatgctataaaattttaaatctgtagcctgggtgtacgtttcactcaagttctcctactgaggactcttgactaacagcatactggcagtttcaccttaacctgctcgttaaataatgtgttggtgtgagatatcaggaatgtctcatgatatcacgtttaccatttacaccatctgcaaccatatgctattaataaaatggaaaaaaacaaaatggtcattttgcatatacttcactctgacctagtttagtccatgatactataattgtgagagcatatccagatgctgtgttctctatgtaaaacagtattgtccattcagaaatgtgtgacccttcatttatggatattgactatatgtaatgcagtgctatcccaatattttcaataaaggactttatgcattca

SEQ ID NO: 427133 - DNA, 5352 bp, Homo sapiens
cgatccggacgcggggccccgcgggcgcgcgcctcggagctcccgcctcctcctcttgctcctcctcggcgtacggtcctcccctgacccctccttccacccgccgagaggatgcgctccccggcgcccagcagcagaggccaccgctcccagaaatgcatgcgaccgatccccttctcccggaccccaggagccggcgcccccgccctgtagggttacgactcactgattaaaaagagggactttttcaaatactttgcacttttgattgtgtattatggataccaaggaagagaagaaggaacggaaacaaagttattttgctcgactgaaaaagaaaaaacaagccaaacaaaatgcagagacagcctcagctgtagctacaaggactcatactgggaaggaagataataatacagtagttttagagccagacaagtgcaacattgctgtggaagaggaatatatgactgatgagaaaaaaaagagaaaaagtaatcagttaaaggagatcaggcgtacagaactaaagagatattatagtattgatgacaatcaaaacaaaacacatgataaaaaagagaagaagatggtggttcagaagccccatgggactatggaatacactgctggaaaccaggacaccctaaactccatagcactgaaatttaacatcactcccaataaattggtggaactgaataaacttttcacacatactattgttccaggccaggtcctttttgtgccagatgccaactctccttccagtaccttaaggctatcatcatccagtcctggtgctactgtctctccttcatcatcagatgcagaatatgataaattgcctgatgctgacttagcacgaaaggccttgaaacccattgaaagagtcttatcgtctacttctgaagaagatgagccaggtgtggtgaaatttttaaaaatgaattgtcgatacttcaccgatggaaagggtgtggttggcggtgttatgatagtgactcctaacaacatcatgtttgaccctcataaatctgatcctctggttattgaaaatgggtgtgaggagtatggtctcatctgccccatggaagaggttgtttccattgcgctctacaatgacatttctcacatgaagatcaaagatgccttgccatcgcctggagaatgggaagacctggcttcagaaaaggatatcaacccattcagtaagttcaaatctatcaacaaggaaaaacgacagcagaatggagagaaaattatgacttcggattccagaccaatagtacctttggagaagtccacaggacatacacctacaaagccctcaggcagctctgtgtcagagaaattaaagaaactggactcctctagggagacatcccatggttctcccacagtgactaagctcagcaaggaaccttccgacacttcttctgcatttgaatctacagccaaagaaaactttctaggggaagatgatgattttgttgacttggaagaactttcttctcaaactggtggtggaatgcacaaaaaagacaccttgaaggagtgcctttctcttgacccagaggaacgaaagaaagctgagtcacaaataaacaattctgccgtggaaatgcaggtgcagtcagccctagcctttttgggaacagagaatgatgttgaactgaagggggcgctagatttagaaacctgtgagaagcaagatataatgccagaagtggacaagcagtctggttcgccagaaagccgagtagaaaacacactgaacatacatgaagatttagataaagttaaactcattgaatattacctgactaagaacaaagaagggccacaggtatctgaaaatttgcagaaaacagaattaagtgatggaaaaagtattgaaccagggggaatagacattacccttagtagttctctttcccaggcgggtgatcccataactgagggcaataaagagccagataagacctgggtgaaaaagggagagcccctcccggtaaaactgaactcttctacagaagcaaatgtgattaaagaggctctagactcctctttggaatctactctggacaacagctgtcaaggtgcacaaatggataataaatctgaagttcagttgtggctgttaaagagaattcaggtacccattgaagatatacttccttcaaaagaagaaaaaagcaagaccccacccatgttcctgtgcatcaaagtgggaaaaccaatgagaaaatcctttgccactcacactgcagccatggtccagcagtacggcaaacggagaaagcagccagagtactggtttgctgttcctcgggagagggtggatcatttgtacacattctttgttcagtggtctcccgatgtctatggaaaagatgccaaagagcaaggctttgtggtggtggagaaggaagaactgaacatgattgacaacttcttcagtgagccaacaaccaagagctgggagatcatcactgttgaagaggcaaagcgcaggaagagcacatgcagctactatgaagacgaggacgaagaggtgctgcctgtcctacggccccacagcgcgctcctggagaatatgcacatcgagcagctggcccgacgccttcctgcaagggtgcaagggtatccatggagactggcctatagcacgttagagcacgggaccagcttaaagacgctctaccggaaatcggcatcactagacagtcctgtcctattggtcatcaaagatatggataatcagatttttggagcatatgcaactcatcctttcaagttcagtgaccactattatggcacaggcgaaacttttctctacacattcagccctcattttaaggtctttaagtggagtggagaaaattcatactttatcaatggagacataagttctttagaacttggtggtggagggggacgatttggtttatggctagatgctgatttataccacggacgaagcaactcttgcagcactttcaataatgatattctttccaaaaaggaagacttcatagttcaggatctggaggtgtgggcatttgattgaaattcagactgccttaaaatataacattaaaaagactgggttcgatcagccctcctaaagctggctggaaaaagaagccccagcccagcctgcctcatcccaccccaatgcttcctttctgccatcatctcagagcatgatcacattgcagaaagattctggaaggtccatgtagagggcagacattgaagaaagaaacttaaaatccaggttgttgaaaagactttgtactcccacttcctccaaatccatacagtgaggaatcagagtgtttatagatatatgagttgaatgcaatttttatttttggtaactgtgaaaaataagatactgtggatatatacatgccttgtgtatttatcagcataattttcattaccaaaatgtacagctattatttgccatggaaaaggttagtctcatttagaaaaatcgaaagtgcacagcacttaaagggaatatatgaggttttttttttaaaaaaaaaacttttatttattatttgtagtatattgtctgaaatgtgtcggcagttttttttcttttaatgtgtcaaatcttgaaatattaaatgtatacattttgtgctatgttttgggaacaaatctgtttgatttatatagttttatattgaattttttttgccctgattgtttagggtgataggtcttaagcagcatatatctatatatctgtatgtgggtatatagagatatatgtgtgtgtgtatgtatatgtacatatacatatatatgagtgtataattctaaatttctaaaaactcattatgaatgttcatcaatttgactattataggccagctttccatttagtcaataaaagcgtacatttttagttacttaccttgaacatattcgtgtgaaaaagaatacatcatttctcacagtcttaagttgatatttatagaaatgaatacctttgtgaacctagacttagaacaaatcctgcttttgaaaaaaaatgttttgcttcttacaaaatcatttgtgttaataacaaaaactttattttcggagtgttctttgtataacttttccaagcttttacattaacgagcaggcctctgtcttaaaagggactcagtatattaatttctgcattttttaaatcaaatgaaaaacgtcaaattggaccaattgtcttggtttcttgattcatttatttgagaaaaaaacaatacaaagaaatgcattcatatcaaaattggaatagaaaggaaaacctatttttaagatatcaacctattttcacatcataaaacatctattacataaaataaaggtccaggcatagtggctcttgcctgtaatcccagcactttgggaggccgaggcaggtggatcactcaaggtcacaagtttgagaccagtctggccaacatggtgaaaccccatctctactaaaagtacaaatattagccgactatgtggcgggcacctgtaatcccacctactcgggaggctgaggcaggagaattgcttgaatccgggaagcagaggttgtagtgagccaagatcgtgccactgcactctatcctgggtaacagcgagactctgtcttaaaaataataacaataataataataataaagacttacttaaccaatattattgattaccagacttttatgaaagccaaagactgcttgctagtaggaaaaaatttcaaataataaccaaagctgaaaaatggtctgtcataaattatttccccggtaatttttgaaaggaaaaatgtataacaagtactatttacatatctgcattttgtgaaagagaacaaattgtccagtggcctcctgtcagatcaacaattattatactccttaattccatgcaaatttaaatgaatgctataaaattttaaatctgtagcctgggtgtacgtttcactcaagttctcctactgaggactcttgactaacagcatactggcagtttcaccttaacctgctcgttaaataatgtgttggtgtgagatatcaggaatgtctcatgatatcacgtttaccatttacaccatctgcaaccatatgctattaataaaatggaaaaaaacaaaatggtcattttgcatatacttcactctgacctagtttagtccatgatactataattgtgagagcatatccagatgctgtgttctctatgtaaaacagtattgtccattcagaaatgtgtgacccttcatttatggatattgactatatgtaatgcagtgctatcccaatattttcaataaaggactttatgcattca

SEQ ID NO: 427134 - DNA, 3180 bp, Homo sapiens
tgctttctggtggcggagcaagcttggagacaagtagctttggagaatagctgagggtccatttccactgcagactaatccctgccaatgggtgctgcacacagtgtttgggaggtggatcatttgtacacattctttgttcagtggtctcccgatgtctatggaaaagatgccaaagagcaaggctttgtggtggtggagaaggaagaactgaacatgattgacaacttcttcagtgagccaacaaccaagagctgggagatcatcactgttgaagaggcaaagcgcaggaagagcacatgcagctactatgaagacgaggacgaagaggtgctgcctgtcctacggccccacagcgcgctcctggagaatatgcacatcgagcagctggcccgacgccttcctgcaagggtgcaagggtatccatggagactggcctatagcacgttagagcacgggaccagcttaaagacgctctaccggaaatcggcatcactagacagtcctgtcctattggtcatcaaagatatggataatcagatttttggagcatatgcaactcatcctttcaagttcagtgaccactattatggcacaggcgaaacttttctctacacattcagccctcattttaaggtctttaagtggagtggagaaaattcatactttatcaatggagacataagttctttagaacttggtggtggagggggacgatttggtttatggctagatgctgatttataccacggacgaagcaactcttgcagcactttcaataatgatattctttccaaaaaggaagacttcatagttcaggatctggaggtgtgggcatttgattgaaattcagactgccttaaaatataacattaaaaagactgggttcgatcagccctcctaaagctggctggaaaaagaagccccagcccagcctgcctcatcccaccccaatgcttcctttctgccatcatctcagagcatgatcacattgcagaaagattctggaaggtccatgtagagggcagacattgaagaaagaaacttaaaatccaggttgttgaaaagactttgtactcccacttcctccaaatccatacagtgaggaatcagagtgtttatagatatatgagttgaatgcaatttttatttttggtaactgtgaaaaataagatactgtggatatatacatgccttgtgtatttatcagcataattttcattaccaaaatgtacagctattatttgccatggaaaaggttagtctcatttagaaaaatcgaaagtgcacagcacttaaagggaatatatgaggttttttttttaaaaaaaaaacttttatttattatttgtagtatattgtctgaaatgtgtcggcagttttttttcttttaatgtgtcaaatcttgaaatattaaatgtatacattttgtgctatgttttgggaacaaatctgtttgatttatatagttttatattgaattttttttgccctgattgtttagggtgataggtcttaagcagcatatatctatatatctgtatgtgggtatatagagatatatgtgtgtgtgtatgtatatgtacatatacatatatatgagtgtataattctaaatttctaaaaactcattatgaatgttcatcaatttgactattataggccagctttccatttagtcaataaaagcgtacatttttagttacttaccttgaacatattcgtgtgaaaaagaatacatcatttctcacagtcttaagttgatatttatagaaatgaatacctttgtgaacctagacttagaacaaatcctgcttttgaaaaaaaatgttttgcttcttacaaaatcatttgtgttaataacaaaaactttattttcggagtgttctttgtataacttttccaagcttttacattaacgagcaggcctctgtcttaaaagggactcagtatattaatttctgcattttttaaatcaaatgaaaaacgtcaaattggaccaattgtcttggtttcttgattcatttatttgagaaaaaaacaatacaaagaaatgcattcatatcaaaattggaatagaaaggaaaacctatttttaagatatcaacctattttcacatcataaaacatctattacataaaataaaggtccaggcatagtggctcttgcctgtaatcccagcactttgggaggccgaggcaggtggatcactcaaggtcacaagtttgagaccagtctggccaacatggtgaaaccccatctctactaaaagtacaaatattagccgactatgtggcgggcacctgtaatcccacctactcgggaggctgaggcaggagaattgcttgaatccgggaagcagaggttgtagtgagccaagatcgtgccactgcactctatcctgggtaacagcgagactctgtcttaaaaataataacaataataataataataaagacttacttaaccaatattattgattaccagacttttatgaaagccaaagactgcttgctagtaggaaaaaatttcaaataataaccaaagctgaaaaatggtctgtcataaattatttccccggtaatttttgaaaggaaaaatgtataacaagtactatttacatatctgcatttaaaaaagcaattcttagaatacttcctttacattattctcctattttagacattttgtgaaagagaacaaattgtccagtggcctcctgtcagatcaacaattattatactccttaattccatgcaaatttaaatgaatgctataaaattttaaatctgtagcctgggtgtacgtttcactcaagttctcctactgaggactcttgactaacagcatactggcagtttcaccttaacctgctcgttaaataatgtgttggtgtgagatatcaggaatgtctcatgatatcacgtttaccatttacaccatctgcaaccatatgctattaataaaatggaaaaaaacaaaatggtcattttgcatatacttcactctgacctagtttagtccatgatactataattgtgagagcatatccagatgctgtgttctctatgtaaaacagtattgtccattcagaaatgtgtgacccttcatttatggatattgactatatgtaatgcagtgctatcccaatattttcaataaaggactttatgcattca

SEQ ID NO: 427135 - DNA, 3253 bp, Homo sapiens
caaaggtgaaagtgtccttttacagtctcacagcgatgcctggcaggaagtgtgtttgctctaaatcctaatttgggtgtgttcctgtagaaatgttgaaacttctcctgagggaaacagaaactcaatcatgcaggaaactagatactgagaaaacagttgtagctcagcgtggctacaagtaactgtggtgtggaagcagagtagagagaaaacttgttcctcattagagagagagccacacttctcactgctcacaatgagaggccaaagattacccttggacatccagattttctattgtgccagacctgacgaagagccttttgtgaagatcatcactgttgaagaggcaaagcgcaggaagagcacatgcagctactatgaagacgaggacgaagaggtgctgcctgtcctacggccccacagcgcgctcctggagaatatgcacatcgagcagctggcccgacgccttcctgcaagggtgcaagggtatccatggagactggcctatagcacgttagagcacgggaccagcttaaagacgctctaccggaaatcggcatcactagacagtcctgtcctattggtcatcaaagatatggataatcagatttttggagcatatgcaactcatcctttcaagttcagtgaccactattatggcacaggcgaaacttttctctacacattcagccctcattttaaggtctttaagtggagtggagaaaattcatactttatcaatggagacataagttctttagaacttggtggtggagggggacgatttggtttatggctagatgctgatttataccacggacgaagcaactcttgcagcactttcaataatgatattctttccaaaaaggaagacttcatagttcaggatctggaggtgtgggcatttgattgaaattcagactgccttaaaatataacattaaaaagactgggttcgatcagccctcctaaagctggctggaaaaagaagccccagcccagcctgcctcatcccaccccaatgcttcctttctgccatcatctcagagcatgatcacattgcagaaagattctggaaggtccatgtagagggcagacattgaagaaagaaacttaaaatccaggttgttgaaaagactttgtactcccacttcctccaaatccatacagtgaggaatcagagtgtttatagatatatgagttgaatgcaatttttatttttggtaactgtgaaaaataagatactgtggatatatacatgccttgtgtatttatcagcataattttcattaccaaaatgtacagctattatttgccatggaaaaggttagtctcatttagaaaaatcgaaagtgcacagcacttaaagggaatatatgaggttttttttttaaaaaaaaaacttttatttattatttgtagtatattgtctgaaatgtgtcggcagttttttttcttttaatgtgtcaaatcttgaaatattaaatgtatacattttgtgctatgttttgggaacaaatctgtttgatttatatagttttatattgaattttttttgccctgattgtttagggtgataggtcttaagcagcatatatctatatatctgtatgtgggtatatagagatatatgtgtgtgtgtatgtatatgtacatatacatatatatgagtgtataattctaaatttctaaaaactcattatgaatgttcatcaatttgactattataggccagctttccatttagtcaataaaagcgtacatttttagttacttaccttgaacatattcgtgtgaaaaagaatacatcatttctcacagtcttaagttgatatttatagaaatgaatacctttgtgaacctagacttagaacaaatcctgcttttgaaaaaaaatgttttgcttcttacaaaatcatttgtgttaataacaaaaactttattttcggagtgttctttgtataacttttccaagcttttacattaacgagcaggcctctgtcttaaaagggactcagtatattaatttctgcattttttaaatcaaatgaaaaacgtcaaattggaccaattgtcttggtttcttgattcatttatttgagaaaaaaacaatacaaagaaatgcattcatatcaaaattggaatagaaaggaaaacctatttttaagatatcaacctattttcacatcataaaacatctattacataaaataaaggtccaggcatagtggctcttgcctgtaatcccagcactttgggaggccgaggcaggtggatcactcaaggtcacaagtttgagaccagtctggccaacatggtgaaaccccatctctactaaaagtacaaatattagccgactatgtggcgggcacctgtaatcccacctactcgggaggctgaggcaggagaattgcttgaatccgggaagcagaggttgtagtgagccaagatcgtgccactgcactctatcctgggtaacagcgagactctgtcttaaaaataataacaataataataataataaagacttacttaaccaatattattgattaccagacttttatgaaagccaaagactgcttgctagtaggaaaaaatttcaaataataaccaaagctgaaaaatggtctgtcataaattatttccccggtaatttttgaaaggaaaaatgtataacaagtactatttacatatctgcatttaaaaaagcaattcttagaatacttcctttacattattctcctattttagacattttgtgaaagagaacaaattgtccagtggcctcctgtcagatcaacaattattatactccttaattccatgcaaatttaaatgaatgctataaaattttaaatctgtagcctgggtgtacgtttcactcaagttctcctactgaggactcttgactaacagcatactggcagtttcaccttaacctgctcgttaaataatgtgttggtgtgagatatcaggaatgtctcatgatatcacgtttaccatttacaccatctgcaaccatatgctattaataaaatggaaaaaaacaaaatggtcattttgcatatacttcactctgacctagtttagtccatgatactataattgtgagagcatatccagatgctgtgttctctatgtaaaacagtattgtccattcagaaatgtgtgacccttcatttatggatattgactatatgtaatgcagtgctatcccaatattttcaataaaggactttatgcattca

SEQ ID NO: 427136 - DNA, 3179 bp, Homo sapiens
caaaggtgaaagtgtccttttacagtctcacagcgatgcctggcaggaagtgtgtttgctctaaatcctaatttgggtgtgttcctgtagaaatgttgaaacttctcctgagggaaacagaaactcaatcatgcaggaaactagatactgagaaaacagttgtagctcagcgtggctacaagtaactgtggtgtggaagcagagtagagagaaaacttgttcctcattagagagagagccacacttctcactgctcacaatgagaggccaaagattacccttggacatccagattttctattgtgccagacctgacgaagagccttttgtgaagatcatcactgttgaagaggcaaagcgcaggaagagcacatgcagctactatgaagacgaggacgaagaggtgctgcctgtcctacggccccacagcgcgctcctggagaatatgcacatcgagcagctggcccgacgccttcctgcaagggtgcaagggtatccatggagactggcctatagcacgttagagcacgggaccagcttaaagacgctctaccggaaatcggcatcactagacagtcctgtcctattggtcatcaaagatatggataatcagatttttggagcatatgcaactcatcctttcaagttcagtgaccactattatggcacaggcgaaacttttctctacacattcagccctcattttaaggggacgatttggtttatggctagatgctgatttataccacggacgaagcaactcttgcagcactttcaataatgatattctttccaaaaaggaagacttcatagttcaggatctggaggtgtgggcatttgattgaaattcagactgccttaaaatataacattaaaaagactgggttcgatcagccctcctaaagctggctggaaaaagaagccccagcccagcctgcctcatcccaccccaatgcttcctttctgccatcatctcagagcatgatcacattgcagaaagattctggaaggtccatgtagagggcagacattgaagaaagaaacttaaaatccaggttgttgaaaagactttgtactcccacttcctccaaatccatacagtgaggaatcagagtgtttatagatatatgagttgaatgcaatttttatttttggtaactgtgaaaaataagatactgtggatatatacatgccttgtgtatttatcagcataattttcattaccaaaatgtacagctattatttgccatggaaaaggttagtctcatttagaaaaatcgaaagtgcacagcacttaaagggaatatatgaggttttttttttaaaaaaaaaacttttatttattatttgtagtatattgtctgaaatgtgtcggcagttttttttcttttaatgtgtcaaatcttgaaatattaaatgtatacattttgtgctatgttttgggaacaaatctgtttgatttatatagttttatattgaattttttttgccctgattgtttagggtgataggtcttaagcagcatatatctatatatctgtatgtgggtatatagagatatatgtgtgtgtgtatgtatatgtacatatacatatatatgagtgtataattctaaatttctaaaaactcattatgaatgttcatcaatttgactattataggccagctttccatttagtcaataaaagcgtacatttttagttacttaccttgaacatattcgtgtgaaaaagaatacatcatttctcacagtcttaagttgatatttatagaaatgaatacctttgtgaacctagacttagaacaaatcctgcttttgaaaaaaaatgttttgcttcttacaaaatcatttgtgttaataacaaaaactttattttcggagtgttctttgtataacttttccaagcttttacattaacgagcaggcctctgtcttaaaagggactcagtatattaatttctgcattttttaaatcaaatgaaaaacgtcaaattggaccaattgtcttggtttcttgattcatttatttgagaaaaaaacaatacaaagaaatgcattcatatcaaaattggaatagaaaggaaaacctatttttaagatatcaacctattttcacatcataaaacatctattacataaaataaaggtccaggcatagtggctcttgcctgtaatcccagcactttgggaggccgaggcaggtggatcactcaaggtcacaagtttgagaccagtctggccaacatggtgaaaccccatctctactaaaagtacaaatattagccgactatgtggcgggcacctgtaatcccacctactcgggaggctgaggcaggagaattgcttgaatccgggaagcagaggttgtagtgagccaagatcgtgccactgcactctatcctgggtaacagcgagactctgtcttaaaaataataacaataataataataataaagacttacttaaccaatattattgattaccagacttttatgaaagccaaagactgcttgctagtaggaaaaaatttcaaataataaccaaagctgaaaaatggtctgtcataaattatttccccggtaatttttgaaaggaaaaatgtataacaagtactatttacatatctgcatttaaaaaagcaattcttagaatacttcctttacattattctcctattttagacattttgtgaaagagaacaaattgtccagtggcctcctgtcagatcaacaattattatactccttaattccatgcaaatttaaatgaatgctataaaattttaaatctgtagcctgggtgtacgtttcactcaagttctcctactgaggactcttgactaacagcatactggcagtttcaccttaacctgctcgttaaataatgtgttggtgtgagatatcaggaatgtctcatgatatcacgtttaccatttacaccatctgcaaccatatgctattaataaaatggaaaaaaacaaaatggtcattttgcatatacttcactctgacctagtttagtccatgatactataattgtgagagcatatccagatgctgtgttctctatgtaaaacagtattgtccattcagaaatgtgtgacccttcatttatggatattgactatatgtaatgcagtgctatcccaatattttcaataaaggactttatgcattca

SEQ ID NO: 427137 - DNA, 2803 bp, Homo sapiens
cgtccctggccttctgggctgctcaggctgggatccagagagtcgcaggtcagagccaccacgtgtctgaaaggtcttccttccttcgtaaccccttgggagatctcatcctggtgtgggccaggtctggcagtcaggaacttcctccgtcaatggggtgaggtggttcccttttacatatagatactatttcatatttcctcattgctaattctccagattaaaatgtctgttttcttttttgtgtttcttccccaaggtctttaagtggagtggagaaaattcatactttatcaatggagacataagttctttagaacttggtggtggagggggacgatttggtttatggctagatgctgatttataccacggacgaagcaactcttgcagcactttcaataatgatattctttccaaaaaggaagacttcatagttcaggatctggaggtgtgggcatttgattgaaattcagactgccttaaaatataacattaaaaagactgggttcgatcagccctcctaaagctggctggaaaaagaagccccagcccagcctgcctcatcccaccccaatgcttcctttctgccatcatctcagagcatgatcacattgcagaaagattctggaaggtccatgtagagggcagacattgaagaaagaaacttaaaatccaggttgttgaaaagactttgtactcccacttcctccaaatccatacagtgaggaatcagagtgtttatagatatatgagttgaatgcaatttttatttttggtaactgtgaaaaataagatactgtggatatatacatgccttgtgtatttatcagcataattttcattaccaaaatgtacagctattatttgccatggaaaaggttagtctcatttagaaaaatcgaaagtgcacagcacttaaagggaatatatgaggttttttttttaaaaaaaaaacttttatttattatttgtagtatattgtctgaaatgtgtcggcagttttttttcttttaatgtgtcaaatcttgaaatattaaatgtatacattttgtgctatgttttgggaacaaatctgtttgatttatatagttttatattgaattttttttgccctgattgtttagggtgataggtcttaagcagcatatatctatatatctgtatgtgggtatatagagatatatgtgtgtgtgtatgtatatgtacatatacatatatatgagtgtataattctaaatttctaaaaactcattatgaatgttcatcaatttgactattataggccagctttccatttagtcaataaaagcgtacatttttagttacttaccttgaacatattcgtgtgaaaaagaatacatcatttctcacagtcttaagttgatatttatagaaatgaatacctttgtgaacctagacttagaacaaatcctgcttttgaaaaaaaatgttttgcttcttacaaaatcatttgtgttaataacaaaaactttattttcggagtgttctttgtataacttttccaagcttttacattaacgagcaggcctctgtcttaaaagggactcagtatattaatttctgcattttttaaatcaaatgaaaaacgtcaaattggaccaattgtcttggtttcttgattcatttatttgagaaaaaaacaatacaaagaaatgcattcatatcaaaattggaatagaaaggaaaacctatttttaagatatcaacctattttcacatcataaaacatctattacataaaataaaggtccaggcatagtggctcttgcctgtaatcccagcactttgggaggccgaggcaggtggatcactcaaggtcacaagtttgagaccagtctggccaacatggtgaaaccccatctctactaaaagtacaaatattagccgactatgtggcgggcacctgtaatcccacctactcgggaggctgaggcaggagaattgcttgaatccgggaagcagaggttgtagtgagccaagatcgtgccactgcactctatcctgggtaacagcgagactctgtcttaaaaataataacaataataataataataaagacttacttaaccaatattattgattaccagacttttatgaaagccaaagactgcttgctagtaggaaaaaatttcaaataataaccaaagctgaaaaatggtctgtcataaattatttccccggtaatttttgaaaggaaaaatgtataacaagtactatttacatatctgcatttaaaaaagcaattcttagaatacttcctttacattattctcctattttagacattttgtgaaagagaacaaattgtccagtggcctcctgtcagatcaacaattattatactccttaattccatgcaaatttaaatgaatgctataaaattttaaatctgtagcctgggtgtacgtttcactcaagttctcctactgaggactcttgactaacagcatactggcagtttcaccttaacctgctcgttaaataatgtgttggtgtgagatatcaggaatgtctcatgatatcacgtttaccatttacaccatctgcaaccatatgctattaataaaatggaaaaaaacaaaatggtcattttgcatatacttcactctgacctagtttagtccatgatactataattgtgagagcatatccagatgctgtgttctctatgtaaaacagtattgtccattcagaaatgtgtgacccttcatttatggatattgactatatgtaatgcagtgctatcccaatattttcaataaaggactttatgcattca

SEQ ID NO: 427138 - DNA, 5827 bp, Homo sapiens
cgatccggacgcggggccccgcgggcgcgcgcctcggagctcccgcctcctcctcttgctcctcctcggcgtacggtcctcccctgacccctccttccacccgccgagaggatgcgctccccggcgcccagcagcagaggccaccgctcccagaaatgcatgcgaccgatccccttctcccggaccccaggagccggcgcccccgccctgtagggttacgactcactgattaaaaagagggactttttcaaatactttgcacttttgattgtgtattatggataccaaggaagagaagaaggaacggaaacaaagttattttgctcgactgaaaaagaaaaaacaagccaaacaaaatgcagagacagcctcagctgtagctacaaggactcatactgggaaggaagataataatacagtagttttagagccagacaagtgcaacattgctgtggaagaggaatatatgactgatgagaaaaaaaagagaaaaagtaatcagttaaaggagatcaggcgtacagaactaaagagatattatagtattgatgacaatcaaaacaaaacacatgataaaaaagagaagaagatggtggttcagaagccccatgggactatggaatacactgctggaaaccaggacaccctaaactccatagcactgaaatttaacatcactcccaataaattggtggaactgaataaacttttcacacatactattgttccaggccaggtcctttttgtgccagatgccaactctccttccagtaccttaaggctatcatcatccagtcctggtgctactgtctctccttcatcatcagatgcagaatatgataaattgcctgatgctgacttagcacgaaaggccttgaaacccattgaaagagtcttatcgtctacttctgaagaagatgagccaggtgtggtgaaatttttaaaaatgaattgtcgatacttcaccgatggaaagggtgtggttggcggtgttatgatagtgactcctaacaacatcatgtttgaccctcataaatctgatcctctggttattgaaaatgggtgtgaggagtatggtctcatctgccccatggaagaggttgtttccattgcgctctacaatgacatttctcacatgaagatcaaagatgccttgccatcgcctggagaatgggaagacctggcttcagaaaaggatatcaacccattcagtaagttcaaatctatcaacaaggaaaaacgacagcagaatggagagaaaattatgacttcggattccagaccaatagtacctttggagaagtccacaggacatacacctacaaagccctcaggcagctctgtgtcagagaaattaaagaaactggactcctctagggagacatcccatggttctcccacagtgactaagctcagcaaggaaccttccgacacttcttctgcatttgaatctacagccaaagaaaactttctaggggaagatgatgattttgttgacttggaagaactttcttctcaaactggtggtggaatgcacaaaaaagacaccttgaaggagtgcctttctcttgacccagaggaacgaaagaaagctgagtcacaaataaacaattctgccgtggaaatgcaggtgcagtcagccctagcctttttgggaacagagaatgatgttgaactgaagggggcgctagatttagaaacctgtgagaagcaagatataatgccagaagtggacaagcagtctggttcgccagaaagccgagtagaaaacacactgaacatacatgaagatttagataaagttaaactcattgaatattacctgactaagaacaaagaagggccacaggtatctgaaaatttgcagaaaacagaattaagtgatggaaaaagtattgaaccagggggaatagacattacccttagtagttctctttcccaggcgggtgatcccataactgagggcaataaagagccagataagacctgggtgaaaaagggagagcccctcccggtaaaactgaactcttctacagaagcaaatgtgattaaagaggctctagactcctctttggaatctactctggacaacagctgtcaaggtgcacaaatggataataaatctgaagttcagttgtggctgttaaagagaattcaggtacccattgaagatatacttccttcaaaagaagaaaaaagcaagaccccacccatgttcctgtgcatcaaagtgggaaaaccaatgagaaaatcctttgccactcacactgcagccatggtccagcagtacggcaaacggagaaagcagccagagtactggtttgctgttcctcgggagagggtggatcatttgtacacattctttgttcagtggtctcccgatgtctatggaaaagatgccaaagagcaaggctttgtggtggtggagaaggaagaactgaacatgattgacaacttcttcagtgagccaacaaccaagagctgggagatcatcactgttgaagaggcaaagcgcaggaagagcacatgcagctactatgaagacgaggacgaagaggtgctgcctgtcctacggccccacagcgcgctcctggagaatatgcacatcgagcagctggcccgacgccttcctgcaagggtgcaagggtatccatggagactggcctatagcacgttagagcacgggaccagcttaaagacgctctaccggaaatcggcatcactagacagtcctgtcctattggtcatcaaagatatggataatcagatttttggagcatatgcaactcatcctttcaagttcagtgaccactattatggcacaggcgaaacttttctctacacattcagccctcattttaaggtctttaagtggagtggagaaaattcatactttatcaatggagacataagttctttagaacttggtggtggagggggacgatttggtttatggctagatgctgatttataccacggacgaagcaactcttgcagcactttcaataatgatattctttccaaaaaggaagacttcatagttcaggatctggaggtgtgggcatttgattgaaattcagactgccttaaaatataacattaaaaagactgggttcgatcagccctcctaaagctggctggaaaaagaagccccagcccagcctgcctcatcccaccccaatgcttcctttctgccatcatctcagagcatgatcacattgcagaaagattctggaaggtccatgtagagggcagacattgaagaaagaaacttaaaatccaggttgttgaaaagactttgtactcccacttcctccaaatccatacagtgaggaatcagagtgtttatagatatatgagttgaatgcaatttttatttttggtaactgtgaaaaataagatactgtggatatatacatgccttgtgtatttatcagcataattttcattaccaaaatgtacagctattatttgccatggaaaaggttagtctcatttagaaaaatcgaaagtgcacagcacttaaagggaatatatgaggttttttttttaaaaaaaaaacttttatttattatttgtagtatattgtctgaaatgtgtcggcagttttttttcttttaatgtgtcaaatcttgaaatattaaatgtatacattttgtgctatgttttgggaacaaatctgtttgatttatatagttttatattgaattttttttgccctgattgtttagggtgataggtcttaagcagcatatatctatatatctgtatgtgggtatatagagatatatgtgtgtgtgtatgtatatgtacatatacatatatatgagtgtataattctaaatttctaaaaactcattatgaatgttcatcaatttgactattataggccagctttccatttagtcaataaaagcgtacatttttagttacttaccttgaacatattcgtgtgaaaaagaatacatcatttctcacagtcttaagttgatatttatagaaatgaatacctttgtgaacctagacttagaacaaatcctgcttttgaaaaaaaatgttttgcttcttacaaaatcatttgtgttaataacaaaaactttattttcggagtgttctttgtataacttttccaagcttttacattaacgagcaggcctctgtcttaaaagggactcagtatattaatttctgcattttttaaatcaaatgaaaaacgtcaaattggaccaattgtcttggtttcttgattcatttatttgagaaaaaaacaatacaaagaaatgcattcatatcaaaattggaatagaaaggaaaacctatttttaagatatcaacctattttcacatcataaaacatctattacataaaataaaggtccaggcatagtggctcttgcctgtaatcccagcactttgggaggccgaggcaggtggatcactcaaggtcacaagtttgagaccagtctggccaacatggtgaaaccccatctctactaaaagtacaaatattagccgactatgtggcgggcacctgtaatcccacctactcgggaggctgaggcaggagaattgcttgaatccgggaagcagaggttgtagtgagccaagatcgtgccactgcactctatcctgggtaacagcgagactctgtcttaaaaataataacaataataataataataaagacttacttaaccaatattattgattaccagacttttatgaaagccaaagactgcttgctagtaggaaaaaatttcaaataataaccaaagctgaaaaatggtctgtcataaattatttccccggtaatttttgaaaggaaaaatgtataacaagtactatttacatatctgcatttaaaaaagcaattcttagaatacttcctttacattattctcctattttagacattttgtgaaagagaacaaattgtccagtggcctcctgtcagatcaacaattattatactccttaattccatgcaaatttaaatgaatgctataaaattttaaatctgtagcctgggtgtacgtttcactcaagttctcctactgaggactcttgactaacagcatactggcagtttcaccttaacctgctcgttaaataatgtgttggtgtgagatatcaggaatgtctcatgatatcacgtttaccatttacaccatctgcaaccatatgctattaataaaatggaaaaaaacaaaatggtcattttgcatatacttcactctgacctagtttagtccatgatactataattgtgagagcatatccagatgctgtgttctctatgtaaaacagtattgtccattcagaaatgtgtgacccttcatttatggatattgactatatgtaatgcagtgctatcccaatattttcaataaaggactttatgcattcaaaaacacacacaaaaaactacacagaaagaaaaaaaaaagaaacagggggggcgccgacataaaacataatcactccaagagaagcacagaaatatatgtacaacacacggttgttgcgaaacatagtggcctccaagaagaggaggcattaaaaagaaagacgagagccgaacgcagcagtataaacacacaagcgcaggagcggagaaaaacagctccacacgggagaccacatctggggaaagaagaccacccacacctctgcggggggggcgacacacaatgggagggaacacacacacacgaagagatataacaccgcaggaggaaaaaaacaacacagggtgttacttggtggtgacacaacccaaatgagtcgcgcaggagaaaagtgcccacaggaaatgagttgcgaaaat

SEQ ID NO: 427139 - DNA, 2294 bp, Homo sapiens
aggagcctgttctgtcttcgatgttccccgatcaacctcaccacctcttgctcagcctatataccgccatcttcagcaaaccctgatgaaggctacaaagtaagcgcaagtacccacgtaaagacgttagttctacctggccgaacaactcactacacgttaggtctacctggccaggtagacctaactactcccacttcctccaaatccatacagtgaggaatcagagtgtttatagatatatgagttgaatgcaatttttatttttggtaactgtgaaaaataagatactgtggatatatacatgccttgtgtatttatcagcataattttcattaccaaaatgtacagctattatttgccatggaaaaggttagtctcatttagaaaaatcgaaagtgcacagcacttaaagggaatatatgaggttttttttttaaaaaaaaaacttttatttattatttgtagtatattgtctgaaatgtgtcggcagttttttttcttttaatgtgtcaaatcttgaaatattaaatgtatacattttgtgctatgttttgggaacaaatctgtttgatttatatagttttatattgaattttttttgccctgattgtttagggtgataggtcttaagcagcatatatctatatatctgtatgtgggtatatagagatatatgtgtgtgtgtatgtatatgtacatatacatatatatgagtgtataattctaaatttctaaaaactcattatgaatgttcatcaatttgactattataggccagctttccatttagtcaataaaagcgtacatttttagttacttaccttgaacatattcgtgtgaaaaagaatacatcatttctcacagtcttaagttgatatttatagaaatgaatacctttgtgaacctagacttagaacaaatcctgcttttgaaaaaaaatgttttgcttcttacaaaatcatttgtgttaataacaaaaactttattttcggagtgttctttgtataacttttccaagcttttacattaacgagcaggcctctgtcttaaaagggactcagtatattaatttctgcattttttaaatcaaatgaaaaacgtcaaattggaccaattgtcttggtttcttgattcatttatttgagaaaaaaacaatacaaagaaatgcattcatatcaaaattggaatagaaaggaaaacctatttttaagatatcaacctattttcacatcataaaacatctattacataaaataaaggtccaggcatagtggctcttgcctgtaatcccagcactttgggaggccgaggcaggtggatcactcaaggtcacaagtttgagaccagtctggccaacatggtgaaaccccatctctactaaaagtacaaatattagccgactatgtggcgggcacctgtaatcccacctactcgggaggctgaggcaggagaattgcttgaatccgggaagcagaggttgtagtgagccaagatcgtgccactgcactctatcctgggtaacagcgagactctgtcttaaaaataataacaataataataataataaagacttacttaaccaatattattgattaccagacttttatgaaagccaaagactgcttgctagtaggaaaaaatttcaaataataaccaaagctgaaaaatggtctgtcataaattatttccccggtaatttttgaaaggaaaaatgtataacaagtactatttacatatctgcatttaaaaaagcaattcttagaatacttcctttacattattctcctattttagacattttgtgaaagagaacaaattgtccagtggcctcctgtcagatcaacaattattatactccttaattccatgcaaatttaaatgaatgctataaaattttaaatctgtagcctgggtgtacgtttcactcaagttctcctactgaggactcttgactaacagcatactggcagtttcaccttaacctgctcgttaaataatgtgttggtgtgagatatcaggaatgtctcatgatatcacgtttaccatttacaccatctgcaaccatatgctattaataaaatggaaaaaaacaaaatggtcattttgcatatacttcactctgacctagtttagtccatgatactataattgtgagagcatatccagatgctgtgttctctatgtaaaacagtattgtccattcagaaatgtgtgacccttcatttatggatattgactatatgtaatgcagtgctatcccaatattttcaataaaggactttatgcattca

SEQ ID NO: 427140 - DNA, 1983 bp, Homo sapiens
  misc_feature (1953)..(1953): n is a, c, g, or t
  misc_feature (1980)..(1980): n is a, c, g, or t
cgatccggacgcggggccccgcgggcgcgcgcctcggagctcccgcctcctcctcttgctcctcctcggcgtacggtcctcccctgacccctccttccacccgccgagaggatgcgctccccggcgcccagcagcagaggccaccgctcccagaaatgcatgcgaccgatccccttctcccggaccccaggagccggcgcccccgccctgtagggttacgactcactgattaaaaagagggactttttcaaatactttgcacttttgattgtgtattatggataccaaggaagagaagaaggaacggaaacaaagttattttgctcgactgaaaaagaaaaaacaagccaaacaaaatgcagagacagcctcagctgtagctacaaggactcatactgggaaggaagataataatacagtagttttagagccagacaagtgcaacattgctgtggaagaggaatatatgactgatgagaaaaaaaagagaaaaagtaatcagttaaaggagatcaggcgtacagaactaaagagatattatagtattgatgacaatcaaaacaaaacacatgataaaaaagagaagaagatggtggttcagaagccccatgggactatggaatacactgctggaaaccaggacaccctaaactccatagcactgaaatttaacatcactcccaataaattggtggaactgaataaacttttcacacatactattgttccaggccaggtcctttttgtgccagatgccaactctccttccagtaccttaaggctatcatcatccagtcctggtgctactgtctctccttcatcatcagatgcagaatatgataaattgcctgatgctgacttagcacgaaaggccttgaaacccattgaaagagtcttatcgtctacttctgaagaagatgagccaggtgtggtgaaatttttaaaaatgaattgtcgatacttcaccgatggaaagggtgtggttggcggtgttatgatagtgactcctaacaacatcatgtttgaccctcataaatctgatcctctggttattgaaaatgggtgtgaggagtatggtctcatctgccccatggaagaggttgtttccattgcgctctacaatgacatttctcacatgaagatcaaagatgccttgccatcgcctggagaatgggaagacctggcttcagaaaaggatatcaacccattcagtaagttcaaatctatcaacaaggaaaaacgacagcagaatggagagaaaattatgacttcggattccagaccaatagtacctttggagaagtccacaggacatacacctacaaagccctcaggcagctctgtgtcagagaaattaaagaaactggactcctctagggagacatcccatggttctcccacagtgactaagctcagcaaggaaccttccgacacttcttctgcatttgaatctacagccaaagaaaactttctaggggaagatgatgattttgttgacttggaagaactttcttctcaaactggtggtggaatgcacaaaaaagacaccttgaaggagtgcctttctcttgacccagaggaacgaaagaaagctgagtcacaaataaacaattctgccgtggaaatgcaggtgcagtcagccctagcctttttgggaacagagaatgatgttgaactgaagggggcgctagatttagaaacctgtgagaagcaagatataatgccagaagtggacaagcagtctggttcgccagaaagccgagtagaaaacacactgaacatacatgaagatttagataaagttaaactcattgaatattacctgactaagaacaaagaagggccacaggtatctgaaaatttgcagaaaacagaattaagtgatggaaaaagtattgaaccaggggaggatccagaattctcgagtagtagtagtaggcggcccgcttctanaggatccaagctttaccgtacgccgtncat

SEQ ID NO: 427141 - DNA, 501 bp, Homo sapiens
ggtgaggtggttcccttttacatatagatactatttcatatttcctcattgctaattctccagattaaaatgtctgttttcttttttgtgtttcttccccaaggtctttaagtggagtggagaaaattcatactttatcaatggagacataagttctttagaacttggtggtggagggtaaggttttttttgtttttgttttcttattgttattttaccacctgacctgagtgggtctgttttgacctacgtagttaaaacttcggtgtcaggttattttagctagtccatgtgcttagatgaattaggacagaggctaacacagaatggcctaactaagaatcaaagatagaatatttatgtgtctaatgagagactgttaccacttgtcttttaggaagactggtcatttaaatgaaataaaggaaatgtatcctggttttataagcagtttagaattttgcctgtcagtagtataaaggaaagaagatgggggcaaga

SEQ ID NO: 427142 - DNA, 1021 bp, Homo sapiens
gtgcgcgtgcagggatcagaagccggttggggtgtgagaggttttctcgctctaggaatagcgggttttgcagcaattgttgcatatggattatataaactgaagagcaggggaaatactaaaatgtccattcatctgatccacatgcgtgtggcagcccaaggctttgttgtaggagcaatgactgttggtatgggctattccatgtatcgggaattctgggcaaaacctaagccttagaagaagagatgctgtcttggtcttgttggaggagcttgctttagttagatgtcttattattaaagttacctattattgttggaaataaactaatttgtatgggtttagatggtaacatggcattttgaatattggcttcctttcttgcaggcttgatttgcttggtgaccgaattactagtgactagtttactaactaggtcattcaaggaagtcaagttaacttaaacatgtcacctaaatgcacttgatggtgttgaaatgtccaccttcttaaatttttaagatgaacttagttctaaagaagataacaggccaatcctgaaggtactccctgtttgctgcagaatgtcagatattttggatgttgcataagagtcctatttgccccagttaattcaacttttgtctgcctgttttgtggactggctggctctgttagaactctgtccaaaaagtgcatggaatataacttgtaaagcttcccacaattgacaatatatatgcatgtgtttaaaccaaatccagaaagcttaaacaatagagctgcataatagtatttattaaagaatcacaactgtaaacatgagaataacttaaggattctagtttagttttttgtaattgccaattatatttttgctgctgatatattagaataatttttaaatgtcatcttgaatcagaaatatgtattttaagcactcacgcaaaggtaaatgaacactttttaaatgtgtgtgttgcttattttttcaataagaattgtaaacattgaactg

SEQ ID NO: 427143 - DNA, 1163 bp, Homo sapiens
ctaccatgtcttcatagtctactcacctatgttgatctagacacagagtgctatgcacttgcattcactactgaggacagagcgctggattgtgatgcatactaacttctacaaatactccatgcgataacgcgtgacaatatcgagttgagtaacggttgtatgatatgagcttatgtacactggagctaagcacaggtaaagtagtagaatagtcagtgtcttctgatccgctatagcgaatcgtgatgcccaaggctgtggtgagaacgagcgaccgactagtgtggtaatttccaatatatctcattgtcgttgtccatagtctagtcatcacatcgtcaatgttctaaagaacatatcatactcgcagtgtcttgcccatagctgaggcgtgaactctgcaatacttaaattctctgcctatagtatactcttagctatctatgagttgttagatgacctctagatgttgtagtgattgtcaatgatggtaacatggcattttgaatattggcttcctttcttgcaggcttgatttgcttggtgaccgaattactagtgactagtttactaactaggtcattcaaggaagtcaagttaacttaaacatgtcacctaaatgcacttgatggtgttgaaatgtccaccttcttaaatttttaagatgaacttagttctaaagaagataacaggccaatcctgaaggtactccctgtttgctgcagaatgtcagatattttggatgttgcataagagtcctatttgccccagttaattcaacttttgtctgcctgttttgtggactggctggctctgttagaactctgtccaaaaagtgcatggaatataacttgtaaagcttcccacaattgacaatatatatgcatgtgtttaaaccaaatccagaaagcttaaacaatagagctgcataatagtatttattaaagaatcacaactgtaaacatgagaataacttaaggattctagtttagttttttgtaattgccaattatatttttgctgctgatatattagaataatttttaaatgtcatcttgaatcagaaatatgtattttaagcactcacgcaaaggtaaatgaacactttttaaatgtgtgtgttgcttattttttcaataagaattgtaaacattgaactg

SEQ ID NO: 427144 - DNA, 967 bp, Homo sapiens
gtgcgcgtgcagggatcagaagccggttggggtgtgagaggttttctcgctctaggaatagcgggttttgcagcaattgttgcatatggattatataaactgaagagcaggggaaatactaaaatgtccattcatctgatccacatgcgtgtggcagcccaaggctttgttgtaggagcaatgactgttggtatgggctattccatgtatcgggaattctgggcaaaacctaagccttagaagaagagatgctgtcttggtcttgttggaggagcttgctttagttagatgtcttattattaaagttacctattattgttggaaataaactaatttgtatgggtttagatggtaacatggcattttgaatattggcttcctttcttgcaggcttgatttgcttggtgaccgaattactagtgactagtttactaactaggtcattcaaggaagtcaagttaacttaaacatgtcacctaaatgcacttgatggtgttgaaatgtccaccttcttaaatttttaagatgaacttagttctaaagaagataacaggccaatcctgaaggtactccctgtttgctgcagaatgtcagatattttggatgttgcataagagtcctatttgccccagttaattcaacttttgtctgcctgttttgtggactggctggctctgttagaactctgtccaatgtgtttaaaccaaatccagaaagcttaaacaatagagctgcataatagtatttattaaagaatcacaactgtaaacatgagaataacttaaggattctagtttagttttttgtaattgccaattatatttttgctgctgatatattagaataatttttaaatgtcatcttgaatcagaaatatgtattttaagcactcacgcaaaggtaaatgaacactttttaaatgtgtgtgttgcttattttttcaataagaattgtaaacattgaactg

SEQ ID NO: 427145 - DNA, 687 bp, Homo sapiens
gactctagacgatcccctatttacgcaggccactttacgcaggcactttaacgcaggcttgatttgcttggtgaccgaattactagtgactagtttactaactaggtcattcaaggaagtcaagttaacttaaacatgtcacctaaatgcacttgatggtgttgaaatgtccaccttcttaaatttttaagatgaacttagttctaaagaagataacaggccaatcctgaaggtactccctgtttgctgcagaatgtcagatattttggatgttgcataagagtcctatttgccccagttaattcaacttttgtctgcctgttttgtggactggctggctctgttagaactctgtccaaaaagtgcatggaatataacttgtaaagcttcccacaattgacaatatatatgcatgtgtttaaaccaaatccagaaagcttaaacaatagagctgcataatagtatttattaaagaatcacaactgtaaacatgagaataacttaaggattctagtttagttttttgtaattgccaattatatttttgctgctgatatattagaataatttttaaatgtcatcttgaatcagaaatatgtattttaagcactcacgcaaaggtaaatgaacactttttaaatgtgtgtgttgcttattttttcaataagaattgtaaacattgaactg

SEQ ID NO: 427146 - DNA, 1123 bp, Homo sapiens
gtgcgcgtgcagggatcagaagccggttggggtgtgagaggttttctcgctctaggaatcttcaagcaatcactatgtcaacagacacaggtgtttcccttccttcacatgaggaagatcagggatccaaacttactcgaaaaactaaagaggcaccattcgtacctgttggagcagcgggttttgcagcaattgttgcatatggattatataaactgaagagcaggggaaatactaaaatgtccattcatctgatccacatgcgtgtggcagcccaaggctttgttgtaggagcaatgactgttggtatgggctattccatgtatcgggaattctgggcaaaacctaagccttagaagaagagatgctgtcttggtcttgttggaggagcttgctttagttagatgtcttattattaaagttacctattattgttggaaataaactaatttgtatgggtttagatggtaacatggcattttgaatattggcttcctttcttgcaggcttgatttgcttggtgaccgaatttactaactaggtcattcaaggaagtcaagttaacttaaacatgtcacctaaatgcacttgatggtgttgaaatgtccaccttcttaaatttttaagatgaacttagttctaaagaagataacaggccaatcctgaaggtactccctgtttgctgcagaatgtcagatattttggatgttgcataagagtcctatttgccccagttaattcaacttttgtctgcctgttttgtggactggctggctctgttagaactctgtccaaaaagtgcatggaatataacttgtaaagcttcccacaattgacaatatatatgcatgtgtttaaaccaaatccagaaagcttaaacaatagagctgcataatagtatttattaaagaatcacaactgtaaacatgagaataacttaaggattctagtttagttttttgtaattgccaattatatttttgctgctgatatattagaataatttttaaatgtcatcttgaatcagaaatatgtattttaagcactcacgcaaaggtaaatgaacactttttaaatgtgtgtgttgcttattttttcaataagaattgtaaacattgaactg

SEQ ID NO: 427147 - DNA, 1083 bp, Homo sapiens
gtgcgcgtgcagggatcagaagccggttggggtgtgagaggttttctcgctctaggaatcttcaagcaatcactatgtcaacagacacaggtgtttcccttccttcacatgaggaagatcagggatccaaacttactcgaaaaactaaagaggcaccattcgtacctgttggagcagcgggttttgcagcaattgttgcatatggattatataaactgaagagcaggggaaatactaaaatgtccattcatctgatccacatgcgtgtggcagcccaaggctttgttgtaggagcaatgactgttggtatgggctattccatgtatcgggaattctgggcaaaacctaagccttagaagaagagatgctgtcttggtcttgttggaggagcttgctttagttagatgtcttattattaaagttacctattattgttggaaataaactaatttgtatgggtttagatggtaacatggcattttgaatattggcttcctttcttgcaggcttgatttgcttggtgaccgaattactagtgactagtttactaactaggtcattcaaggaagtcaagttaacttaaacatgtcacctaaatgcacttgatgataacaggccaatcctgaaggtactccctgtttgctgcagaatgtcagatattttggatgttgcataagagtcctatttgccccagttaattcaacttttgtctgcctgttttgtggactggctggctctgttagaactctgtccaaaaagtgcatggaatataacttgtaaagcttcccacaattgacaatatatatgcatgtgtttaaaccaaatccagaaagcttaaacaatagagctgcataatagtatttattaaagaatcacaactgtaaacatgagaataacttaaggattctagtttagttttttgtaattgccaattatatttttgctgctgatatattagaataatttttaaatgtcatcttgaatcagaaatatgtattttaagcactcacgcaaaggtaaatgaacactttttaaatgtgtgtgttgcttattttttcaataagaattgtaaacattgaactg

SEQ ID NO: 427148 - DNA, 517 bp, Homo sapiens
tactgacgcaggctagaaaggatgaaacttgagaacaatattctaagaagcagatagaaaataccacactttgttattccatatagaggaagtgcccagaacaagtacatcaatatatagagaaggtagattagtggttgtcagagagcgcaagaaggggggaattggagagtgtctgcccacaggtacaggcatgctttttggcattatgaaaatattctggaattaggtagtggcgatggttgcgaaagttttggaatatggtaaaagacactgaaatgtatgcttaaaaatggtgaattttgtgatgtataaattctactgtagaaataataataacaacaaaagtaataaagcaaggtgtctttccacatctccatgtccagtattttcatttaaaaaaaaagaaagaaagtaaaagcatttcagggccaggttcagtggctaacttctgtaatcccagcacttttggaggcctaggtgggaggatcgcttgaggccagaagttcaaaaccag

SEQ ID NO: 427149 - DNA, 910 bp, Homo sapiens
ggagaaggagttaaaattctgattaaaaacaaactttaataaagaagcagtgtgccaaggtagaaacagtaaaagatttgtagtaagaaaatatgaatttaaatcagctctacctctgaatagctgtaattttagatgagttcatttttagatacaggtttttttttcatatcatttctgttattctcagataatgttatctgttctaatcaccttttatagtggttgtcggtaatagatgtgaaaatatttgttgtacagtaaaatatggcataaactttagtcattattggtgaatcagtgtaccttagtggagtgagtatgctttccgagttggaaacacctgcgtctgaatcaacttactagctgtcacctcggcaagtcacttcaactctgagatgtggttttctcatctttaaaatggaaatagtactccttacctcatgacgatgttgtgaggataaaatagttactcttcatttgtgagggcccactagcagccaagcagggtgagccatgagctgtaaagctggtatacactgggccttcgatcattggtgacttcatcaaggttagcatttgccttaggattctctgagtgtagcacatatgcaaataacgtgacagataatgtgacaaatccctatttcagatcccatgttagatctggatattcaagaattagccagtcttaccactggaggaggagatgtggagaattttgaaagactcttttcaaagttaaaggaaatgaaaggtaatcagatccattgtgtctaatatgttcccatgttgatgcttgtctgttttacgtagtagcattttattttgttaactgctggattggattccttgttctggtctcagctgtcttgagaaacttagctactcctgggacttggtaaaaaaa

SEQ ID NO: 427150 - DNA, 2165 bp, Homo sapiens
aaattatgctaggtacgaggccggcggtgttaaatcggccgaggcggaaccggctcgcgagcgcagctatggctgctggcgtaccctgtgcgttagtcaccagctgctcctccgtcttctcaggagaccagctggtccaacatatccttggaacagaagatcttattgtggaagtgacttccaatgatgctgtgagattttatccctggaccattgataataaatactattcagcagacatcaatctatgtgtggtgccaaacaaatttcttgttactgcagagattgcagaatctgtccaagcatttgtggtttactttgacagcacacaaaaatcgggccttgatagtgtctcctcatggcttccactggcaaaagcatggttacctgaggtgatgatcttggtctgcgatagagtgtctgaagatggtataaaccgacaaaaagctcaagaatggtgcatcaaacatggctttgaattggtagaacttagtccagaggagttgcctgaggaggatgatgacttcccagaatctacaggagtaaagcgaattgtccaagccctgaatgccaatgtgtggtccaatgtagtgatgaagaatgataggaaccaaggctttagccttctcaactcattgactggaacaaaccatagcattgggtcagcagatccctgtcacccagagcaaccccatttgccagcagcagatagtactgaatccctctctgatcatcggggtggtgcatctaacacaacagatgcccaggttgatagcattgtggatcccatgttagatctggatattcaagaattagccagtcttaccactggaggaggagatgtggagaattttgaaagactcttttcaaagttaaaggaaatgaaagacaaggctgcgacgcttcctcatgagcaaagaaaagtgcatgcagaaaaggtggccaaagcattctggatggcaatcgggggagacagagatgaaattgaaggcctttcatctgatgaagagcactgaattattcatactagggtttgaccaacaaagatgctagctgtctctgagatacctctctactcagcccagtcatattttgccaaaattgcccttatcatgttggctgcctgacttgtttatagggtccccttaattttagtttttagtaggaggttaaggagaaatcttttttttcctcagtatattgtaagagagtgaggaatacagtgatagtaatgagtgaggatttcttaaatatactttttttttgttctaggaatgagggtaggataaatctcagaggtctgtgtgatttactcaagttgaagacaacctccaggccattcctggtcaaccttttaagtagcatttccagcattcacacttgatactgcacatcaggagttgtgtcacctttcctgggtgatttgggttttctccattcaaggagcttgtagctctgagctatgatgcttttattgggaggaaaggaggcagctgcagaattgatgtgagctatgtggggccgaagtctcagcccgcagctaagtctctacctaagaaaatgcctctgggcattcttttgaagtatagtgtctgagctcatgctagaaagaatcaaaaagccagtgtggatttttagactgtaataaatgaggcaaaggatttctattccagtgggaaggaaacctctctactgagttgtgggggatatgttgtatgttagagagaaccttaaggagtccttgtatgggccatggagacagtatgtgataacataccgtgattttcatgaagaaattcttctgtcttagagttctcccctgctgcttgagatgccagagctgtgttgttgcacacctgcaaaacaaggcacatttccccctttctctttaaagccaaagagagatcactgccaaagtgggagcactaaggggtgggtggggaagtgaaatgttaggcgatgaattcctgagcaccttgtttttcttccaaggttcgtagctcctctctgcccttccaagcctgtaacctcggaggactatcttttgttctttatcctttgtcttgtttgagtgggtcagccccagaggaactgataagcaaatggcaagtttttaaaggaagagtggaaagtactgcaaataaaaatccttatttgtttttgta

SEQ ID NO: 427151 - DNA, 2806 bp, Homo sapiens
aaattatgctaggtacgaggccggcggtgttaaatcggccgaggcggaaccggctcgcgagcgcagctatggctgctggcgtaccctgtgcgttagtcaccagctgctcctccgtcttctcaggagaccagctggtccaacatatccttggaacagaagatcttattgtggaagtgacttccaatgatgctgtgagattttatccctggaccattgataataaatactattcagcagacatcaatctatgtgtggtgccaaacaaatttcttgttactgcagagattgcagaatctgtccaagcatttgtggtttactttgacagcacacaaaaatcgggccttgatagtgtctcctcatggcttccactggcaaaagcatggttacctgaggtgatgatcttggtctgcgatagagtgtctgaagatggtataaaccgacaaaaagctcaagaatggtgcatcaaacatggctttgaattggtagaacttagtccagaggagttgcctgaggaggatgatgacttcccagaatctacaggagtaaagcgaattgtccaagccctgaatgccaatgtgtggtccaatgtagtgatgaagaatgataggaaccaaggctttagccttctcaactcattgactggaacaaaccatagcattgggtcagcagatccctgtcacccagagcaaccccatttgccagcagcagatagtactgaatccctctctgatcatcggggtggtgcatctaacacaacagatgcccaggttgatagcattgtggatcccatgttagatctggatattcaagaattagccagtcttaccactggaggaggagatgtggagaattttgaaagactcttttcaaagttaaaggaaatgaaagacaaggctgcgacgcttcctcatgagcaaagaaaagtgcatgcagaaaaggtggccaaagcattctggatggcaatcgggggagacagagatgaaattgaaggcctttcatctgatgaagagcactgaattattcatactagggtttgaccaacaaagatgctagctgtctctgagatacctctctactcagcccagtcatattttgccaaaattgcccttatcatgttggctgcctgacttgtttatagggtccccttaattttagtttttagtaggaggttaaggagaaatcttttttttcctcagtatattgtaagagagtgaggaatacagtgatagtaatgagtgaggatttcttaaatatactttttttttgttctaggaatgagggtaggataaatctcagaggtctgtgtgatttactcaagttgaagacaacctccaggccattcctggtcaaccttttaagtagcatttccagcattcacacttgatactgcacatcaggagttgtgtcacctttcctgggtgatttgggttttctccattcaaggagcttgtagctctgagctatgatgcttttattgggaggaaaggaggcagctgcagaattgatgtgagctatgtggggccgaagtctcagcccgcagctaagtctctacctaagaaaatgcctctgggcattcttttgaagtatagtgtctgagctcatgctagaaagaatcaaaaagccagtgtggatttttagactgtaataaatgaggcaaaggatttctattccagtgggaaggaaacctctctactgagttgtgggggatatgttgtatgttagagagaaccttaaggagtccttgtatgggccatggagacagtatgtgataacataccgtgattttcatgaagaaattcttctgtcttagagttctcccctgctgcttgagatgccagagctgtgttgttgcacacctgcaaaacaaggcacatttccccctttctctttaaagccaaagagagatcactgccaaagtgggagcactaaggggtgggtggggaagtgaaatgttaggcgatgaattcctgagcaccttgtttttcttccaaggttcgtagctcctctctgcccttccaagcctgtaacctcggaggactatcttttgttctttatcctttgtcttgtttgagtgggtcagccccagaggaactgataagcaaatggcaagtttttaaaggaagagtggaaagtactgcaaataaaaatccttatttgtttttgtagactttgtaatgcatatcattagccctcactgtgatcattactgctgtggctctgaactggcacatagtacagtggatggaaggtgcccgcacaccagctgagaactggttctggcctaggtgggctctagaaccatttacacagcatgaaagaaacaggttgggttaggagcagaaagaaataaggctcacacccctccagacactaccttataagcactgcagaacctgaaacagatggcagaaggaatggaatgctacaggggccagcaggagtgaccacagggaggggacagctcagtgactggagcattcaggaagaggctttccagggaacactggacattgcttagtgaccttttgttcctttttttttttttttcttttactgttctgaaagactttgagtctgtggttcaccaccagcccatcagtgtttctttgaggtgattgcattagggaagttggctctgggattgcaaaaaaaaaaaaaaggtggaacatgttttccttaaaagatggaaggttttagaaaatatactaggccatctggttagaaaaaacagaccagactagaaaaagctgtgaatttgattttgtagattaaacaaagccagatgattaaaatgtgatttatttat

SEQ ID NO: 427152 - DNA, 2925 bp, Homo sapiens
aaattatgctaggtacgaggccggcggtgttaaatcggccgaggcggaaccggctcgcgagcgcagctatggctgctggcgtaccctgtgcgttagtcaccagctgctcctccgtcttctcaggagaccagctggtccaacatatccttggaacagaagatcttattgtggaagtgacttccaatgatgctgtgagattttatccctggaccattgataataaatactattcagcagacatcaatctatgtgtggtgccaaacaaatttcttgttactgcagagattgcagaatctgtccaagcatttgtggtttactttgacagcacacaaaaatcgggccttgatagtgtctcctcatggcttccactggcaaaagcatggttacctgaggtgatgatcttggtctgcgatagagtgtctgaagatggtataaaccgacaaaaagctcaagaatggtgcatcaaacatggctttgaattggtagaacttagtccagaggagttgcctgaggaggatgatgacttcccagaatctacaggagtaaagcgaattgtccaagccctgaatgccaatgtgtggtccaatgtagtgatgaagaatgataggaaccaaggctttagccttctcaactcattgactggaacaaaccatagcattgggtcagcagatccctgtcacccagagcaaccccatttgccagcagcagatagtactgaatccctctctgatcatcggggtggtgcatctaacacaacagatgcccaggttgatagcattgtggatcccatgttagatctggatattcaagaattagccagtcttaccactggaggaggagatgtggagaattttgaaagactcttttcaaagttaaaggaaatgaaagacaaggctgcgacgcttcctcatgagcaaagaaaagtgcatgcagaaaaggtggccaaagcattctggatggcaatcgggggagacagagatgaaattgaaggcctttcatctgatgaagagcactgaattattcatactagggtttgaccaacaaagatgctagctgtctctgagatacctctctactcagcccagtcatattttgccaaaattgcccttatcatgttggctgcctgacttgtttatagggtccccttaattttagtttttagtaggaggttaaggagaaatcttttttttcctcagtatattgtaagagagtgaggaatacagtgatagtaatgagtgaggatttcttaaatatactttttttttgttctaggaatgagggtaggataaatctcagaggtctgtgtgatttactcaagttgaagacaacctccaggccattcctggtcaaccttttaagtagcatttccagcattcacacttgatactgcacatcaggagttgtgtcacctttcctgggtgatttgggttttctccattcaaggagcttgtagctctgagctatgatgcttttattgggaggaaaggaggcagctgcagaattgatgtgagctatgtggggccgaagtctcagcccgcagctaagtctctacctaagaaaatgcctctgggcattcttttgaagtatagtgtctgagctcatgctagaaagaatcaaaaagccagtgtggatttttagactgtaataaatgaggcaaaggatttctattccagtgggaaggaaacctctctactgagttgtgggggatatgttgtatgttagagagaaccttaaggagtccttgtatgggccatggagacagtatgtgataacataccgtgattttcatgaagaaattcttctgtcttagagttctcccctgctgcttgagatgccagagctgtgttgttgcacacctgcaaaacaaggcacatttccccctttctctttaaagccaaagagagatcactgccaaagtgggagcactaaggggtgggtggggaagtgaaatgttaggcgatgaattcctgagcaccttgtttttcttccaaggttcgtagctcctctctgcccttccaagcctgtaacctcggaggactatcttttgttctttatcctttgtcttgtttgagtgggtcagccccagaggaactgataagcaaatggcaagtttttaaaggaagagtggaaagtactgcaaataaaaatccttatttgtttttgtagactttgtaatgcatatcattagccctcactgtgatcattactgctgtggctctgaactggcacatagtacagtggatggaaggtgcccgcacaccagctgagaactggttctggcctaggtgggctctagaaccatttacacagcatgaaagaaacaggttgggttaggagcagaaagaaataaggctcacacccctccagacactaccttataagcactgcagaacctgaaacagatggcagaaggaatggaatgctacaggggccagcaggagtgaccacagggaggggacagctcagtgactggagcattcaggaagaggctttccagggaacactggacattgcttagtgaccttttgttcctttttttttttttttcttttactgttctgaaagactttgagtctgtggttcaccaccagcccatcagtgtttctttgaggtgattgcattagggaagttggctctgggattgcaaaaaaaaaaaaaaggtggaacatgttttccttaaaagatggaaggttttagaaaatatactaggccatctggttagaaaaaacagaccagactagaaaaagctgtgaatttgattttgtagattaaacaaagccagatgattaaaatgtgatttatttataaactgtgctaatgtctattattatgattttgtggttttttattagggggtatgagtgagggaagccctatatccttcattggattagacatatatagtgaatagtggaagagtctgtc

SEQ ID NO: 427153 - DNA, 2310 bp, Homo sapiens
aaattatgctaggtacgaggccggcggtgttaaatcggccgaggcggaaccggctcgcgagcgcagctatggctgctggcgtaccctgtgcgttagtcaccagctgctcctccgtcttctcaggagaccagctggtccaacgtgagtagataggcgcctgggccgacctccaaggcccctgagcctcagcgggcgacggacccagcaccacggcctctctgggccttgtccccgcagcgggccctgcgttcttcctccagtcagtggaggcgcccagtctccccagatatccttggaacagaagatcttattgtggaagtgacttccaatgatgctgtgagattttatccctggaccattgataataaatactattcagcagacatcaatctatgtgtggtgccaaacaaatttcttgttactgcagagattgcagaatctgtccaagcatttgtggtttactttgacagcacacaaaaatcgggccttgatagtgtctcctcatggcttccactggcaaaagcatggttacctgaggtgatgatcttggtctgcgatagagtgtctgaagatggtataaaccgacaaaaagctcaagaatggtgcatcaaacatggctttgaattggtagaacttagtccagaggagttgcctgaggaggatgatgacttcccagaatctacaggagtaaagcgaattgtccaagccctgaatgccaatgtgtggtccaatgtagtgatgaagaatgataggaaccaaggctttagccttctcaactcattgactggaacaaaccatagcattgggtcagcagatccctgtcacccagagcaaccccatttgccagcagcagatagtactgaatccctctctgatcatcggggtggtgcatctaacacaacagatgcccaggttgatagcattgtggatcccatgttagatctggatattcaagaattagccagtcttaccactggaggaggagatgtggagaattttgaaagactcttttcaaagttaaaggaaatgaaagacaaggctgcgacgcttcctcatgagcaaagaaaagtgcatgcagaaaaggtggccaaagcattctggatggcaatcgggggagacagagatgaaattgaaggcctttcatctgatgaagagcactgaattattcatactagggtttgaccaacaaagatgctagctgtctctgagatacctctctactcagcccagtcatattttgccaaaattgcccttatcatgttggctgcctgacttgtttatagggtccccttaattttagtttttagtaggaggttaaggagaaatcttttttttcctcagtatattgtaagagagtgaggaatacagtgatagtaatgagtgaggatttcttaaatatactttttttttgttctaggaatgagggtaggataaatctcagaggtctgtgtgatttactcaagttgaagacaacctccaggccattcctggtcaaccttttaagtagcatttccagcattcacacttgatactgcacatcaggagttgtgtcacctttcctgggtgatttgggttttctccattcaaggagcttgtagctctgagctatgatgcttttattgggaggaaaggaggcagctgcagaattgatgtgagctatgtggggccgaagtctcagcccgcagctaagtctctacctaagaaaatgcctctgggcattcttttgaagtatagtgtctgagctcatgctagaaagaatcaaaaagccagtgtggatttttagactgtaataaatgaggcaaaggatttctattccagtgggaaggaaacctctctactgagttgtgggggatatgttgtatgttagagagaaccttaaggagtccttgtatgggccatggagacagtatgtgataacataccgtgattttcatgaagaaattcttctgtcttagagttctcccctgctgcttgagatgccagagctgtgttgttgcacacctgcaaaacaaggcacatttccccctttctctttaaagccaaagagagatcactgccaaagtgggagcactaaggggtgggtggggaagtgaaatgttaggcgatgaattcctgagcaccttgtttttcttccaaggttcgtagctcctctctgcccttccaagcctgtaacctcggaggactatcttttgttctttatcctttgtcttgtttgagtgggtcagccccagaggaactgataagcaaatggcaagtttttaaaggaagagtggaaagtactgcaaataaaaatccttatttgtttttgta

SEQ ID NO: 427154 - DNA, 1206 bp, Homo sapiens
  misc_feature (1166)..(1166): n is a, c, g, or t
  misc_feature (1172)..(1172): n is a, c, g, or t
  misc_feature (1180)..(1180): n is a, c, g, or t
  misc_feature (1195)..(1195): n is a, c, g, or t
aaattatgctaggtacgaggccggcggtgttaaatcggccgaggcggaaccggctcgcgagcgcagctatggctgctggcgtaccctgtgcgttagtcaccagctgctcctccgtcttctcaggagaccagctggtccaacatatccttggaacagaagatcttattgtggaagtgacttccaatgatgctgtgagattttatccctggaccattgataataaatactattcagcagacatcaatctatgtgtggtgccaaacaaatttcttgttactgcagagattgcagaatctgtccaagcatttgtggtttactttgacagcacacaaaaatcgggccttgatagtgtctcctcatggcttccactggcaaaagcatggttacctgaggtgatgatcttggtctgcgatagagtgtctgaagatggtataaaccgacaaaaagctcaagaatggtgcatcaaacatggctttgaattggtagaacttagtccagaggagttgcctgaggaggatgatgacttcccagaatctacaggagtaaagcgaattgtccaagccctgaatgccaatgtgtggtccaatgtagtgatgaagaatgataggaaccaaggctttagccttctcaactcattgactggaacaaaccatagcattgggtcagcagatccctgtcacccagagcaaccccatttgccagcagcagatagtactgaatccctctctgatcatcggggtggtgcatctaacacaacagatgcccaggttgatagcattgtggatcccatgttagatctggatattcaagaattagccagtcttaccactggaggaggagatgtggagaattttgaaagactcttttcaaagttaaaggaaatgaaagacaaggctgcgacgcttcctcatgagcaaagaaaagtgcatgcagaaaaggtggccaaagcattctggatggcaatcgggggagacagagatgaaattgaaggcctttcatctgatgaagagcactgaattattcatactagggtttgaccaacaaagatgctagctgtctctgagatacctctctactcagcccagtcatattttgccaaaattgcccttatcatgttggctgcctgacttgtttatagggtccccttaattttagtttttagtaancgccanggttttcncatcgcgagcgacanggtaaacgcat

SEQ ID NO: 427155 - DNA, 2683 bp, Homo sapiens
ggagaaggagttaaaattctgattaaaaacaaactttaataaagaagcagtgtgccaaggtagaaacagtaaaagatttgtagtaagaaaatatgaatttaaatcagctctacctctgaatagctgtaattttagatgagttcatttttagatacaggtttttttttcatatcatttctgttattctcagataatgttatctgttctaatcaccttttatagtggttgtcggtaatagatgtgaaaatatttgttgtacagtaaaatatggcataaactttagtcattattggtgaatcagtgtaccttagtggagtgagtatgctttccgagttggaaacacctgcgtctgaatcaacttactagctgtcacctcggcaagtcacttcaactctgagatgtggttttctcatctttaaaatggaaatagtactccttacctcatgacgatgttgtgaggataaaatagttactcttcatttgtgagggcccactagcagccaagcagggtgagccatgagctgtaaagctggtatacactgggccttcgatcattggtgacttcatcaaggttagcatttgccttaggattctctgagtgtagcacatatgcaaataacgtgacagataatgtgacaaatccctatttcagatcccatgttagatctggatattcaagaattagccagtcttaccactggaggaggagatgtggagaattttgaaagactcttttcaaagttaaaggaaatgaaagacaaggctgcgacgcttcctcatgagcaaagaaaagtgcatgcagaaaaggtgagacaatcagccaggtatttattgaatacctataaaaggtccagtgctattattataattatatatcacacttgtgtatttctgaagggtcttagtgtgagcttttcattgaatattaacttctaactaattaaatatttatacagtaatagtatagttgctgcagtcaaaccaagatttttcacctggatggtgagtgatgtggaacctttattgagactcaggatgtttgcctttctaactattgggccagaaaactcttagttgttttgttttattattaccaacacaacacatgctattggcaggaaacttgtatggttgatggtgttccctgatatgtgtcataatttatcctgttcccttttggacatttaggtcatgtgcattttttgcttctataaataacaaagctgtgcatgtctttacacatcatctttgtatacaactctaaatatatccttggtataaatttctagatgtggcgatcatgggtcaaatggtattcaagggttctgatatgtgttgccagaggactggagggcaaagtgcagaattttaggtctcagtcagtttaaggtatgacatatgaaacaagctgaaatgtagctgttgcctaaaatttgttgcatgcttctctccacaggtggccaaagcattctggatggcaatcgggggagacagagatgaaattgaaggcctttcatctgatgaagagcactgaattattcatactagggtttgaccaacaaagatgctagctgtctctgagatacctctctactcagcccagtcatattttgccaaaattgcccttatcatgttggctgcctgacttgtttatagggtccccttaattttagtttttagtaggaggttaaggagaaatcttttttttcctcagtatattgtaagagagtgaggaatacagtgatagtaatgagtgaggatttcttaaatatactttttttttgttctaggaatgagggtaggataaatctcagaggtctgtgtgatttactcaagttgaagacaacctccaggccattcctggtcaaccttttaagtagcatttccagcattcacacttgatactgcacatcaggagttgtgtcacctttcctgggtgatttgggttttctccattcaaggagcttgtagctctgagctatgatgcttttattgggaggaaaggaggcagctgcagaattgatgtgagctatgtggggccgaagtctcagcccgcagctaagtctctacctaagaaaatgcctctgggcattcttttgaagtatagtgtctgagctcatgctagaaagaatcaaaaagccagtgtggatttttagactgtaataaatgaggcaaaggatttctattccagtgggaaggaaacctctctactgagttgtgggggatatgttgtatgttagagagaaccttaaggagtccttgtatgggccatggagacagtatgtgataacataccgtgattttcatgaagaaattcttctgtcttagagttctcccctgctgcttgagatgccagagctgtgttgttgcacacctgcaaaacaaggcacatttccccctttctctttaaagccaaagagagatcactgccaaagtgggagcactaaggggtgggtggggaagtgaaatgttaggcgatgaattcctgagcaccttgtttttcttccaaggttcgtagctcctctctgcccttccaagcctgtaacctcggaggactatcttttgttctttatcctttgtcttgtttgagtgggtcagccccagaggaactgataagcaaatggcaagtttttaaaggaagagtggaaagtactgcaaataaaaatccttatttgtttttgta

SEQ ID NO: 427156 - DNA, 856 bp, Homo sapiens
aaattatgctaggtacgaggccggcggtgttaaatcggccgaggcggaaccggctcgcgagcgcagctatggctgctggcgtaccctgtgcgttagtcaccagctgctcctccgtcttctcaggagaccagctggtccaacatatccttggaacagaagatcttattgtggaagtgacttccaatgatgctgtgagattttatccctggaccattgataataaatactattcagcagacatcaatctatgtgtggtgccaaacaaatttcttgttactgcagagattgcagaatctgtccaagcatttgtggtttactttgacagcacacaaaaatcgggccttgatagtgtctcctcatggcttccactggcaaaagcatggttacctgaggtgatgatcttggtctgcgatagagtgtctgaagatggtataaaccgacaaaaagctcaagaatggtgcatcaaacatggctttgaattggtagaacttagtccagaggagttgcctgaggaggatgatgacttcccagaatctacaggagtaaagcgaattgtccaagccctgaatgccaatgtgtggtccaatgtagtgatgaagaatgtttcttggacattgatattcaaaggtcaaatatttaatctgaaaatctaggtaattaaaaacgtaagagatgaattgcattccttcctgccctccacccagataaattggatgtgttatctatatgggaattcatgatttaatatgtgattattataagtctgaacaacttacttggttataggatatcttcataacttttttcctttagtgtcttcttaaaagttagtaatacacaagcaaccaaaggaaaa

SEQ ID NO: 427157 - DNA, 2814 bp, Homo sapiens
aaattatgctaggtacgaggccggcggtgttaaatcggccgaggcggaaccggctcgcgagcgcagctatggctgctggcgtaccctgtgcgttagtcaccagctgctcctccgtcttctcaggagaccagctggtccaacatatccttggaacagaagatcttattgtggaagtgacttccaatgatgctgtgagattttatccctggaccattgataataaatactattcagcagacatcaatctatgtgtggtgccaaacaaatttcttgttactgcagagattgcagaatctgtccaagcatttgtggtttactttgacagcacacaaaaatcgggccttgatagtgtctcctcatggcttccactggcaaaagcatggttacctgaggtgatgatcttggtctgcgatagagtgtctgaagatggtataaaccgacaaaaagctcaagaatggtgcatcaaacatggctttgaattggtagaacttagtccagaggagttgcctgaggaggatgatgacttcccagaatctacaggagtaaagcgaattgtccaagccctgaatgccaatgtgtggtccaatgtagtgatgaagaatgataggaaccaaggctttagccttctcaactcattgactggaacaaaccatagcattgggtcagcagatccctgtcacccagagcaaccccatttgccagcagcagatagtactgaatccctctctgatcatcggggtggtgcatctaacacaacagatgcccaggttgatagcattgtggatcccatgttagatctggatattcaagaattagccagtcttaccactggaggaggagatgtggagaattttgaaagactcttttcaaagttaaaggaaatgaaagacaaggctgcgacgcttcctcatgagcaaagaaaagtgcatgcagaaaaggtgagacaatcagccaggtatttattgaatacctataaaaggtccagtgctattattataattatatatcacacttgtgtatttctgaagggtcttagtgtgagcttttcattgaatattaacttctaactaattaaatatttatacagtaatagtatagttgctgcagtcaaaccaagatttttcacctggatggtgagtgatgtggaacctttattgagactcaggatgtttgcctttctaactattgggccagaaaactcttagttgttttgttttattattaccaacacaacacatgctattggcaggaaacttgtatggttgatggtgttccctgatatgtgtcataatttatcctgttcccttttggacatttaggtcatgtgcattttttgcttctataaataacaaagctgtgcatgtctttacacatcatctttgtatacaactctaaatatatccttggtataaatttctagatgtggcgatcatgggtcaaatggtattcaagggttctgatatgtgttgccagaggactggagggcaaagtgcagaattttaggtctcagtcagtttaaggtatgacatatgaaacaagctgaaatgtagctgttgcctaaaatttgttgcatgcttctctccacaggtggccaaagcattctggatggcaatcgggggagacagagatgaaattgaaggcctttcatctgatgaagagcactgaattattcatactagggtttgaccaacaaagatgctagctgtctctgagatacctctctactcagcccagtcatattttgccaaaattgcccttatcatgttggctgcctgacttgtttatagggtccccttaattttagtttttagtaggaggttaaggagaaatcttttttttcctcagtatattgtaagagagtgaggaatacagtgatagtaatgagtgaggatttcttaaatatactttttttttgttctaggaatgagggtaggataaatctcagaggtctgtgtgatttactcaagttgaagacaacctccaggccattcctggtcaaccttttaagtagcatttccagcattcacacttgatactgcacatcaggagttgtgtcacctttcctgggtgatttgggttttctccattcaaggagcttgtagctctgagctatgatgcttttattgggaggaaaggaggcagctgcagaattgatgtgagctatgtggggccgaagtctcagcccgcagctaagtctctacctaagaaaatgcctctgggcattcttttgaagtatagtgtctgagctcatgctagaaagaatcaaaaagccagtgtggatttttagactgtaataaatgaggcaaaggatttctattccagtgggaaggaaacctctctactgagttgtgggggatatgttgtatgttagagagaaccttaaggagtccttgtatgggccatggagacagtatgtgataacataccgtgattttcatgaagaaattcttctgtcttagagttctcccctgctgcttgagatgccagagctgtgttgttgcacacctgcaaaacaaggcacatttccccctttctctttaaagccaaagagagatcactgccaaagtgggagcactaaggggtgggtggggaagtgaaatgttaggcgatgaattcctgagcaccttgtttttcttccaaggttcgtagctcctctctgcccttccaagcctgtaacctcggaggactatcttttgttctttatcctttgtcttgtttgagtgggtcagccccagaggaactgataagcaaatggcaagtttttaaaggaagagtggaaagtactgcaaataaaaatccttatttgtttttgta

SEQ ID NO: 427158 - DNA, 2013 bp, Homo sapiens
aaattatgctaggtacgaggccggcggtgttaaatcggccgaggcggaaccggctcgcgagcgcagctatggctgctggcgtaccctgtgcgttagtcaccagctgctcctccgtcttctcaggagaccagctggtccaacatatccttggaacagaagatcttattgtggaagtgacttccaatgatgctgtgagattttatccctggaccattgataataaatactattcagcagacatcaatctatgtgtggtgccaaacaaatttcttgttactgcagagattgcagaatctgtccaagcatttgtggtttactttgacagcacacaaaaatcgggccttgatagtgtctcctcatggcttccactggcaaaagcatggttacctgaggtgatgatcttggtctgcgatagagtgtctgaagatggtataaaccgacaaaaagctcaagaatggtgcatcaaacatggctttgaattggtagaacttagtccagaggagttgcctgaggaggatgatgacttcccagaatctacaggagtaaagcgaattgtccaagccctgaatgccaatgtgtggtccaatgtagtgatgaagaatgataggaaccaaggctttagccttctcaactcattgactggaacaaaccatagcattgggtcagcagatccctgtcacccagagcaaccccatttgccagcagcagatagtactgaatccctctctgatcatcggggtggtgcatctaacacaacagatgcccaggttgatagcattgtggatcccatgttagatctggatattcaagaattagccagtcttaccactggaggaggagatgtggagaattttgaaagactcttttcaaagttaaaggaaatgaaagacaaagatgctagctgtctctgagatacctctctactcagcccagtcatattttgccaaaattgcccttatcatgttggctgcctgacttgtttatagggtccccttaattttagtttttagtaggaggttaaggagaaatcttttttttcctcagtatattgtaagagagtgaggaatacagtgatagtaatgagtgaggatttcttaaatatactttttttttgttctaggaatgagggtaggataaatctcagaggtctgtgtgatttactcaagttgaagacaacctccaggccattcctggtcaaccttttaagtagcatttccagcattcacacttgatactgcacatcaggagttgtgtcacctttcctgggtgatttgggttttctccattcaaggagcttgtagctctgagctatgatgcttttattgggaggaaaggaggcagctgcagaattgatgtgagctatgtggggccgaagtctcagcccgcagctaagtctctacctaagaaaatgcctctgggcattcttttgaagtatagtgtctgagctcatgctagaaagaatcaaaaagccagtgtggatttttagactgtaataaatgaggcaaaggatttctattccagtgggaaggaaacctctctactgagttgtgggggatatgttgtatgttagagagaaccttaaggagtccttgtatgggccatggagacagtatgtgataacataccgtgattttcatgaagaaattcttctgtcttagagttctcccctgctgcttgagatgccagagctgtgttgttgcacacctgcaaaacaaggcacatttccccctttctctttaaagccaaagagagatcactgccaaagtgggagcactaaggggtgggtggggaagtgaaatgttaggcgatgaattcctgagcaccttgtttttcttccaaggttcgtagctcctctctgcccttccaagcctgtaacctcggaggactatcttttgttctttatcctttgtcttgtttgagtgggtcagccccagaggaactgataagcaaatggcaagtttttaaaggaagagtggaaagtactgcaaataaaaatccttatttgtttttgta

SEQ ID NO: 427159 - DNA, 1954 bp, Homo sapiens
aaattatgctaggtacgaggccggcggtgttaaatcggccgaggcggaaccggctcgcgagcgcagctatggctgctggcgtaccctgtgcgttagtcaccagctgctcctccgtcttctcaggagaccagctggtccaacatatccttggaacagaagatcttattgtggaagtgacttccaatgatgctgtgagattttatccctggaccattgataataaatactattcagcagacatcaatctatgtgtggtgccaaacaaatttcttgttactgcagagattgcagaatctgtccaagcatttgtggtttactttgacagcacacaaaaatcgggccttgatagtgtctcctcatggcttccactggcaaaagcatggttacctgaggtgatgatcttggtctgcgatagagtgtctgaagatggtataaaccgacaaaaagctcaagaatggtgcatcaaacatggctttgaattggtagaacttagtccagaggagttgcctgaggaggatgatgacttcccagaatctacaggagtaaagcgaattgtccaagccctgaatgccaatgtgtggtccaatgtagtgatgaagaatgataggaaccaaggctttagccttctcaactcattgactggaacaaaccatagcattgggtcagcagatccctgtcacccagagcaaccccatttgccagcagcagatagtactgaatccctctctgatcatcggggtggtgcatctaacacaacagatgcccaggttgatagcattgtggatcccatgttagatctggatattcaagaattagccagtcttaccactggaggaggagatgtggagaattttgaaagactcttttcaaagttaaaggaaatgaaagacaaagatgctagctgtctctgagatacctctctactcagcccagtcatattttgccaaaattgcccttatcatgttggctgctgcttgagatgccagagctgtgttgttgcacacctgcaaaacaaggcacatttccccctttctctttaaagccaaagagagatcactgccaaagtgggagcactaaggggtgggtggggaagtgaaatgttaggcgatgaattcctgagcaccttgtttttcttccaaggttcgtagctcctctctgcccttccaagcctgtaacctcggaggactatcttttgttctttatcctttgtcttgtttgagtgggtcagccccagaggaactgataagcaaatggcaagtttttaaaggaagagtggaaagtactgcaaataaaaatccttatttgtttttgtagactttgtaatgcatatcattagccctcactgtgatcattactgctgtggctctgaactggcacatagtacagtggatggaaggtgcccgcacaccagctgagaactggttctggcctaggtgggctctagaaccatttacacagcatgaaagaaacaggttgggttaggagcagaaagaaataaggctcacacccctccagacactaccttataagcactgcagaacctgaaacagatggcagaaggaatggaatgctacaggggccagcaggagtgaccacagggaggggacagctcagtgactggagcattcaggaagaggctttccagggaacactggacattgcttagtgaccttttgttcctttttttttttttttcttttactgttctgaaagactttgagtctgtggttcaccaccagcccatcagtgtttctttgaggtgattgcattagggaagttggctctgggattgcaaaaaaaaaaaaaaggtggaacatgttttccttaaaagatggaaggttttagaaaatatactaggccatctggttagaaaaaacagaccagactagaaaaagctgtgaatttgattttgtagattaaacaaagccagatgattaaaatgtgatttatttat

SEQ ID NO: 427160 - DNA, 853 bp, Homo sapiens
cggcacgaggggtgttcagagtttcggttctcttttctgtgatcgtattacttatgcaaaacgagcccagtcacttgcgcggccagagaggggcaggtgctgggcggcggctgacgggcgcagcaccctaggcccagtgtctggctccagccccgcatccggcgccggccccgcatccagctctggccctgcgacaatagagtccggaagtgcaggcaaagcggctcccgggagcgccgcgcggtcctgcgcgggatcagcgagggccgcgccccggcgggcgggcggcatggctgcagtgctggctctcagggtggtcgcggggttggcggccgcagcgctggtggccatgctcttggagcactacggcctggcgggccagccctcgccgctgccgcgccccgcgccccccaggaggccgcaccctgcgccagggcccggagacagcaacatcttctggggcctgcagatatccgacattcacctgagcaggtttcgagatccaggcagagcggtagacttagagaaattctgttctgaaactattgacatcattcaaccagctctcgtcctagcaacaggagacctgacagatgccaaaacaaaggaacagttgggatccaggcagcatgaggtagaatggcaaacctaccagggtattctgaagaagacaagagtcatggaaaaaaccaagtggctggatatcaaaggaaatcatggtaagagccaagagccagattacaataaagacaagagtttttttcccccttcaggaacctagattttccaacttagattgtaaaattataaagtgggacatttacatatactaaaggtcacatctctgaaatac

SEQ ID NO: 427161 - DNA, 464 bp, Homo sapiens
caagacaaaatgacaataataataataataatacctagaaactcacacactgagaatggggcagtaaataataatagggaggatagaaaagtcagcatggcattccagatgagaaaactgaagcaagttaaactttctacatggtaaccgtgattatgtagttgatatacaaagtaatgactgtgggccttcaagaagaggttaaaatacattcattatattaacgagtgcatcttagaaagatttctttcaaaaagtagttgaagtttttttgctttaaggagtaaatctcaatcatctggaaatttaacttctgtggaatacctctttacatcttaaaggaaatgttaatgcattatattgaggttattattgcaatggaattttcaaaaatgtgagtgtgctttttttgtttctagaatctataagacacatatctgttctaggtatagtgtctactaaga

SEQ ID NO: 427162 - DNA, 2667 bp, Homo sapiens
cggcacgaggggtgttcagagtttcggttctcttttctgtgatcgtattacttatgcaaaacgagcccagtcacttgcgcggccagagaggggcaggtgctgggcggcggctgacgggcgcagcaccctaggcccagtgtctggctccagccccgcatccggcgccggccccgcatccagctctggccctgcgacaatagagtccggaagtgcaggcaaagcggctcccgggagcgccgcgcggtcctgcgcgggatcagcgagggccgcgccccggcgggcgggcggcatggctgcagtgctggctctcagggtggtcgcggggttggcggccgcagcgctggtggccatgctcttggagcactacggcctggcgggccagccctcgccgctgccgcgccccgcgccccccaggaggccgcaccctgcgccagggcccggagacagcaacatcttctggggcctgcaggagacctgacagatgccaaaacaaaggaacagttgggatccaggcagcatgaggtagaatggcaaacctaccagggtattctgaagaagacaagagtcatggaaaaaaccaagtggctggatatcaaaggaaatcatgatgcattcaatattccaagtctggacagcatcaagaattattacaggaaatattctgctgtacgtagagatggctctttccattatgtccacagtactccctttggcaactattcgttcatctgtgtagatgccactgtaaatccagggcctaagagaccctataatttctttggaattttagataagaaaaagatggaggagctcttattactggccaaggaaagcagtcggagcaaccatacaatttggtttggacactttacaacatccactattctttctccatcaccaggaatccggtcaataatgagttcggctatagcttatttgtgtggacatctccatacacttggtggactgatgcctgttttgcacactcgtcacttccagggcactttggaacttgaggtgggagactggaaggataataggaggtaccggatttttgcttttgatcacgacctctttagctttgcagatttgatctttgggaagtggcctgtggttcttatcaccaatcctaaatcactcctttatagttgtggtgaacatgaaccactagaaagacttcttcactcaacacacatcagagtcttggccttttccttatcctccattacttctgtcacagttaagattgatggagttcatttaggccaggctgttcatgtgtctggtcccattttcgtactgaagtggaatcctagaaactacagtagtgggacacataacatagaagtaatcgtccaggattctgctggaagaagtaagagtgttcaccacatattttctgttcaagagaataatcatctcagttttgatcccctggcatcatttattctccgtactgatcactacatcatggcccgggtcctttttgtgctgattgtgctgagccagctcaccattctcattatttttagatatcgaggatacccagagcttaaagaaccttcagggtttataaatctgacctcattttctcttcatgtcttgagcaaaataaacatcttctactattctgtgttgttgttgaccctgtatacagtgctgggtccatggttttttggtgaaatcattgatggcaaatttggttgctgcttttcctttgggatatttgttaatggacatttcctacaaggcagcataacatttataattggaattctccagctggcgttttttaacatccccttgatggcttacatgtgttggagcttgctgcagcggtgctttggtcacaacttcaggtctcatctccatcaaagaaaatacttgaaaattatgcctgttcacctacttatgctactgctgtacatctggcaggtttattcctgctactttctttatgcaacatacggcaccctagcttttttattctcccctttgcggacctggttgacactgctgacacctgttctcattcgttatgtgtggacactgaactccaccaagtttggaatcttcatggtgcagttaaaaagccacctgagctcctgaaggccatgtctcaccactggcagctgggcagaagcccagcctctgtgtctgtagcccaggcctctaccccagtagcaggtggagggccaggattggtgggtgagctttagggagcagctgctcgtttggagtcctggacgttggagggattacccactactgatacctgcagaatggactgcagaaaagtctcaaaaataatgcctttattccttccctccctaaggaggcaaagagttgatttacctttgtgaagagaaaacccttatctaggacatccacagggtagaggttgggtgtgtgtacgggagtgtctgaggcccagtgtgttttttagggttaccccatgtaaagcacttaccgctgtgcttggaattcagcagctgtcaaaggtgcaatttcaggggcagggaacctttgaggatctgggcccgaccctcactacccctgagatattagttcccaggcctgttttcccacaggattgtgggctctctgcttccttagtcggaagtgttttcaactaatcaaataaatgaatgaatgatgaataagaaa

SEQ ID NO: 427163 - DNA, 2621 bp, Homo sapiens
cggcacgaggggtgttcagagtttcggttctcttttctgtgatcgtattacttatgcaaaacgagcccagtcacttgcgcggccagagaggggcaggtgctgggcggcggctgacgggcgcagcaccctaggcccagtgtctggctccagccccgcatccggcgccggccccgcatccagctctggccctgcgacaatagagtccggaagtgcaggcaaagcggctcccgggagcgccgcgcggtcctgcgcgggatcagcgagggccgcgccccggcgggcgggcggcatggctgcagtgctggctctcagggtggtcgcggggttggcggccgcagcgctggtggccatgctcttggagcactacggcctggcgggccagccctcgccgctgccgcgccccgcgccccccaggaggccgcaccctgcgccagggcccggagacagcaacatcttctggggcctgcaggagacctgacagatgccaaaacaaaggaacagttgggatccaggcagcatgaggtagaatggcaaacctaccagggtattctgaagaagacaagagtcatggaaaaaaccaagtggctggatatcaaaggaaatcatggaaatattctgctgtacgtagagatggctctttccattatgtccacagtactccctttggcaactattcgttcatctgtgtagatgccactgtaaatccagggcctaagagaccctataatttctttggaattttagataagaaaaagatggaggagctcttattactggccaaggaaagcagtcggagcaaccatacaatttggtttggacactttacaacatccactattctttctccatcaccaggaatccggtcaataatgagttcggctatagcttatttgtgtggacatctccatacacttggtggactgatgcctgttttgcacactcgtcacttccagggcactttggaacttgaggtgggagactggaaggataataggaggtaccggatttttgcttttgatcacgacctctttagctttgcagatttgatctttgggaagtggcctgtggttcttatcaccaatcctaaatcactcctttatagttgtggtgaacatgaaccactagaaagacttcttcactcaacacacatcagagtcttggccttttccttatcctccattacttctgtcacagttaagattgatggagttcatttaggccaggctgttcatgtgtctggtcccattttcgtactgaagtggaatcctagaaactacagtagtgggacacataacatagaagtaatcgtccaggattctgctggaagaagtaagagtgttcaccacatattttctgttcaagagaataatcatctcagttttgatcccctggcatcatttattctccgtactgatcactacatcatggcccgggtcctttttgtgctgattgtgctgagccagctcaccattctcattatttttagatatcgaggatacccagagcttaaagaaccttcagggtttataaatctgacctcattttctcttcatgtcttgagcaaaataaacatcttctactattctgtgttgttgttgaccctgtatacagtgctgggtccatggttttttggtgaaatcattgatggcaaatttggttgctgcttttcctttgggatatttgttaatggacatttcctacaaggcagcataacatttataattggaattctccagctggcgttttttaacatccccttgatggcttacatgtgttggagcttgctgcagcggtgctttggtcacaacttcaggtctcatctccatcaaagaaaatacttgaaaattatgcctgttcacctacttatgctactgctgtacatctggcaggtttattcctgctactttctttatgcaacatacggcaccctagcttttttattctcccctttgcggacctggttgacactgctgacacctgttctcattcgttatgtgtggacactgaactccaccaagtttggaatcttcatggtgcagttaaaaagccacctgagctcctgaaggccatgtctcaccactggcagctgggcagaagcccagcctctgtgtctgtagcccaggcctctaccccagtagcaggtggagggccaggattggtgggtgagctttagggagcagctgctcgtttggagtcctggacgttggagggattacccactactgatacctgcagaatggactgcagaaaagtctcaaaaataatgcctttattccttccctccctaaggaggcaaagagttgatttacctttgtgaagagaaaacccttatctaggacatccacagggtagaggttgggtgtgtgtacgggagtgtctgaggcccagtgtgttttttagggttaccccatgtaaagcacttaccgctgtgcttggaattcagcagctgtcaaaggtgcaatttcaggggcagggaacctttgaggatctgggcccgaccctcactacccctgagatattagttcccaggcctgttttcccacaggattgtgggctctctgcttccttagtcggaagtgttttcaactaatcaaataaatgaatgaatgatgaataagaaa

SEQ ID NO: 427164 - DNA, 2400 bp, Homo sapiens
cggcacgaggggtgttcagagtttcggttctcttttctgtgatcgtattacttatgcaaaacgagcccagtcacttgcgcggccagagaggggcaggtgctgggcggcggctgacgggcgcagcaccctaggcccagtgtctggctccagccccgcatccggcgccggccccgcatccagctctggccctgcgacaatagagtccggaagtgcaggcaaagcggctcccgggagcgccgcgcggtcctgcgcgggatcagcgagggccgcgccccggcgggcgggcggcatggctgcagtgctggctctcagggtggtcgcggggttggcggccgcagcgctggtggccatgctcttggagcactacggcctggcgggccagccctcgccgctgccgcgccccgcgccccccaggaggccgcaccctgcgccagggcccggagacagcaacatcttctggggcctgcaggagacctgacagatgccaaaacaaaggaacagttgggatccaggcagcatgaggtagaatggcaaacctaccagggtattctgaagaagacaagagtcatggaaaaaaccaagtggctggatatcaaaggaaatcatgaaaaagatggaggagctcttattactggccaaggaaagcagtcggagcaaccatacaatttggtttggacactttacaacatccactattctttctccatcaccaggaatccggtcaataatgagggcactttggaacttgaggtgggagactggaaggataataggaggtaccggatttttgcttttgatcacgacctctttagctttgcagatttgatctttgggaagtggcctgtggttcttatcaccaatcctaaatcactcctttatagttgtggtgaacatgaaccactagaaagacttcttcactcaacacacatcagagtcttggccttttccttatcctccattacttctgtcacagttaagattgatggagttcatttaggccaggctgttcatgtgtctggtcccattttcgtactgaagtggaatcctagaaactacagtagtgggacacataacatagaagtaatcgtccaggattctgctggaagaagtaagagtgttcaccacatattttctgttcaagagaataatcatctcagttttgatcccctggcatcatttattctccgtactgatcactacatcatggcccgggtcctttttgtgctgattgtgctgagccagctcaccattctcattatttttagatatcgaggatacccagagcttaaagaaccttcagggtttataaatctgacctcattttctcttcatgtcttgagcaaaataaacatcttctactattctgtgttgttgttgaccctgtatacagtgctgggtccatggttttttggtgaaatcattgatggcaaatttggttgctgcttttcctttgggatatttgttaatggacatttcctacaaggcagcataacatttataattggaattctccagctggcgttttttaacatccccttgatggcttacatgtgttggagcttgctgcagcggtgctttggtcacaacttcaggtctcatctccatcaaagaaaatacttgaaaattatgcctgttcacctacttatgctactgctgtacatctggcaggtttattcctgctactttctttatgcaacatacggcaccctagcttttttattctcccctttgcggacctggttgacactgctgacacctgttctcattcgttatgtgtggacactgaactccaccaagtttggaatcttcatggtgcagttaaaaagccacctgagctcctgaaggccatgtctcaccactggcagctgggcagaagcccagcctctgtgtctgtagcccaggcctctaccccagtagcaggtggagggccaggattggtgggtgagctttagggagcagctgctcgtttggagtcctggacgttggagggattacccactactgatacctgcagaatggactgcagaaaagtctcaaaaataatgcctttattccttccctccctaaggaggcaaagagttgatttacctttgtgaagagaaaacccttatctaggacatccacagggtagaggttgggtgtgtgtacgggagtgtctgaggcccagtgtgttttttagggttaccccatgtaaagcacttaccgctgtgcttggaattcagcagctgtcaaaggtgcaatttcaggggcagggaacctttgaggatctgggcccgaccctcactacccctgagatattagttcccaggcctgttttcccacaggattgtgggctctctgcttccttagtcggaagtgttttcaactaatcaaataaatgaatgaatgatgaataagaaa

SEQ ID NO: 427165 - DNA, 2411 bp, Homo sapiens
gtgagccatgatcgcgccactgcattcctgcctgggggatagagaccctgtctgagaagtgaaggaaaggggaatggtagagggaaggggaagagaaagaaaagaaaacctatggaggtacgttaataatcagaaggggccagaggaagccacctgacacatttgtgagacaatttaaaaggcgttctcatacattctcactttgatacaacaaccctgcaaagtgcgcacggaaggtgttattaactccgttttacaggagacctgacagatgccaaaacaaaggaacagttgggatccaggcagcatgaggtagaatggcaaacctaccagggtattctgaagaagacaagagtcatggaaaaaaccaagtggctggatatcaaaggaaatcatggaaatattctgctgtacgtagagatggctctttccattatgtccacagtactccctttggcaactattcgttcatctgtgtagatgccactgtaaatccagggcctaagagaccctataatttctttggaattttagataagaaaaagatggaggagctcttattactggccaaggaaagcagtcggagcaaccatacaatttggtttggacactttacaacatccactattctttctccatcaccaggaatccggtcaataatgagttcggctatagcttatttgtgtggacatctccatacacttggtggactgatgcctgttttgcacactcgtcacttccagggcactttggaacttgaggtgggagactggaaggataataggaggtaccggatttttgcttttgatcacgacctctttagctttgcagatttgatctttgggaagtggcctgtggttcttatcaccaatcctaaatcactcctttatagttgtggtgaacatgaaccactagaaagacttcttcactcaacacacatcagagtcttggccttttccttatcctccattacttctgtcacagttaagattgatggagttcatttaggccaggctgttcatgtgtctggtcccattttcgtactgaagtggaatcctagaaactacagtagtgggacacataacatagaagtaatcgtccaggattctgctggaagaagtaagagtgttcaccacatattttctgttcaagagaataatcatctcagttttgatcccctggcatcatttattctccgtactgatcactacatcatggcccgggtcctttttgtgctgattgtgctgagccagctcaccattctcattatttttagatatcgaggatacccagagcttaaagaaccttcagggtttataaatctgacctcattttctcttcatgtcttgagcaaaataaacatcttctactattctgtgttgttgttgaccctgtatacagtgctgggtccatggttttttggtgaaatcattgatggcaaatttggttgctgcttttcctttgggatatttgttaatggacatttcctacaaggcagcataacatttataattggaattctccagctggcgttttttaacatccccttgatggcttacatgtgttggagcttgctgcagcggtgctttggtcacaacttcaggtctcatctccatcaaagaaaatacttgaaaattatgcctgttcacctacttatgctactgctgtacatctggcaggtttattcctgctactttctttatgcaacatacggcaccctagcttttttattctcccctttgcggacctggttgacactgctgacacctgttctcattcgttatgtgtggacactgaactccaccaagtttggaatcttcatggtgcagttaaaaagccacctgagctcctgaaggccatgtctcaccactggcagctgggcagaagcccagcctctgtgtctgtagcccaggcctctaccccagtagcaggtggagggccaggattggtgggtgagctttagggagcagctgctcgtttggagtcctggacgttggagggattacccactactgatacctgcagaatggactgcagaaaagtctcaaaaataatgcctttattccttccctccctaaggaggcaaagagttgatttacctttgtgaagagaaaacccttatctaggacatccacagggtagaggttgggtgtgtgtacgggagtgtctgaggcccagtgtgttttttagggttaccccatgtaaagcacttaccgctgtgcttggaattcagcagctgtcaaaggtgcaatttcaggggcagggaacctttgaggatctgggcccgaccctcactacccctgagatattagttcccaggcctgttttcccacaggattgtgggctctctgcttccttagtcggaagtgttttcaactaatcaaataaatgaatgaatgatgaataagaaa

SEQ ID NO: 427166 - DNA, 1587 bp, Homo sapiens
ttagccaggcgtagtggtgtgtgcctatagtcctgcagctgtatcaggaagatcacttgaccacagaagatgaaagctgcagtgagctagctatgattgcaccactgcacgccagcctggacaacagagagaaaccttgaaaaacaacaacaacaacaacaacaacaataacaacaacaacaaagtgtagttattagaaacctattcttattttaatttagaacattataaatatttccatgtacatgaaagttacttttcttctgtggttattactaggattctgctggaagaagtaagagtgttcaccacatattttctgttcaagagaataatcatctcagttttgatcccctggcatcatttattctccgtactgatcactacatcatggcccgggtcctttttgtgctgattgtgctgagccagctcaccattctcattatttttagatatcgaggatacccagagcttaaagaaccttcagggtttataaatctgacctcattttctcttcatgtcttgagcaaaataaacatcttctactattctgtgttgttgttgaccctgtatacagtgctgggtccatggttttttggtgaaatcattgatggcaaatttggttgctgcttttcctttgggatatttgttaatggacatttcctacaaggcagcataacatttataattggaattctccagctggcgttttttaacatccccttgatggcttacatgtgttggagcttgctgcagcggtgctttggtcacaacttcaggtctcatctccatcaaagaaaatacttgaaaattatgcctgttcacctacttatgctactgctgtacatctggcaggtttattcctgctactttctttatgcaacatacggcaccctagcttttttattctcccctttgcggacctggttgacactgctgacacctgttctcattcgttatgtgtggacactgaactccaccaagtttggaatcttcatggtgcagttaaaaagccacctgagctcctgaaggccatgtctcaccactggcagctgggcagaagcccagcctctgtgtctgtagcccaggcctctaccccagtagcaggtggagggccaggattggtgggtgagctttagggagcagctgctcgtttggagtcctggacgttggagggattacccactactgatacctgcagaatggactgcagaaaagtctcaaaaataatgcctttattccttccctccctaaggaggcaaagagttgatttacctttgtgaagagaaaacccttatctaggacatccacagggtagaggttgggtgtgtgtacgggagtgtctgaggcccagtgtgttttttagggttaccccatgtaaagcacttaccgctgtgcttggaattcagcagctgtcaaaggtgcaatttcaggggcagggaacctttgaggatctgggcccgaccctcactacccctgagatattagttcccaggcctgttttcccacaggattgtgggctctctgcttccttagtcggaagtgttttcaactaatcaaataaatgaatgaatgatgaataagaaa

SEQ ID NO: 427167 - DNA, 1090 bp, Homo sapiens
taacctctctcacctggttataggcacatgcaacacatccagctgctttaaatttttcttttgtagcgatgtggtctggctacgtcactagcctagttagaactcttggctcaagtgatcctccccccttcacttcccagtgtagggattacaggcatgagcccttgtccttggccaaaattactttttaaaaagtcatcaatgttttgccgatcttttaaagtatactgatcatgagtaactactcttaaagataatttcataaaatgttcacaacttcaggtctcatctccatcaaagaaaatacttgaaaattatgcctgttcacctacttatgctactgctgtacatctggcaggtttattcctgctactttctttatgcaacatacggcaccctagcttttttattctcccctttgcggacctggttgacactgctgacacctgttctcattcgttatgtgtggacactgaactccaccaagtttggaatcttcatggtgcagttaaaaagccacctgagctcctgaaggccatgtctcaccactggcagctgggcagaagcccagcctctgtgtctgtagcccaggcctctaccccagtagcaggtggagggccaggattggtgggtgagctttagggagcagctgctcgtttggagtcctggacgttggagggattacccactactgatacctgcagaatggactgcagaaaagtctcaaaaataatgcctttattccttccctccctaaggaggcaaagagttgatttacctttgtgaagagaaaacccttatctaggacatccacagggtagaggttgggtgtgtgtacgggagtgtctgaggcccagtgtgttttttagggttaccccatgtaaagcacttaccgctgtgcttggaattcagcagctgtcaaaggtgcaatttcaggggcagggaacctttgaggatctgggcccgaccctcactacccctgagatattagttcccaggcctgttttcccacaggattgtgggctctctgcttccttagtcggaagtgttttcaactaatcaaataaatgaatgaatgatgaataagaaa

SEQ ID NO: 427168 - DNA, 441 bp, Homo sapiens
ttattactggccaaggaaagcagtcggagcaaccatacaatttggtttggacactttacaacatccactattctttctccatcaccaggaatccggtcaataatgaggtgagacaagcttccaaaatcagaattaatttgtttttagtttttttattttgctgttacctattctgcttttctggcaagacatttttattagtttggcctcacgcgttatctttgttcatttatttcatttatttttcattggttagttcggctatagcttatttgtgtggacatctccatacacttggtggactgatgcctgttttgcacactcgtcacttccagggcactttggaacttgaggtgggagactggaaggataataggaggtaagggaacctccccatagaagaaaacttatacacataagttttgccaaagcaatgatagt

SEQ ID NO: 427169 - DNA, 327 bp, Homo sapiens
aaggctactttaaaaatcttaactgaaagtgtacccatgtatctatttcacgttaacatctatttccctgcaggcccgggtcctttttgtgctgattgtgctgagccagctcaccattctcattatttttagatatcgaggatacccagagcttaaaggttagttatggttccttttattcctataagccttgttcatggaaaaaaccaaactccgtaaaatattttaaagaggtttattctaagccaatatgaatgaccatggcccagggaaaacacaaactcaagaagccttgagtaaatggtcctgaggcagttggattacagt

SEQ ID NO: 427170 - DNA, 2779 bp, Homo sapiens
cggcacgaggggtgttcagagtttcggttctcttttctgtgatcgtattacttatgcaaaacgagcccagtcacttgcgcggccagagaggggcaggtgctgggcggcggctgacgggcgcagcaccctaggcccagtgtctggctccagccccgcatccggcgccggccccgcatccagctctggccctgcgacaatagagtccggaagtgcaggcaaagcggctcccgggagcgccgcgcggtcctgcgcgggatcagcgagggccgcgccccggcgggcgggcggcatggctgcagtgctggctctcagggtggtcgcggggttggcggccgcagcgctggtggccatgctcttggagcactacggcctggcgggccagccctcgccgctgccgcgccccgcgccccccaggaggccgcaccctgcgccagggcccggagacagcaacatcttctggggcctgcagatatccgacattcacctgagcaggtttcgagatccaggcagagcggtagacttagagaaattctgttctgaaactattgacatcattcaaccagctctcgtcctagcaacaggagacctgacagatgccaaaacaaaggaacagttgggatccaggcagcatgaggtagaatggcaaacctaccagggtattctgaagaagacaagagtcatggaaaaaaccaagtggctggatatcaaaggaaatcatgatgcattcaatattccaagtctggacagcatcaagaattattacaggaaatattctgctgtacgtagagatggctctttccattatgtccacagtactccctttggcaactattcgttcatctgtgtagatgccactgtaaatccagggcctaagagaccctataatttctttggaattttagataagaaaaagatggaggagctcttattactggccaaggaaagcagtcggagcaaccatacaatttggtttggacactttacaacatccactattctttctccatcaccaggaatccggtcaataatgagttcggctatagcttatttgtgtggacatctccatacacttggtggactgatgcctgttttgcacactcgtcacttccagggcactttggaacttgaggtgggagactggaaggataataggaggtaccggatttttgcttttgatcacgacctctttagctttgcagatttgatctttgggaagtggcctgtggttcttatcaccaatcctaaatcactcctttatagttgtggtgaacatgaaccactagaaagacttcttcactcaacacacatcagagtcttggccttttccttatcctccattacttctgtcacagttaagattgatggagttcatttaggccaggctgttcatgtgtctggtcccattttcgtactgaagtggaatcctagaaactacagtagtgggacacataacatagaagtaatcgtccaggattctgctggaagaagtaagagtgttcaccacatattttctgttcaagagaataatcatctcagttttgatcccctggcatcatttattctccgtactgatcactacatcatggcccgggtcctttttgtgctgattgtgctgagccagctcaccattctcattatttttagatatcgaggatacccagagcttaaagaaccttcagggtttataaatctgacctcattttctcttcatgtcttgagcaaaataaacatcttctactattctgtgttgttgttgaccctgtatacagtgctgggtccatggttttttggtgaaatcattgatggcaaatttggttgctgcttttcctttgggatatttgttaatggacatttcctacaaggcagcataacatttataattggaattctccagctggcgttttttaacatccccttgatggcttacatgtgttggagcttgctgcagcggtgctttggtcacaacttcaggtctcatctccatcaaagaaaatacttgaaaattatgcctgttcacctacttatgctactgctgtacatctggcaggtttattcctgctactttctttatgcaacatacggcaccctagcttttttattctcccctttgcggacctggttgacactgctgacacctgttctcattcgttatgtgtggacactgaactccaccaagtttggaatcttcatggtgcagttaaaaagccacctgagctcctgaaggccatgtctcaccactggcagctgggcagaagcccagcctctgtgtctgtagcccaggcctctaccccagtagcaggtggagggccaggattggtgggtgagctttagggagcagctgctcgtttggagtcctggacgttggagggattacccactactgatacctgcagaatggactgcagaaaagtctcaaaaataatgcctttattccttccctccctaaggaggcaaagagttgatttacctttgtgaagagaaaacccttatctaggacatccacagggtagaggttgggtgtgtgtacgggagtgtctgaggcccagtgtgttttttagggttaccccatgtaaagcacttaccgctgtgcttggaattcagcagctgtcaaaggtgcaatttcaggggcagggaacctttgaggatctgggcccgaccctcactacccctgagatattagttcccaggcctgttttcccacaggattgtgggctctctgcttccttagtcggaagtgttttcaactaatcaaataaatgaatgaatgatgaataagaaa

SEQ ID NO: 427171 - DNA, 271 bp, Homo sapiens
gcggccgcctactactactactactgctcgaattcaagcttctaacgatgtacgggcccatgtaaagcacttaccgctgtgcttggaattcagcagctgtcaaaggtgcaatttcaggggcagggaacctttgaggatctgggcccgaccctcactacccctgagatattagttcccaggcctgttttcccacaggattgtgggctctctgcttccttagtcggaagtgttttcaactaatcaaataaatgaatgaatgatgaataagaaa

SEQ ID NO: 427172 - DNA, 2479 bp, Homo sapiens
cggcacgaggggtgttcagagtttcggttctcttttctgtgatcgtattacttatgcaaaacgagcccagtcacttgcgcggccagagaggggcaggtgctgggcggcggctgacgggcgcagcaccctaggcccagtgtctggctccagccccgcatccggcgccggccccgcatccagctctggccctgcgacaatagagtccggaagtgcaggcaaagcggctcccgggagcgccgcgcggtcctgcgcgggatcagcgagggccgcgccccggcgggcgggcggcatggctgcagtgctggctctcagggtggtcgcggggttggcggccgcagcgctggtggccatgctcttggagcactacggcctggcgggccagccctcgccgctgccgcgccccgcgccccccaggaggccgcaccctgcgccagggcccggagacagcaacatcttctggggcctgcaggagacctgacagatgccaaaacaaaggaacagttgggatccaggcagcatgaggtagaatggcaaacctaccagggtattctgaagaagacaagagtcatggaaaaaaccaagtggctggatatcaaaggaaatcatgaaaaagatggaggagctcttattactggccaaggaaagcagtcggagcaaccatacaatttggtttggacactttacaacatccactattctttctccatcaccaggaatccggtcaataatgagttcggctatagcttatttgtgtggacatctccatacacttggtggactgatgcctgttttgcacactcgtcacttccagggcactttggaacttgaggtgggagactggaaggataataggaggtaccggatttttgcttttgatcacgacctctttagctttgcagatttgatctttgggaagtggcctgtggttcttatcaccaatcctaaatcactcctttatagttgtggtgaacatgaaccactagaaagacttcttcactcaacacacatcagagtcttggccttttccttatcctccattacttctgtcacagttaagattgatggagttcatttaggccaggctgttcatgtgtctggtcccattttcgtactgaagtggaatcctagaaactacagtagtgggacacataacatagaagtaatcgtccaggattctgctggaagaagtaagagtgttcaccacatattttctgttcaagagaataatcatctcagttttgatcccctggcatcatttattctccgtactgatcactacatcatggcccgggtcctttttgtgctgattgtgctgagccagctcaccattctcattatttttagatatcgaggatacccagagcttaaagaaccttcagggtttataaatctgacctcattttctcttcatgtcttgagcaaaataaacatcttctactattctgtgttgttgttgaccctgtatacagtgctgggtccatggttttttggtgaaatcattgatggcaaatttggttgctgcttttcctttgggatatttgttaatggacatttcctacaaggcagcataacatttataattggaattctccagctggcgttttttaacatccccttgatggcttacatgtgttggagcttgctgcagcggtgctttggtcacaacttcaggtctcatctccatcaaagaaaatacttgaaaattatgcctgttcacctacttatgctactgctgtacatctggcaggtttattcctgctactttctttatgcaacatacggcaccctagcttttttattctcccctttgcggacctggttgacactgctgacacctgttctcattcgttatgtgtggacactgaactccaccaagtttggaatcttcatggtgcagttaaaaagccacctgagctcctgaaggccatgtctcaccactggcagctgggcagaagcccagcctctgtgtctgtagcccaggcctctaccccagtagcaggtggagggccaggattggtgggtgagctttagggagcagctgctcgtttggagtcctggacgttggagggattacccactactgatacctgcagaatggactgcagaaaagtctcaaaaataatgcctttattccttccctccctaaggaggcaaagagttgatttacctttgtgaagagaaaacccttatctaggacatccacagggtagaggttgggtgtgtgtacgggagtgtctgaggcccagtgtgttttttagggttaccccatgtaaagcacttaccgctgtgcttggaattcagcagctgtcaaaggtgcaatttcaggggcagggaacctttgaggatctgggcccgaccctcactacccctgagatattagttcccaggcctgttttcccacaggattgtgggctctctgcttccttagtcggaagtgttttcaactaatcaaataaatgaatgaatgatgaataagaaa

SEQ ID NO: 427173 - DNA, 2384 bp, Homo sapiens
atctcactacaccaagaattctaggtacttagtatgccctcactaaatctgcaaatgattgataaatactgttccactggattttgatttctttttgaacatttaatggactccctaaaagagccgtcttacttctgaacttggtgaacttgtatttggttattgaatgagtttgcatgagtctttggggacaatgggagaaaaactttgaaatttcatcagtttatccattgtggatctagtttagtatatttctgtcagatcagcaaatctcgttttcaaaggaaggtaaaatctagcgtattagggaaggaattttaaagcattgtctttttattacactaacaccctcctgtcttctattttttaggaaatattctgctgtacgtagagatggctctttccattatgtccacagtactccctttggcaactattcgttcatctgtgtagatgccactgtaaatccagggcctaagagaccctataatttctttggaattttagataagaaaaagatggaggagctcttattactggccaaggaaagcagtcggagcaaccatacaatttggtttggacactttacaacatccactattctttctccatcaccaggaatccggtcaataatgagttcggctatagcttatttgtgtggacatctccatacacttggtggactgatgcctgttttgcacactcgtcacttccagggcactttggaacttgaggtgggagactggaaggataataggaggtaccggatttttgcttttgatcacgacctctttagctttgcagatttgatctttgggaagtggcctgtggttcttatcaccaatcctaaatcactcctttatagttgtggtgaacatgaaccactagaaagacttcttcactcaacacacatcagagtcttggccttttccttatcctccattacttctgtcacagttaagattgatggagttcatttaggccaggctgttcatgtgtctggtcccattttcgtactgaagtggaatcctagaaactacagtagtgggacacataacatagaagtaatcgtccaggattctgctggaagaagtaagagtgttcaccacatattttctgttcaagagaataatcatctcagttttgatcccctggcatcatttattctccgtactgatcactacatcatggcccgggtcctttttgtgctgattgtgctgagccagctcaccattctcattatttttagatatcgaggatacccagagcttaaagaaccttcagggtttataaatctgacctcattttctcttcatgtcttgagcaaaataaacatcttctactattctgtgttgttgttgaccctgtatacagtgctgggtccatggttttttggtgaaatcattgatggcaaatttggttgctgcttttcctttgggatatttgttaatggacatttcctacaaggcagcataacatttataattggaattctccagctggcgttttttaacatccccttgatggcttacatgtgttggagcttgctgcagcggtgctttggtcacaacttcaggtctcatctccatcaaagaaaatacttgaaaattatgcctgttcacctacttatgctactgctgtacatctggcaggtttattcctgctactttctttatgcaacatacggcaccctagcttttttattctcccctttgcggacctggttgacactgctgacacctgttctcattcgttatgtgtggacactgaactccaccaagtttggaatcttcatggtgcagttaaaaagccacctgagctcctgaaggccatgtctcaccactggcagctgggcagaagcccagcctctgtgtctgtagcccaggcctctaccccagtagcaggtggagggccaggattggtgggtgagctttagggagcagctgctcgtttggagtcctggacgttggagggattacccactactgatacctgcagaatggactgcagaaaagtctcaaaaataatgcctttattccttccctccctaaggaggcaaagagttgatttacctttgtgaagagaaaacccttatctaggacatccacagggtagaggttgggtgtgtgtacgggagtgtctgaggcccagtgtgttttttagggttaccccatgtaaagcacttaccgctgtgcttggaattcagcagctgtcaaaggtgcaatttcaggggcagggaacctttgaggatctgggcccgaccctcactacccctgagatattagttcccaggcctgttttcccacaggattgtgggctctctgcttccttagtcggaagtgttttcaactaatcaaataaatgaatgaatgatgaataagaaa

SEQ ID NO: 427174 - DNA, 2293 bp, Homo sapiens
cggcacgaggggtgttcagagtttcggttctcttttctgtgatcgtattacttatgcaaaacgagcccagtcacttgcgcggccagagaggggcaggtgctgggcggcggctgacgggcgcagcaccctaggcccagtgtctggctccagccccgcatccggcgccggccccgcatccagctctggccctgcgacaatagagtccggaagtgcaggcaaagcggctcccgggagcgccgcgcggtcctgcgcgggatcagcgagggccgcgccccggcgggcgggcggcatggctgcagtgctggctctcagggtggtcgcggggttggcggccgcagcgctggtggccatgctcttggagcactacggcctggcgggccagccctcgccgctgccgcgccccgcgccccccaggaggccgcaccctgcgccagggcccggagacagcaacatcttctggggcctgcagatatccgacattcacctgagcaggtttcgagatccaggcagagcggtagacttagagaaattctgttctgaaactattgacatcattcaaccagctctcgtcctagcaacaggagacctgacagatgccaaaacaaaggaacagttgggatccaggcagcatgaggtagaatggcaaacctaccagggtattctgaagaagacaagagtcatggaaaaaaccaagtggctggatatcaaaggaaatcatgatgcattcaatattccaagtctggacagcatcaagaattattacaggaaatattctgctgtacgtagagatggctctttccattatgtccacagtactccctttggcaactattcgttcatctgtgtagatgccactgtaaatccagggcctaagagaccctataatttctttggaattttagataagaaaaagatggaggagctcttattactggccaaggaaagcagtcggagcaaccatacaatttggtttggacactttacaacatccactattctttctccatcaccaggaatccggtcaataatgagttcggctatagcttatttgtgtggacatctccatacacttggtggactgatgcctgttttgcacactcgtcacttccagggcactttggaacttgaggtgggagactggaaggataataggaggtaccggatttttgcttttgatcacgacctctttagctttgcagatttgatctttgggaagtggcctgtggttcttatcaccaatcctaaatcactcctttatagttgtggtgaacatgaaccactagaaagacttcttcactcaacacacatcagagtcttggccttttccttatcctccattacttctgtcacagttaagattgatggagttcatttaggccaggctgttcatgtgtctggtcccattttcgtactgaagtggaatcctagaaactacagtagtgggacacataacatagaagtaatcgtccaggattctgctggaagaagtaagagtgttcaccacatattttctgttcaagagaataatcatctcagttttgatcccctggcatcatttattctccgtactgatcactacatcatggcccgggtcctttttgtgctgattgtgctgagccagctcaccattctcattatttttagatatcgaggatacccagagcttaaagaaccttcagggtttataaatctgacctcattttctcttcatgtcttgagcaaaataaacatcttctactattctgtgttgttgttgaccctgtatacagtgctgggtaagtaaattagtacagattatggggaattttgccaaagaatatattaacaattttgacaatagaattagactcttgagggtataacaaatggctcatggattcttcataaatcattttctgggacatggttttggaaaataaagctcgtgcctaacatgtttaaaggacatttagttaacaccaagttaacttaagggtgctgagaagactgctacagaattagtatttgtgtagaaacctaatagaagcttaaatagcacctcctcagagcaaccttctttgtctatcttaaagttttagtctatatctcatcacaggttttacttccatcattacctttatcagaatttatacctatcttctgtgtttattatctattaactcattaaaatattcactggtaggcgggtacggtggctcatgcctgtagttccagctacttgggggctgaggcgagagtactgcttgagtccaggaggtcaaatccagcctgggcaacacagcaagacgccatc

SEQ ID NO: 427175 - DNA, 608 bp, Homo sapiens
cgtcgatgactgggaaacctggcggcaaaagacttccctagagctgtggcccccacaccttttctcttctatgaacacgtgtgatctgggctgtggaagttgtattttagactctgacatgaagtaaccttttcatctatttttctctgttacaggaaaaaggccacagtgaaggccgactccttagtttcttggaacagtctgagcacaagacttcagatgcagacatcaagtcttcagaaacaggagccttcaggtgaattggattgtgcactgaattgtggctgtcagcatttctgaaaagtgcaggccttgtcctgtgttctgtgtgtagtgtgatactcagactgttgcagtagaaatcactgtggaactattatgacctctctctcagtatgactctgtgctccccatttagctaagattggataactcaattcattcattgtgttaaaacaaacagagtgaaagttatgtcttattcttctgtacctctctatccccatccaaccctggttttctgacctggattctcaagcagcttgggaatttggatctcagttctcattctctcaatggccagctttaagtagtatatgatttaccca

SEQ ID NO: 427176 - DNA, 2557 bp, Homo sapiens
aaactagctaggtacgaggctggtgttaaatcggcagaggcctccccctccccccgcgctcccaacgtgtggcggctcgcgacccccggcaacccggagaaggtctacagagcggcctgcgccagcgaacaaaaggatgccacggagaaagaaaaaagttaaagaagtctccgaatctcggaacctggagaagaaggatgtggaaactaccagttctgtcagtgtgaagaggaagcgtagacttgaggatgcattcattgtgatatccgatagtgatggagaggaaccaaaggaggaaaatgggttgcagaaaacgaagacaaaacagtcgaatagagcaaagtgtttggccaaaagaaaaatcgcacagatgacagaagaagaacagtttgctctggctctcaaaatgagtgagcaggaagctagggaggtgaacagccaggaggaggaagaagaggagctcttgaggaaagccattgctgaaagcctgaatagttgccggccttctgatgcttccgctaccagatctcgacctctggccactggaccgtcttcccagtcccatcaagagaaaaccacagactctgggctcactgaaggcatatggcagctggtacctccatcactgtttaaaggctcacatatcagtcagggaaacgaggctgaggaaagagaggagccttgggaccacactgaaaaaactgaagaggagccggtctctggcagctcaggaagctgggaccagtcaagccagccagtgtttgagaatgtgaacgttaaatcttttgacagatgtactggccactcggctgagcacacacagtgtgggaagccacaggaaagtactgggaggggttctgcttttctcaaagctgtccagggtagcggggacacatctaggcactgtctacctaccctagcagatgccaaaggtctccaggacactgggggcactgtgaactatttctggggtattccattctgccctgatggagtagaccctaaccagtataccaaggtcattctctgccagttggaggtttatcaaaagagcctgaaaatggctcagaggcagctccttaataaaaaaggttttggggaaccagtgttacctagacctccttctctgatccagaatgaatgtggccaaggagagcaggctagtgagaaaaatgaatgcatctcagaagatatgggagatgaagacaaagaggagaggcaggagtctagggcatctgactggcactcaaaaaccaaggatttccaggaaagctcaattaaaagcttgaaagagaaacttttgttggaggaagaaccaacaaccagtcatggtcagtcttcccaagggattgttgaagaaacttctgaagagggaaactctgtacctgcttcacaaagtgttgctgctttgaccagtaagagaagcttagtccttatgccagagagttctgcagaagaaatcactgtttgtcctgagacacagctaagttcctctgaaacttttgaccttgaaagagaagtctctccaggtagcagagatatcttggatggagtcagaataataatggcagataaggaggttggtaacaaggaagatgctgagaaggaagtagctatttctaccttctcatccagtaaccaggtatcctgcccgctatgtgaccaatgctttccacccacaaagattgaacgacatgccatgtactgcaatggtctgatggaggaagatacagtattgactcggagacaaaaagaggccaagaccaagagtgacagtgggacagctgcccagacttctctagacattgacaagaatgagaagtgttacctctgtaaatccctggtcccatttagagagtatcagtgtcatgtggactcctgtctccagcttgcaaaggctgaccaaggagatggacctgaagggagtggaagagcatgttcaactgtggaggggaagtggcagcagaggctgaagaacccaaaggaaaaaggccacagtgaaggccgactccttagtttcttggaacagtctgagcacaagacttcagatgcagacatcaagtcttcagaaacaggagccttcagggtgccttcaccagggatggaagaggcaggctgcagcagagagatgcagagttctttcacacgtcgtgacttaaatgaatctcccgtcaagtcttttgtttccatttcagaagccacagattgcttagtggactttaaaaagcaagttactgtccagccaggtagtcggacacggaccaaagctggcagaggaagaaggagaaaattctgaatttctagggtccaaaagttgacaaaaccattagtaggaggggtgggccatgttcattaagccatagtggtccctagttcattgttgagcaagttttagccctgcagttttcaccaccagcacctacccagcattctggtttttatgttttttatgatctatgcagacaactgtgtattctgttttataacagtttgtttgaatttacttacagttaaaaaatttaaatataatttatgtttgtacgaaatcttatttcaa

SEQ ID NO: 427177 - DNA, 1820 bp, Homo sapiens
  misc_feature (1801)..(1801): n is a, c, g, or t
tggaaaagtcatggaggccatggggttggcttgaaaccagctttggggggttcgattccttccttttttgtctagattttatgtatacgggttcttcgaatgtgtggtagggtggggggcatccatatagtcactccaggtttatggagggttcttctactattaggacttttcgcttcgaagcgaaggcttctcaaatcatgaaaattattaatattactgctgttagagaaatgaacgagcctacagatgataggatgtttcatgtggtgtatgcatcggggtagtccgagtaacgtcggggcattccggataggccgagaaagtgttgtgggaagaaagttagatttacgcagatgacagaagaagaacagtttgctctggctctcaaaatgagtgagcaggaagctagggaggtgaacagccaggaggaggaagaagaggagctcttgaggaaagccattgctgaaagcctgaatagttgccggccttctgatgcttccgctaccagatctcgacctctggccactggaccgtcttcccagtcccatcaagagaaaaccacagactctgggctcactgaagtcttcccaagggattgttgaagaaacttctgaagagggaaactctgtacctgcttcacaaagtgttgctgctttgaccagtaagagaagcttagtccttatgccagagagttctgcagaagaaatcactgtttgtcctgagacacagctaagttcctctgaaacttttgaccttgaaagagaagtctctccaggtagcagagatatcttggatggagtcagaataataatggcagataaggaggttggtaacaaggaagatgctgagaaggaagtagctatttctaccttctcatccagtaaccaggtatcctgcccgctatgtgaccaatgctttccacccacaaagattgaacgacatgccatgtactgcaatggtctgatggaggaagatacagtattgactcggagacaaaaagaggccaagaccaagagtgacagtgggacagctgcccagacttctctagacattgacaagaatgagaagtgttacctctgtaaatccctggtcccatttagagagtatcagtgtcatgtggactcctgtctccagcttgcaaaggctgaccaaggagatggacctgaagggagtggaagagcatgttcaactgtggaggggaagtggcagcagaggctgaagaacccaaaggaaaaaggccacagtgaaggccgactccttagtttcttggaacagtctgagcacaagacttcagatgcagacatcaagtcttcagaaacaggagccttcagggtgccttcaccagggatggaagaggcaggctgcagcagagagatgcagagttctttcacacgtcgtgacttaaatgaatctcccgtcaagtcttttgtttccatttcagaagccacagattgcttagtggactttaaaaagcaagttactgtccagccaggtagtcggacacggaccaaagctggcagaggaagaaggagaaaattctgaatttctagggtccaaaagttgacaaaaccattagtaggaggggtgggccatgttcattaagccatagtggtccctagttcattgttgagcaagttttagccctgcagttttcaccaccagcacctacccagcattctggtttttatgttttttatgatctatgcagacaactgtgtattctgttttataacagtttgtttgaatttacttacagttaaaaaatttaaatataaaaaaaaaaattcaactgcccgancgtttaccgtcggcttggc

SEQ ID NO: 427178 - DNA, 2796 bp, Homo sapiens
  misc_feature (2777)..(2777): n is a, c, g, or t
aaactagctaggtacgaggctggtgttaaatcggcagaggcctccccctccccccgcgctcccaacgtgtggcggctcgcgacccccggcaacccggagaaggtctacagagcggcctgcgccagcgagtgagtacccgccgcctgcgcacagctccgcccacccctccctgcctccttttcttcctcagcgggtccgcggcccgctactctccgggaggggcgcttcccgacgccaagtcttactgttgctcaggctggaatgcagtggtgcgctctcggctcactgcaacctctcccttctgggttcaagcgattctcgtgcctcagcctcccaagtagctgggattacagacaaaaggatgccacggagaaagaaaaaagttaaagaagtctccgaatctcggaacctggagaagaaggatgtggaaactaccagttctgtcagtgtgaagaggaagcgtagacttgaggatgcattcattgtgatatccgatagtgatggagaggaaccaaaggaggaaaatgggttgcagaaaacgaagacaaaacagtcgaatagagcaaagtgtttggccaaaagaaaaatcgcacagatgacagaagaagaacagtttgctctggctctcaaaatgagtgagcaggaagctagggaggtgaacagccaggaggaggaagaagaggagctcttgaggaaagccattgctgaaagcctgaatagttgccggccttctgatgcttccgctaccagatctcgacctctggccactggaccgtcttcccagtcccatcaagagaaaaccacagactctgggctcactgaaggcatatggcagctggtacctccatcactgtttaaaggctcacatatcagtcagggaaacgaggctgaggaaagagaggagccttgggaccacactgaaaaaactgaagaggagccggtctctggcagctcaggaagctgggaccagtcaagccagccagtgtttgagaatgtgaacgttaaatcttttgacagatgtactggccactcggctgagcacacacagtgtgggaagccacaggaaagtactgggaggggttctgcttttctcaaagctgtccagggtagcggggacacatctaggcactgtctacctaccctagcagatgccaaaggtctccaggacactgggggcactgtgaactatttctggggtattccattctgccctgatggagtagaccctaaccagtataccaaggtcattctctgccagttggaggtttatcaaaagagcctgaaaatggctcagaggcagctccttaataaaaaaggttttggggaaccagtgttacctagacctccttctctgatccagaatgaatgtggccaaggagagcaggctagtgagaaaaatgaatgcatctcagaagatatgggagatgaagacaaagaggagaggcaggagtctagggcatctgactggcactcaaaaaccaaggatttccaggaaagctcaattaaaagcttgaaagagaaacttttgttggaggaagaaccaacaaccagtcatggtcagtcttcccaagggattgttgaagaaacttctgaagagggaaactctgtacctgcttcacaaagtgttgctgctttgaccagtaagagaagcttagtccttatgccagagagttctgcagaagaaatcactgtttgtcctgagacacagctaagttcctctgaaacttttgaccttgaaagagaagtctctccaggtagcagagatatcttggatggagtcagaataataatggcagataaggaggttggtaacaaggaagatgctgagaaggaagtagctatttctaccttctcatccagtaaccaggtatcctgcccgctatgtgaccaatgctttccacccacaaagattgaacgacatgccatgtactgcaatggtctgatggaggaagatacagtattgactcggagacaaaaagaggccaagaccaagagtgacagtgggacagctgcccagacttctctagacattgacaagaatgagaagtgttacctctgtaaatccctggtcccatttagagagtatcagtgtcatgtggactcctgtctccagcttgcaaaggctgaccaaggagatggacctgaagggagtggaagagcatgttcaactgtggaggggaagtggcagcagaggctgaagaacccaaaggaaaaaggccacagtgaaggccgactccttagtttcttggaacagtctgagcacaagacttcagatgcagacatcaagtcttcagaaacaggagccttcagggtgccttcaccagggatggaagaggcaggctgcagcagagagatgcagagttctttcacacgtcgtgacttaaatgaatctcccgtcaagtcttttgtttccatttcagaagccacagattgcttagtggactttaaaaagcaagttactgtccagccaggtagtcggacacggaccaaagctggcagaggaagaaggagaaaattctgaatttctagggtccaaaagttgacaaaaccattagtaggaggggtgggccatgttcattaagccatagtggtccctagttcattgttgagcaagttttagccctgcagttttcaccaccagcacctacccagcattctggtttttatgttttttatgatctatgcagacaactgtgtattctgttttataacagtttgtttgaatttacttacagttaaaaaatttaaatataaaaaaaaaaattcaactgcccgancgtttaccgtcggcttggc

SEQ ID NO: 427179 - DNA, 2557 bp, Homo sapiens
  misc_feature (2538)..(2538): n is a, c, g, or t
tggaaaagtcatggaggccatggggttggcttgaaaccagctttggggggttcgattccttccttttttgtctagattttatgtatacgggttcttcgaatgtgtggtagggtggggggcatccatatagtcactccaggtttatggagggttcttctactattaggacttttcgcttcgaagcgaaggcttctcaaatcatgaaaattattaatattactgctgttagagaaatgaacgagcctacagatgataggatgtttcatgtggtgtatgcatcggggtagtccgagtaacgtcggggcattccggataggccgagaaagtgttgtgggaagaaagttagatttacgcagatgacagaagaagaacagtttgctctggctctcaaaatgagtgagcaggaagctagggaggtgaacagccaggaggaggaagaagaggagctcttgaggaaagccattgctgaaagcctgaatagttgccggccttctgatgcttccgctaccagatctcgacctctggccactggaccgtcttcccagtcccatcaagagaaaaccacagactctgggctcactgaaggcatatggcagctggtacctccatcactgtttaaaggctcacatatcagtcagggaaacgaggctgaggaaagagaggagccttgggaccacactgaaaaaactgaagaggagccggtctctggcagctcaggaagctgggaccagtcaagccagccagtgtttgagaatgtgaacgttaaatcttttgacagatgtactggccactcggctgagcacacacagtgtgggaagccacaggaaagtactgggaggggttctgcttttctcaaagctgtccagggtagcggggacacatctaggcactgtctacctaccctagcagatgccaaaggtctccaggacactgggggcactgtgaactatttctggggtattccattctgccctgatggagtagaccctaaccagtataccaaggtcattctctgccagttggaggtttatcaaaagagcctgaaaatggctcagaggcagctccttaataaaaaaggttttggggaaccagtgttacctagacctccttctctgatccagaatgaatgtggccaaggagagcaggctagtgagaaaaatgaatgcatctcagaagatatgggagatgaagacaaagaggagaggcaggagtctagggcatctgactggcactcaaaaaccaaggatttccaggaaagctcaattaaaagcttgaaagagaaacttttgttggaggaagaaccaacaaccagtcatggtcagtcttcccaagggattgttgaagaaacttctgaagagggaaactctgtacctgcttcacaaagtgttgctgctttgaccagtaagagaagcttagtccttatgccagagagttctgcagaagaaatcactgtttgtcctgagacacagctaagttcctctgaaacttttgaccttgaaagagaagtctctccaggtagcagagatatcttggatggagtcagaataataatggcagataaggaggttggtaacaaggaagatgctgagaaggaagtagctatttctaccttctcatccagtaaccaggtatcctgcccgctatgtgaccaatgctttccacccacaaagattgaacgacatgccatgtactgcaatggtctgatggaggaagatacagtattgactcggagacaaaaagaggccaagaccaagagtgacagtgggacagctgcccagacttctctagacattgacaagaatgagaagtgttacctctgtaaatccctggtcccatttagagagtatcagtgtcatgtggactcctgtctccagcttgcaaaggctgaccaaggagatggacctgaagggagtggaagagcatgttcaactgtggaggggaagtggcagcagaggctgaagaacccaaaggaaaaaggccacagtgaaggccgactccttagtttcttggaacagtctgagcacaagacttcagatgcagacatcaagtcttcagaaacaggagccttcagggtgccttcaccagggatggaagaggcaggctgcagcagagagatgcagagttctttcacacgtcgtgacttaaatgaatctcccgtcaagtcttttgtttccatttcagaagccacagattgcttagtggactttaaaaagcaagttactgtccagccaggtagtcggacacggaccaaagctggcagaggaagaaggagaaaattctgaatttctagggtccaaaagttgacaaaaccattagtaggaggggtgggccatgttcattaagccatagtggtccctagttcattgttgagcaagttttagccctgcagttttcaccaccagcacctacccagcattctggtttttatgttttttatgatctatgcagacaactgtgtattctgttttataacagtttgtttgaatttacttacagttaaaaaatttaaatataaaaaaaaaaattcaactgcccgancgtttaccgtcggcttggc

SEQ ID NO: 427180 - DNA, 1834 bp, Homo sapiens
  misc_feature (1815)..(1815): n is a, c, g, or t
aaactagctaggtacgaggctggtgttaaatcggcagaggcctccccctccccccgcgctcccaacgtgtggcggctcgcgacccccggcaacccggagaaggtctacagagcggcctgcgccagcgaacaaaaggatgccacggagaaagaaaaaagttaaagaagtctccgaatctcggaacctggagaagaaggatgtggaaactaccagttctgtcagtgtgaagaggaagcgtagacttgaggatgcattcattgtgatatccgatagtgatggagaggaaccaaaggaggaaaatgggttgcagaaaacgaagacaaaacagtcgaatagagcaaagtgtttggccaaaagaaaaatcgcacagatgacagaagaagaacagtttgctctggctctcaaaatgagtgagcaggaagctagggaggtgaacagccaggaggaggaagaagaggagctcttgaggaaagccattgctgaaagcctgaatagttgccggccttctgatgcttccgctaccagatctcgacctctggccactggaccgtcttcccagtcccatcaagagaaaaccacagactctgggctcactgaagtcttcccaagggattgttgaagaaacttctgaagagggaaactctgtacctgcttcacaaagtgttgctgctttgaccagtaagagaagcttagtccttatgccagagagttctgcagaagaaatcactgtttgtcctgagacacagctaagttcctctgaaacttttgaccttgaaagagaagtctctccaggtagcagagatatcttggatggagtcagaataataatggcagataaggaggttggtaacaaggaagatgctgagaaggaagtagctatttctaccttctcatccagtaaccaggtatcctgcccgctatgtgaccaatgctttccacccacaaagattgaacgacatgccatgtactgcaatggtctgatggaggaagatacagtattgactcggagacaaaaagaggccaagaccaagagtgacagtgggacagctgcccagacttctctagacattgacaagaatgagaagtgttacctctgtaaatccctggtcccatttagagagtatcagtgtcatgtggactcctgtctccagcttgcaaaggctgaccaaggagatggacctgaagggagtggaagagcatgttcaactgtggaggggaagtggcagcagaggctgaagaacccaaaggaaaaaggccacagtgaaggccgactccttagtttcttggaacagtctgagcacaagacttcagatgcagacatcaagtcttcagaaacaggagccttcagggtgccttcaccagggatggaagaggcaggctgcagcagagagatgcagagttctttcacacgtcgtgacttaaatgaatctcccgtcaagtcttttgtttccatttcagaagccacagattgcttagtggactttaaaaagcaagttactgtccagccaggtagtcggacacggaccaaagctggcagaggaagaaggagaaaattctgaatttctagggtccaaaagttgacaaaaccattagtaggaggggtgggccatgttcattaagccatagtggtccctagttcattgttgagcaagttttagccctgcagttttcaccaccagcacctacccagcattctggtttttatgttttttatgatctatgcagacaactgtgtattctgttttataacagtttgtttgaatttacttacagttaaaaaatttaaatataaaaaaaaaaattcaactgcccgancgtttaccgtcggcttggc

SEQ ID NO: 427181 - DNA, 1945 bp, Homo sapiens
  misc_feature (1926)..(1926): n is a, c, g, or t
aaactagctaggtacgaggctggtgttaaatcggcagaggcctccccctccccccgcgctcccaacgtgtggcggctcgcgacccccggcaacccggagaaggtctacagagcggcctgcgccagcgagtgagtacccgccgcctgcgcacagctccgcccacccctccctgcctccttttcttcctcagcgggtccgcggcccgctactctccgggaggggcgcttcccgacgccaagacaaaaggatgccacggagaaagaaaaaagttaaagaagtctccgaatctcggaacctggagaagaaggatgtggaaactaccagttctgtcagtgtgaagaggaagcgtagacttgaggatgcattcattgtgatatccgatagtgatggagaggaaccaaaggaggaaaatgggttgcagaaaacgaagacaaaacagtcgaatagagcaaagtgtttggccaaaagaaaaatcgcacagatgacagaagaagaacagtttgctctggctctcaaaatgagtgagcaggaagctagggaggtgaacagccaggaggaggaagaagaggagctcttgaggaaagccattgctgaaagcctgaatagttgccggccttctgatgcttccgctaccagatctcgacctctggccactggaccgtcttcccagtcccatcaagagaaaaccacagactctgggctcactgaagtcttcccaagggattgttgaagaaacttctgaagagggaaactctgtacctgcttcacaaagtgttgctgctttgaccagtaagagaagcttagtccttatgccagagagttctgcagaagaaatcactgtttgtcctgagacacagctaagttcctctgaaacttttgaccttgaaagagaagtctctccaggtagcagagatatcttggatggagtcagaataataatggcagataaggaggttggtaacaaggaagatgctgagaaggaagtagctatttctaccttctcatccagtaaccaggtatcctgcccgctatgtgaccaatgctttccacccacaaagattgaacgacatgccatgtactgcaatggtctgatggaggaagatacagtattgactcggagacaaaaagaggccaagaccaagagtgacagtgggacagctgcccagacttctctagacattgacaagaatgagaagtgttacctctgtaaatccctggtcccatttagagagtatcagtgtcatgtggactcctgtctccagcttgcaaaggctgaccaaggagatggacctgaagggagtggaagagcatgttcaactgtggaggggaagtggcagcagaggctgaagaacccaaaggaaaaaggccacagtgaaggccgactccttagtttcttggaacagtctgagcacaagacttcagatgcagacatcaagtcttcagaaacaggagccttcagggtgccttcaccagggatggaagaggcaggctgcagcagagagatgcagagttctttcacacgtcgtgacttaaatgaatctcccgtcaagtcttttgtttccatttcagaagccacagattgcttagtggactttaaaaagcaagttactgtccagccaggtagtcggacacggaccaaagctggcagaggaagaaggagaaaattctgaatttctagggtccaaaagttgacaaaaccattagtaggaggggtgggccatgttcattaagccatagtggtccctagttcattgttgagcaagttttagccctgcagttttcaccaccagcacctacccagcattctggtttttatgttttttatgatctatgcagacaactgtgtattctgttttataacagtttgtttgaatttacttacagttaaaaaatttaaatataaaaaaaaaaattcaactgcccgancgtttaccgtcggcttggc

SEQ ID NO: 427182 - DNA, 1707 bp, Homo sapiens
  misc_feature (1688)..(1688): n is a, c, g, or t
gaaggacagatggacagacggatggaatttattaggggaattggctcattcaattatggaggttgaaaagtccccacaatagtctatttgcaagctggataccctgggatgccagtagtatggctcagtggaagtctgaaggcctgaggacaaggggaaccaaaggaggaaaatgggttgcagaaaacgaagacaaaacagtcgaatagagcaaagtgtttggccaaaagaaaaatcgcacagatgacagaagaagaacagtttgctctggctctcaaaatgagtgagcaggaagctagggaggtgaacagccaggaggaggaagaagaggagctcttgaggaaagccattgctgaaagcctgaatagttgccggccttctgatgcttccgctaccagatctcgacctctggccactggaccgtcttcccagtcccatcaagagaaaaccacagactctgggctcactgaagtcttcccaagggattgttgaagaaacttctgaagagggaaactctgtacctgcttcacaaagtgttgctgctttgaccagtaagagaagcttagtccttatgccagagagttctgcagaagaaatcactgtttgtcctgagacacagctaagttcctctgaaacttttgaccttgaaagagaagtctctccaggtagcagagatatcttggatggagtcagaataataatggcagataaggaggttggtaacaaggaagatgctgagaaggaagtagctatttctaccttctcatccagtaaccaggtatcctgcccgctatgtgaccaatgctttccacccacaaagattgaacgacatgccatgtactgcaatggtctgatggaggaagatacagtattgactcggagacaaaaagaggccaagaccaagagtgacagtgggacagctgcccagacttctctagacattgacaagaatgagaagtgttacctctgtaaatccctggtcccatttagagagtatcagtgtcatgtggactcctgtctccagcttgcaaaggctgaccaaggagatggacctgaagggagtggaagagcatgttcaactgtggaggggaagtggcagcagaggctgaagaacccaaaggaaaaaggccacagtgaaggccgactccttagtttcttggaacagtctgagcacaagacttcagatgcagacatcaagtcttcagaaacaggagccttcagggtgccttcaccagggatggaagaggcaggctgcagcagagagatgcagagttctttcacacgtcgtgacttaaatgaatctcccgtcaagtcttttgtttccatttcagaagccacagattgcttagtggactttaaaaagcaagttactgtccagccaggtagtcggacacggaccaaagctggcagaggaagaaggagaaaattctgaatttctagggtccaaaagttgacaaaaccattagtaggaggggtgggccatgttcattaagccatagtggtccctagttcattgttgagcaagttttagccctgcagttttcaccaccagcacctacccagcattctggtttttatgttttttatgatctatgcagacaactgtgtattctgttttataacagtttgtttgaatttacttacagttaaaaaatttaaatataaaaaaaaaaattcaactgcccgancgtttaccgtcggcttggc

SEQ ID NO: 427183 - DNA, 2633 bp, Homo sapiens
  misc_feature (2614)..(2614): n is a, c, g, or t
gtgacgcgtgggtcgacccacgcgtactcgcgacccccggcaacccggagaaggtctacagagcggcctgcgccagcgagtgagtacccgccgcctgcgcacagctccgcccacccctccctgcctccttttcttcctcagcgggtccgcggcccgctactctccgggaggggcgcttcccgacgccaagacaaaaggatgccacggagaaagaaaaaagttaaagaagtctccgaatctcggaacctggagaagaaggatgtggaaactaccagttctgtcagtgtgaagaggaagcgtagacttgaggatgcattcattgtgatatccgatagtgatggagaggaaccaaaggaggaaaatgggttgcagaaaacgaagacaaaacagtcgaatagagcaaagtgtttggccaaaagaaaaatcgcacagatgacagaagaagaacagtttgctctggctctcaaaatgagtgagcaggaagctagggaggtgaacagccaggaggaggaagaagaggagctcttgaggaaagccattgctgaaagcctgaatagttgccggccttctgatgcttccgctaccagatctcgacctctggccactggaccgtcttcccagtcccatcaagagaaaaccacagactctgggctcactgaaggcatatggcagctggtacctccatcactgtttaaaggctcacatatcagtcagggaaacgaggctgaggaaagagaggagccttgggaccacactgaaaaaactgaagaggagccggtctctggcagctcaggaagctgggaccagtcaagccagccagtgtttgagaatgtgaacgttaaatcttttgacagatgtactggccactcggctgagcacacacagtgtgggaagccacaggaaagtactgggaggggttctgcttttctcaaagctgtccagggtagcggggacacatctaggcactgtctacctaccctagcagatgccaaaggtctccaggacactgggggcactgtgaactatttctggggtattccattctgccctgatggagtagaccctaaccagtataccaaggtcattctctgccagttggaggtttatcaaaagagcctgaaaatggctcagaggcagctccttaataaaaaaggttttggggaaccagtgttacctagacctccttctctgatccagaatgaatgtggccaaggagagcaggctagtgagaaaaatgaatgcatctcagaagatatgggagatgaagacaaagaggagaggcaggagtctagggcatctgactggcactcaaaaaccaaggatttccaggaaagctcaattaaaagcttgaaagagaaacttttgttggaggaagaaccaacaaccagtcatggtcagtcttcccaagggattgttgaagaaacttctgaagagggaaactctgtacctgcttcacaaagtgttgctgctttgaccagtaagagaagcttagtccttatgccagagagttctgcagaagaaatcactgtttgtcctgagacacagctaagttcctctgaaacttttgaccttgaaagagaagtctctccaggtagcagagatatcttggatggagtcagaataataatggcagataaggaggttggtaacaaggaagatgctgagaaggaagtagctatttctaccttctcatccagtaaccaggtatcctgcccgctatgtgaccaatgctttccacccacaaagattgaacgacatgccatgtactgcaatggtctgatggaggaagatacagtattgactcggagacaaaaagaggccaagaccaagagtgacagtgggacagctgcccagacttctctagacattgacaagaatgagaagtgttacctctgtaaatccctggtcccatttagagagtatcagtgtcatgtggactcctgtctccagcttgcaaaggctgaccaaggagatggacctgaagggagtggaagagcatgttcaactgtggaggggaagtggcagcagaggctgaagaacccaaaggaaaaaggccacagtgaaggccgactccttagtttcttggaacagtctgagcacaagacttcagatgcagacatcaagtcttcagaaacaggagccttcagggtgccttcaccagggatggaagaggcaggctgcagcagagagatgcagagttctttcacacgtcgtgacttaaatgaatctcccgtcaagtcttttgtttccatttcagaagccacagattgcttagtggactttaaaaagcaagttactgtccagccaggtagtcggacacggaccaaagctggcagaggaagaaggagaaaattctgaatttctagggtccaaaagttgacaaaaccattagtaggaggggtgggccatgttcattaagccatagtggtccctagttcattgttgagcaagttttagccctgcagttttcaccaccagcacctacccagcattctggtttttatgttttttatgatctatgcagacaactgtgtattctgttttataacagtttgtttgaatttacttacagttaaaaaatttaaatataaaaaaaaaaattcaactgcccgancgtttaccgtcggcttggc

SEQ ID NO: 427184 - DNA, 2485 bp, Homo sapiens
  misc_feature (2466)..(2466): n is a, c, g, or t
ggcttctccagatgccggggctgggtccttcccaaggttgagacaaaaggatgccacggagaaagaaaaaagttaaagaagtctccgaatctcggaacctggagaagaaggatgtggaaactaccagttctgtcagtgtgaagaggaagcgtagacttgaggatgcattcattgtgatatccgatagtgatggagaggaaccaaaggaggaaaatgggttgcagaaaacgaagacaaaacagtcgaatagagcaaagtgtttggccaaaagaaaaatcgcacagatgacagaagaagaacagtttgctctggctctcaaaatgagtgagcaggaagctagggaggtgaacagccaggaggaggaagaagaggagctcttgaggaaagccattgctgaaagcctgaatagttgccggccttctgatgcttccgctaccagatctcgacctctggccactggaccgtcttcccagtcccatcaagagaaaaccacagactctgggctcactgaaggcatatggcagctggtacctccatcactgtttaaaggctcacatatcagtcagggaaacgaggctgaggaaagagaggagccttgggaccacactgaaaaaactgaagaggagccggtctctggcagctcaggaagctgggaccagtcaagccagccagtgtttgagaatgtgaacgttaaatcttttgacagatgtactggccactcggctgagcacacacagtgtgggaagccacaggaaagtactgggaggggttctgcttttctcaaagctgtccagggtagcggggacacatctaggcactgtctacctaccctagcagatgccaaaggtctccaggacactgggggcactgtgaactatttctggggtattccattctgccctgatggagtagaccctaaccagtataccaaggtcattctctgccagttggaggtttatcaaaagagcctgaaaatggctcagaggcagctccttaataaaaaaggttttggggaaccagtgttacctagacctccttctctgatccagaatgaatgtggccaaggagagcaggctagtgagaaaaatgaatgcatctcagaagatatgggagatgaagacaaagaggagaggcaggagtctagggcatctgactggcactcaaaaaccaaggatttccaggaaagctcaattaaaagcttgaaagagaaacttttgttggaggaagaaccaacaaccagtcatggtcagtcttcccaagggattgttgaagaaacttctgaagagggaaactctgtacctgcttcacaaagtgttgctgctttgaccagtaagagaagcttagtccttatgccagagagttctgcagaagaaatcactgtttgtcctgagacacagctaagttcctctgaaacttttgaccttgaaagagaagtctctccaggtagcagagatatcttggatggagtcagaataataatggcagataaggaggttggtaacaaggaagatgctgagaaggaagtagctatttctaccttctcatccagtaaccaggtatcctgcccgctatgtgaccaatgctttccacccacaaagattgaacgacatgccatgtactgcaatggtctgatggaggaagatacagtattgactcggagacaaaaagaggccaagaccaagagtgacagtgggacagctgcccagacttctctagacattgacaagaatgagaagtgttacctctgtaaatccctggtcccatttagagagtatcagtgtcatgtggactcctgtctccagcttgcaaaggctgaccaaggagatggacctgaagggagtggaagagcatgttcaactgtggaggggaagtggcagcagaggctgaagaacccaaaggaaaaaggccacagtgaaggccgactccttagtttcttggaacagtctgagcacaagacttcagatgcagacatcaagtcttcagaaacaggagccttcagggtgccttcaccagggatggaagaggcaggctgcagcagagagatgcagagttctttcacacgtcgtgacttaaatgaatctcccgtcaagtcttttgtttccatttcagaagccacagattgcttagtggactttaaaaagcaagttactgtccagccaggtagtcggacacggaccaaagctggcagaggaagaaggagaaaattctgaatttctagggtccaaaagttgacaaaaccattagtaggaggggtgggccatgttcattaagccatagtggtccctagttcattgttgagcaagttttagccctgcagttttcaccaccagcacctacccagcattctggtttttatgttttttatgatctatgcagacaactgtgtattctgttttataacagtttgtttgaatttacttacagttaaaaaatttaaatataaaaaaaaaaattcaactgcccgancgtttaccgtcggcttggc

SEQ ID NO: 427185 - DNA, 2797 bp, Homo sapiens
  misc_feature (2778)..(2778): n is a, c, g, or t
gtattttcagtagagactgggtttcaccatgttggccaggctggtctggaactcctgacctcaggtgatctgcctgcctcagcctcccaaagtgctgggattacaagcattagccacctcgcccagcctgaaatgattttaaatgtgaaggatacttgccagtggcaggtcctgaaccatctttttatgccatttgcctccctgttttaaaaaagggtttagtatagtgatctagtacaacactttgcacatagacattcagcatatgctgtgaaattaaattgagccatttacattttagaaagagaaagtcttatgaacggtggcctcccattttgtccttcctgtgacccttcatatatagttattttaataataaacctggtctggtatgggatcacttgtttcagagttgccggccttctgatgcttccgctaccagatctcgacctctggccactggaccgtcttcccagtcccatcaagagaaaaccacagactctgggctcactgaaggcatgtctccctgttctgactccttccattcatcaagtataactgtaccacagggatctcatgctgagagtagatacacggaaataccccagatccttttggtgataataaagaagttaaatcaggaagtagttgagatcataagaatatccggcatacttttatctccaaggaaaaaccaacatttggttaaacccaaagaagagcctttcttacccatattatgtaattcttggtaagtgataacttaccaagccctcttaataaaaaagtttgtccttagccctactttttctcaaatacctacaggcatatggcagctggtacctccatcactgtttaaaggctcacatatcagtcagggaaacgaggctgaggaaagagaggagccttgggaccacactgaaaaaactgaagaggagccggtctctggcagctcaggaagctgggaccagtcaagccagccagtgtttgagaatgtgaacgttaaatcttttgacagatgtactggccactcggctgagcacacacagtgtgggaagccacaggaaagtactgggaggggttctgcttttctcaaagctgtccagggtagcggggacacatctaggcactgtctacctaccctagcagatgccaaaggtctccaggacactgggggcactgtgaactatttctggggtattccattctgccctgatggagtagaccctaaccagtataccaaggtcattctctgccagttggaggtttatcaaaagagcctgaaaatggctcagaggcagctccttaataaaaaaggttttggggaaccagtgttacctagacctccttctctgatccagaatgaatgtggccaaggagagcaggctagtgagaaaaatgaatgcatctcagaagatatgggagatgaagacaaagaggagaggcaggagtctagggcatctgactggcactcaaaaaccaaggatttccaggaaagctcaattaaaagcttgaaagagaaacttttgttggaggaagaaccaacaaccagtcatggtcagtcttcccaagggattgttgaagaaacttctgaagagggaaactctgtacctgcttcacaaagtgttgctgctttgaccagtaagagaagcttagtccttatgccagagagttctgcagaagaaatcactgtttgtcctgagacacagctaagttcctctgaaacttttgaccttgaaagagaagtctctccaggtagcagagatatcttggatggagtcagaataataatggcagataaggaggttggtaacaaggaagatgctgagaaggaagtagctatttctaccttctcatccagtaaccaggtatcctgcccgctatgtgaccaatgctttccacccacaaagattgaacgacatgccatgtactgcaatggtctgatggaggaagatacagtattgactcggagacaaaaagaggccaagaccaagagtgacagtgggacagctgcccagacttctctagacattgacaagaatgagaagtgttacctctgtaaatccctggtcccatttagagagtatcagtgtcatgtggactcctgtctccagcttgcaaaggctgaccaaggagatggacctgaagggagtggaagagcatgttcaactgtggaggggaagtggcagcagaggctgaagaacccaaaggaaaaaggccacagtgaaggccgactccttagtttcttggaacagtctgagcacaagacttcagatgcagacatcaagtcttcagaaacaggagccttcagggtgccttcaccagggatggaagaggcaggctgcagcagagagatgcagagttctttcacacgtcgtgacttaaatgaatctcccgtcaagtcttttgtttccatttcagaagccacagattgcttagtggactttaaaaagcaagttactgtccagccaggtagtcggacacggaccaaagctggcagaggaagaaggagaaaattctgaatttctagggtccaaaagttgacaaaaccattagtaggaggggtgggccatgttcattaagccatagtggtccctagttcattgttgagcaagttttagccctgcagttttcaccaccagcacctacccagcattctggtttttatgttttttatgatctatgcagacaactgtgtattctgttttataacagtttgtttgaatttacttacagttaaaaaatttaaatataaaaaaaaaaattcaactgcccgancgtttaccgtcggcttggc

SEQ ID NO: 427186 - DNA, 1537 bp, Homo sapiens
  misc_feature (1518)..(1518): n is a, c, g, or t
ttaattggcagcaacactctggtgaggcaattgttaatacccattttaagatgaggaaagagattcagatgtcatttacccaatcacaaatttagtaagtgatttagttctgatttaaataccagtcttctgactttacaggatgtgcttgttttattgacacttactggcttatggaaaatattttcttcttattgttaattgttgagggagaacattgaacaattaaatttttttaaaaaaggaagagaagccagttcacctgtgcctgtatatttaagatactacgtatttctttgcagtcttcccaagggattgttgaagaaacttctgaagagggaaactctgtacctgcttcacaaagtgttgctgctttgaccagtaagagaagcttagtccttatgccagagagttctgcagaagaaatcactgtttgtcctgagacacagctaagttcctctgaaacttttgaccttgaaagagaagtctctccaggtagcagagatatcttggatggagtcagaataataatggcagataaggaggttggtaacaaggaagatgctgagaaggaagtagctatttctaccttctcatccagtaaccaggtatcctgcccgctatgtgaccaatgctttccacccacaaagattgaacgacatgccatgtactgcaatggtctgatggaggaagatacagtattgactcggagacaaaaagaggccaagaccaagagtgacagtgggacagctgcccagacttctctagacattgacaagaatgagaagtgttacctctgtaaatccctggtcccatttagagagtatcagtgtcatgtggactcctgtctccagcttgcaaaggctgaccaaggagatggacctgaagggagtggaagagcatgttcaactgtggaggggaagtggcagcagaggctgaagaacccaaaggaaaaaggccacagtgaaggccgactccttagtttcttggaacagtctgagcacaagacttcagatgcagacatcaagtcttcagaaacaggagccttcagggtgccttcaccagggatggaagaggcaggctgcagcagagagatgcagagttctttcacacgtcgtgacttaaatgaatctcccgtcaagtcttttgtttccatttcagaagccacagattgcttagtggactttaaaaagcaagttactgtccagccaggtagtcggacacggaccaaagctggcagaggaagaaggagaaaattctgaatttctagggtccaaaagttgacaaaaccattagtaggaggggtgggccatgttcattaagccatagtggtccctagttcattgttgagcaagttttagccctgcagttttcaccaccagcacctacccagcattctggtttttatgttttttatgatctatgcagacaactgtgtattctgttttataacagtttgtttgaatttacttacagttaaaaaatttaaatataaaaaaaaaaattcaactgcccgancgtttaccgtcggcttggc

SEQ ID NO: 427187 - DNA, 1728 bp, Homo sapiens
  misc_feature (1709)..(1709): n is a, c, g, or t
aaactagctaggtacgaggctggtgttaaatcggcagaggcctccccctccccccgcgctcccaacgtgtggcggctcgcgacccccggcaacccggagaaggtctacagagcggcctgcgccagcgaacaaaaggatgccacggagaaagaaaaaagttaaagaagtctccgaatctcggaacctggagaagaaggatgtggaaactaccagttctgtcagtgtgaagaggaagcgtagacttgaggatgcattcattgtgatatccgatagtgatggagaggaaccaaaggaggaaaatgggttgcagaaaacgaagacaaaacagtcgaatagagcaaagtgtttggccaaaagaaaaatcgcacagatgacagaagaagaacagtttgctctggctctcaaaatgagtgagcaggaagctagggaggtgaacagccaggaggaggaagaagaggagctcttgaggaaagccattgctgaaagcctgaattcttcccaagggattgttgaagaaacttctgaagagggaaactctgtacctgcttcacaaagtgttgctgctttgaccagtaagagaagcttagtccttatgccagagagttctgcagaagaaatcactgtttgtcctgagacacagctaagttcctctgaaacttttgaccttgaaagagaagtctctccaggtagcagagatatcttggatggagtcagaataataatggcagataaggaggttggtaacaaggaagatgctgagaaggaagtagctatttctaccttctcatccagtaaccaggtatcctgcccgctatgtgaccaatgctttccacccacaaagattgaacgacatgccatgtactgcaatggtctgatggaggaagatacagtattgactcggagacaaaaagaggccaagaccaagagtgacagtgggacagctgcccagacttctctagacattgacaagaatgagaagtgttacctctgtaaatccctggtcccatttagagagtatcagtgtcatgtggactcctgtctccagcttgcaaaggctgaccaaggagatggacctgaagggagtggaagagcatgttcaactgtggaggggaagtggcagcagaggctgaagaacccaaaggaaaaaggccacagtgaaggccgactccttagtttcttggaacagtctgagcacaagacttcagatgcagacatcaagtcttcagaaacaggagccttcagggtgccttcaccagggatggaagaggcaggctgcagcagagagatgcagagttctttcacacgtcgtgacttaaatgaatctcccgtcaagtcttttgtttccatttcagaagccacagattgcttagtggactttaaaaagcaagttactgtccagccaggtagtcggacacggaccaaagctggcagaggaagaaggagaaaattctgaatttctagggtccaaaagttgacaaaaccattagtaggaggggtgggccatgttcattaagccatagtggtccctagttcattgttgagcaagttttagccctgcagttttcaccaccagcacctacccagcattctggtttttatgttttttatgatctatgcagacaactgtgtattctgttttataacagtttgtttgaatttacttacagttaaaaaatttaaatataaaaaaaaaaattcaactgcccgancgtttaccgtcggcttggc

SEQ ID NO: 427188 - DNA, 1839 bp, Homo sapiens
  misc_feature (1820)..(1820): n is a, c, g, or t
aaactagctaggtacgaggctggtgttaaatcggcagaggcctccccctccccccgcgctcccaacgtgtggcggctcgcgacccccggcaacccggagaaggtctacagagcggcctgcgccagcgagtgagtacccgccgcctgcgcacagctccgcccacccctccctgcctccttttcttcctcagcgggtccgcggcccgctactctccgggaggggcgcttcccgacgccaagacaaaaggatgccacggagaaagaaaaaagttaaagaagtctccgaatctcggaacctggagaagaaggatgtggaaactaccagttctgtcagtgtgaagaggaagcgtagacttgaggatgcattcattgtgatatccgatagtgatggagaggaaccaaaggaggaaaatgggttgcagaaaacgaagacaaaacagtcgaatagagcaaagtgtttggccaaaagaaaaatcgcacagatgacagaagaagaacagtttgctctggctctcaaaatgagtgagcaggaagctagggaggtgaacagccaggaggaggaagaagaggagctcttgaggaaagccattgctgaaagcctgaattcttcccaagggattgttgaagaaacttctgaagagggaaactctgtacctgcttcacaaagtgttgctgctttgaccagtaagagaagcttagtccttatgccagagagttctgcagaagaaatcactgtttgtcctgagacacagctaagttcctctgaaacttttgaccttgaaagagaagtctctccaggtagcagagatatcttggatggagtcagaataataatggcagataaggaggttggtaacaaggaagatgctgagaaggaagtagctatttctaccttctcatccagtaaccaggtatcctgcccgctatgtgaccaatgctttccacccacaaagattgaacgacatgccatgtactgcaatggtctgatggaggaagatacagtattgactcggagacaaaaagaggccaagaccaagagtgacagtgggacagctgcccagacttctctagacattgacaagaatgagaagtgttacctctgtaaatccctggtcccatttagagagtatcagtgtcatgtggactcctgtctccagcttgcaaaggctgaccaaggagatggacctgaagggagtggaagagcatgttcaactgtggaggggaagtggcagcagaggctgaagaacccaaaggaaaaaggccacagtgaaggccgactccttagtttcttggaacagtctgagcacaagacttcagatgcagacatcaagtcttcagaaacaggagccttcagggtgccttcaccagggatggaagaggcaggctgcagcagagagatgcagagttctttcacacgtcgtgacttaaatgaatctcccgtcaagtcttttgtttccatttcagaagccacagattgcttagtggactttaaaaagcaagttactgtccagccaggtagtcggacacggaccaaagctggcagaggaagaaggagaaaattctgaatttctagggtccaaaagttgacaaaaccattagtaggaggggtgggccatgttcattaagccatagtggtccctagttcattgttgagcaagttttagccctgcagttttcaccaccagcacctacccagcattctggtttttatgttttttatgatctatgcagacaactgtgtattctgttttataacagtttgtttgaatttacttacagttaaaaaatttaaatataaaaaaaaaaattcaactgcccgancgtttaccgtcggcttggc

SEQ ID NO: 427189 - DNA, 653 bp, Homo sapiens
  misc_feature (634)..(634): n is a, c, g, or t
tggggatctgtgctacctggataggcctgatgagaagcagtgcctagagcacagaagcaaaagatcagtgagaagtgctatgattaccaacactactaccaacattattattttttcttttatatcacagatgcagacatcaagtcttcagaaacaggagccttcagggtgccttcaccagggatggaagaggcaggctgcagcagagagatgcagagttctttcacacgtcgtgacttaaatgaatctcccgtcaagtcttttgtttccatttcagaagccacagattgcttagtggactttaaaaagcaagttactgtccagccaggtagtcggacacggaccaaagctggcagaggaagaaggagaaaattctgaatttctagggtccaaaagttgacaaaaccattagtaggaggggtgggccatgttcattaagccatagtggtccctagttcattgttgagcaagttttagccctgcagttttcaccaccagcacctacccagcattctggtttttatgttttttatgatctatgcagacaactgtgtattctgttttataacagtttgtttgaatttacttacagttaaaaaatttaaatataaaaaaaaaaattcaactgcccgancgtttaccgtcggcttggc

SEQ ID NO: 427190 - DNA, 614 bp, Homo sapiens
  misc_feature (595)..(595): n is a, c, g, or t
atggagtaactgtttcagtgtaaagatatgttagttccacatatgaaggcgaatccttagtacttggaacagtctgagcacaagacttcagatgcagacatcaagtcttcagaaacaggagccttcagggtgccttcaccagggatggaagaggcaggctgcagcagagagatgcagagttctttcacacgtcgtgacttaaatgaatctcccgtcaagtcttttgtttccatttcagaagccacagattgcttagtggactttaaaaagcaagttactgtccagccaggtagtcggacacggaccaaagctggcagaggaagaaggagaaaattctgaatttctagggtccaaaagttgacaaaaccattagtaggaggggtgggccatgttcattaagccatagtggtccctagttcattgttgagcaagttttagccctgcagttttcaccaccagcacctacccagcattctggtttttatgttttttatgatctatgcagacaactgtgtattctgttttataacagtttgtttgaatttacttacagttaaaaaatttaaatataaaaaaaaaaattcaactgcccgancgtttaccgtcggcttggc

SEQ ID NO: 427191 - DNA, 1874 bp, Homo sapiens
aaactagctaggtacgaggctggtgttaaatcggcagaggcctccccctccccccgcgctcccaacgtgtggcggctcgcgacccccggcaacccggagaaggtctacagagcggcctgcgccagcgaacaaaaggatgccacggagaaagaaaaaagttaaagaagtctccgaatctcggaacctggagaagaaggatgtggaaactaccagttctgtcagtgtgaagaggaagcgtagacttgaggatgcattcattgtgatatccgatagtgatggagaggaaccaaaggaggaaaatgggttgcagaaaacgaagacaaaacagtcgaatagagcaaagtgtttggccaaaagaaaaatcgcacagatgacagaagaagaacagtttgctctggctctcaaaatgagtgagcaggaagctagggaggtgaacagccaggaggaggaagaagaggagctcttgaggaaagccattgctgaaagcctgaatagttgccggccttctgatgcttccgctaccagatctcgacctctggccactggaccgtcttcccagtcccatcaagagaaaaccacagactctgggctcactgaaggcatatggcagctggtacctccatcactgtttaaaggctcacatatcagtcagggaaacgaggctgaggaaagagaggagccttgggaccacactgaaaaaactgaagaggagccggtctctggcagctcaggaagctgggaccagtcaagccagccagtgtttgagaatgtgaacgttaaatcttttgacagatgtactggccactcggctgagcacacacagtgtgggaagccacaggaaagtactgggaggggttctgcttttctcaaagctgtccagggtagcggggacacatctaggcactgtctacctaccctagcagatgccaaaggtctccaggacactgggggcactgtgaactatttctggggtattccattctgccctgatggagtagaccctaaccagtataccaaggtcattctctgccagttggaggtttatcaaaagagcctgaaaatggctcagaggcagctccttaataaaaaaggttttggggaaccagtgttacctagacctccttctctgatccagaatgaatgtggccaaggagagcaggctagtgagaaaaatgaatgcatctcagaagatatgggagatgaagacaaagaggagaggcaggagtctagggcatctgactggcactcaaaaaccaaggatttccaggaaagctcaattaaaagcttgaaagagaaacttttgttggaggaagaaccaacaaccagtcatggtcagtcttcccaagggattgttgaagaaacttctgaagagggaaactctgtacctgcttcacaaagtgttgctgctttgaccagtaagagaagcttagtccttatgccagagagttctgcagaagaaatcactgtttgtcctgagacacagctaagttcctctgaaacttttgaccttgaaagagaagtctctccaggtagcagagatatcttggatggagtcagaataataatggcagataaggaggttggtaacaaggaagatgctgagaaggaagtagctatttctaccttctcatccagtaaccaggtatcctgcccgctatgtgaccaatgctttccacccacaaagattgaacgacatgccatgtactgcaatggtctgatggaggaagatacaggtaaagacccagcaggacagccaaactcttacttttttgtgtggtggttttataatcctatacattacatgcagggaaaaaaacatagctgttcttcaaagttaaagttgttgttggtcttgggtactactgctttggcga

SEQ ID NO: 427192 - DNA, 1568 bp, Homo sapiens
  misc_feature (1483)..(1484): n is a, c, g, or t
  misc_feature (1498)..(1498): n is a, c, g, or t
  misc_feature (1501)..(1501): n is a, c, g, or t
aaactagctaggtacgaggctggtgttaaatcggcagaggcctccccctccccccgcgctcccaacgtgtggcggctcgcgacccccggcaacccggagaaggtctacagagcggcctgcgccagcgaacaaaaggatgccacggagaaagaaaaaagttaaagaagtctccgaatctcggaacctggagaagaaggatgtggaaactaccagttctgtcagtgtgaagaggaagcgtagacttgaggatgcattcattgtgatatccgatagtgatggagaggaaccaaaggaggaaaatgggttgcagaaaacgaagacaaaacagtcgaatagagcaaagtgtttggccaaaagaaaaatcgcacagatgacagaagaagaacagtttgctctggctctcaaaatgagtgagcaggaagctagggaggtgaacagccaggaggaggaagaagaggagctcttgaggaaagccattgctgaaagcctgaatagttgccggccttctgatgcttccgctaccagatctcgacctctggccactggaccgtcttcccagtcccatcaagagaaaaccacagactctgggctcactgaaggcatatggcagctggtacctccatcactgtttaaaggctcacatatcagtcagggaaacgaggctgaggaaagagaggagccttgggaccacactgaaaaaactgaagaggagccggtctctggcagctcaggaagctgggaccagtcaagccagccagtgtttgagaatgtgaacgttaaatcttttgacagatgtactggccactcggctgagcacacacagtgtgggaagccacaggaaagtactgggaggggttctgcttttctcaaagctgtccagggtagcggggacacatctaggcactgtctacctaccctagcagatgccaaaggtctccaggacactgggggcactgtgaactatttctggggtattccattctgccctgatggagtagaccctaaccagtataccaaggtcattctctgccagttggaggtttatcaaaagagcctgaaaatggctcagaggcagctccttaataaaaaaggttttggggaaccagtgttacctagacctccttctctgatccagaatgaatgtggccaaggagagcaggctagtgagaaaaatgaatgcatctcagaagatatgggagatgaagacaaagaggagaggcaggagtctagggcatctgactggcactcaaaaaccaaggatttccaggaaagctcaattaaaagcttgaaagagaaacttttgttggaggaagaaccaacaaccagtcatggtcagtcttcccaagggattgttgaagaaacttctgaagagggaaactctgtacctgcttcacaaagtgttgctgctttgaccagtaagagaagcttagtccttatgccagagagttctgcagaagaaatcactgtttgtcctgagaccagnnagtccttgaattgnctngaagagagttctcaggtacgagatctgggtgggtcgagacacgggatcagggggacggaatgcaagg

SEQ ID NO: 427193 - DNA, 509 bp, Homo sapiens
  misc_feature (490)..(490): n is a, c, g, or t
tgaatttttttccttctctctagggtgccttcaccagggatggaagaggcaggctgcagcagagagatgcagagttctttcacacgtcgtgacttaaatgaatctcccgtcaagtcttttgtttccatttcagaagccacagattgcttagtggactttaaaaagcaagttactgtccagccaggtagtcggacacggaccaaagctggcagaggaagaaggagaaaattctgaatttctagggtccaaaagttgacaaaaccattagtaggaggggtgggccatgttcattaagccatagtggtccctagttcattgttgagcaagttttagccctgcagttttcaccaccagcacctacccagcattctggtttttatgttttttatgatctatgcagacaactgtgtattctgttttataacagtttgtttgaatttacttacagttaaaaaatttaaatataaaaaaaaaaattcaactgcccgancgtttaccgtcggcttggc

SEQ ID NO: 427194 - DNA, 616 bp, Homo sapiens
  misc_feature (597)..(597): n is a, c, g, or t
agtaaggaggctgagcgacccaatgacatggcactgtagatgcgactctcttattatctatggactagtactgaatagctatcatacagatagcagacgtcgctgtcttcagataacaggagtctttcgtggtgccttcaccagggatggaagaggcaggctgcagcagagagatgcagagttctttcacacgtcgtgacttaaatgaatctcccgtcaagtcttttgtttccatttcagaagccacagattgcttagtggactttaaaaagcaagttactgtccagccaggtagtcggacacggaccaaagctggcagaggaagaaggagaaaattctgaatttctagggtccaaaagttgacaaaaccattagtaggaggggtgggccatgttcattaagccatagtggtccctagttcattgttgagcaagttttagccctgcagttttcaccaccagcacctacccagcattctggtttttatgttttttatgatctatgcagacaactgtgtattctgttttataacagtttgtttgaatttacttacagttaaaaaatttaaatataaaaaaaaaaattcaactgcccgancgtttaccgtcggcttggc

SEQ ID NO: 427195 - DNA, 920 bp, Homo sapiens
  misc_feature (901)..(901): n is a, c, g, or t
caaaggctgaccaaggagatggacctgaagggagtggaagagcatgccatgtactgcaatggtctgatggaggaagatacagtattgactcggagacaaaaagaggccaagaccaagagtgacagtgggacagctgcccagacttctctagacattgacaagaatgagaagtgttacctctgtaaatccctggtcccatttagagagtatcagtgtcatgtggactcctgtctccagcttgcaaaggctgaccaaggagatggacctgaagggagtggaagagcatgttcaactgtggaggggaagtggcagcagaggctgaagaacccaaaggaaaaaggccacagtgaaggccgactccttagtttcttggaacagtctgagcacaagacttcagatgcagacatcaagtcttcagaaacaggagccttcagggtgccttcaccagggatggaagaggcaggctgcagcagagagatgcagagttctttcacacgtcgtgacttaaatgaatctcccgtcaagtcttttgtttccatttcagaagccacagattgcttagtggactttaaaaagcaagttactgtccagccaggtagtcggacacggaccaaagctggcagaggaagaaggagaaaattctgaatttctagggtccaaaagttgacaaaaccattagtaggaggggtgggccatgttcattaagccatagtggtccctagttcattgttgagcaagttttagccctgcagttttcaccaccagcacctacccagcattctggtttttatgttttttatgatctatgcagacaactgtgtattctgttttataacagtttgtttgaatttacttacagttaaaaaatttaaatataaaaaaaaaaattcaactgcccgancgtttaccgtcggcttggc

SEQ ID NO: 427196 - DNA, 1770 bp, Homo sapiens
aaactagctaggtacgaggctggtgttaaatcggcagaggcctccccctccccccgcgctcccaacgtgtggcggctcgcgacccccggcaacccggagaaggtctacagagcggcctgcgccagcgaacaaaaggatgccacggagaaagaaaaaagttaaagaagtctccgaatctcggaacctggagaagaaggatgtggaaactaccagttctgtcagtgtgaagaggaagcgtagacttgaggatgcattcattgtgatatccgatagtgatggagaggaaccaaaggaggaaaatgggttgcagaaaacgaagacaaaacagtcgaatagagcaaagtgtttggccaaaagaaaaatcgcacagatgacagaagaagaacagtttgctctggctctcaaaatgagtgagcaggaagctagggaggtgaacagccaggaggaggaagaagaggagctcttgaggaaagccattgctgaaagcctgaatagttgccggccttctgatgcttccgctaccagatctcgacctctggccactggaccgtcttcccagtcccatcaagagaaaaccacagactctgggctcactgaaggcatatggcagctggtacctccatcactgtttaaaggctcacatatcagtcagggaaacgaggctgaggaaagagaggagccttgggaccacactgaaaaaactgaagaggagccggtctctggcagctcaggaagctgggaccagtcaagccagccagtgtttgagaatgtgaacgttaaatcttttgacagatgtactggccactcggctgagcacacacagtgtgggaagccacaggaaagtactgggaggggttctgcttttctcaaagctgtccagggtagcggggacacatctaggcactgtctacctaccctagcagatgccaaaggtctccaggacactgggggcactgtgaactatttctggggtattccattctgccctgatggagtagaccctaaccagtataccaaggtcattctctgccagttggaggtttatcaaaagagcctgaaaatggctcagaggcagctccttaataaaaaaggttttggggaaccagtgttacctagacctccttctctgatccagaatgaatgtggccaaggagagcaggctagtgagaaaaatgaatgcatctcagaagatatgggagatgaagacaaagaggagaggcaggagtctagggcatctgactggcactcaaaaaccaaggatttccaggaaagctcaattaaaagcttgaaagagaaacttttgttggaggaagaaccaacaaccagtcatggtcagtcttcccaagggattgttgaagaaacttctgaagagggaaactctgtacctgcttcacaaagtgttgctgctttgaccagtaagagaagcttagtccttatgccagagagttctgcagaagaaatcactgtttgtcctgagacacagctaagttcctctgaaacttttgaccttgaaagagaagtctctccaggtagcagagatatcttggatggagtcagaataataatggcagataaggaggtgtggtaacaggaagatggtgggaacgaacgtagttattgtacctgctcatcaagtaaccagttctgggcggatgtgaccaagtttcagcaaagttggagaatgcagctgaagggcggggcggaaaaatggtggggacaaaggcgcagggggggatgtcatttattgaagaggtggtacggaaatgtggc

SEQ ID NO: 427197 - DNA, 1494 bp, Homo sapiens
aaactagctaggtacgaggctggtgttaaatcggcagaggcctccccctccccccgcgctcccaacgtgtggcggctcgcgacccccggcaacccggagaaggtctacagagcggcctgcgccagcgaacaaaaggatgccacggagaaagaaaaaagttaaagaagtctccgaatctcggaacctggagaagaaggatgtggaaactaccagttctgtcagtgtgaagaggaagcgtagacttgaggatgcattcattgtgatatccgatagtgatggagaggaaccaaaggaggaaaatgggttgcagaaaacgaagacaaaacagtcgaatagagcaaagtgtttggccaaaagaaaaatcgcacagatgacagaagaagaacagtttgctctggctctcaaaatgagtgagcaggaagctagggaggtgaacagccaggaggaggaagaagaggagctcttgaggaaagccattgctgaaagcctgaatagttgccggccttctgatgcttccgctaccagatctcgacctctggccactggaccgtcttcccagtcccatcaagagaaaaccacagactctgggctcactgaaggcatatggcagctggtacctccatcactgtttaaaggctcacatatcagtcagggaaacgaggctgaggaaagagaggagccttgggaccacactgaaaaaactgaagaggagccggtctctggcagctcaggaagctgggaccagtcaagccagccagtgtttgagaatgtgaacgttaaatcttttgacagatgtactggccactcggctgagcacacacagtgtgggaagccacaggaaagtactgggaggggttctgcttttctcaaagctgtccagggtagcggggacacatctaggcactgtctacctaccctagcagatgccaaaggtctccaggacactgggggcactgtgaactatttctggggtattccattctgccctgatggagtagaccctaaccagtataccaaggtcattctctgccagttggaggtttatcaaaagagcctgaaaatggctcagaggcagctccttaataaaaaaggttttggggaaccagtgttacctagacctccttctctgatccagaatgaatgtggccaaggagagcaggctagtgagaaaaatgaatgcatctcagaagatatgggagatgaagacaaagaggagaggcaggagtctagggcatctgactggcactcaaaaaccaaggatttccaggaaagctcaattaaaagcttgaaagagaaacttttgttggaggaagaaccaacaaccagtcatggtcaggtaagggtcagtgatgctgtaattaaggatgatttattcacagattaaaacaaggattattttagctgttatttttgtggtcttcccctccttgattattaaagtaatacatgttcactatagaaaattaggaaagtacaggagagtataaaaaaaaa

SEQ ID NO: 427198 - DNA, 472 bp, Homo sapiens
ccccacagaggtgtctactagaccatcttccgctaagaattggtaataaagagaaagaactcagcattttctaagaggtaacaaagaagtggaaacacagacaaaaataaagaaaaaaagaacaacagcatactaaagccaaggtgccactgcccacaggttctggggagaccagcaaacagcatgtggaggtctgatgggagcaagacgcatcttctcccatcaggaaacattatgctaagctttttaactcattgctctaatcgtgtcactaaaattttaaacttaacacaagaatcaggttctcttatccttgtctttcatgcaacataccagtctgcttgggattcccaaacgtaatttaaagaaaggttctactaccttaatcatggaataaagagaggtggcaaaattcttcctaaactccttcctgatgttaaacagatcaatctcactcctggaaaccatgact

SEQ ID NO: 427199 - DNA, 316 bp, Homo sapiens
ctgtgtccgcgaacagggcattaagcaataacagacaagcacaatgactacgtctatggcctggacctcggtgtccagatgcctttctgcactaaaaggaacccaggcgctgtggagaagcagctgacgcaggcctgggaaagacatcaccgtgagcctgggacactgggccagaaaggatgcattcccaggaccacgtatggagtgaaaaggacacaggggccagcttggaaggggctcccaactagtcacatttatagctatttgagcatcacaaaacaaaaggctttactagattatgacatggaataaataa

SEQ ID NO: 427200 - DNA, 794 bp, Homo sapiens
ggctgcatagtattccatggtgtatatgtgccacattttcttaatccagtctatcattgatggacatttgggttggttccaagtctttgctattgtgaatagtgctgcaataaacgtacatgtacatttgtctttatagcagcataatttataatcctttgggtatatacccagtaatgggatggctgagtcaagatggtatttctagttctagatccctgaggaattgccacactgttttctacaatggttgaactagtttatagtcccaccaacagtgtaaaagtgttcctgtttctctacatcctctccagcacctgttgtttcctgactttttaatgatcagatagcctcctattttttaactatgagttggaatttgctgcttttgatatgataagaaagttcaaagtttctcttccttgctttgttgtgtgttctaattcttttctgcccatcccccagtaaagaaaaggctcagtatgatttcttgaatagattgtttaagctattttcaaaacaggacttggtcaggggcaggtagtcttaaatgttcagaagccactggatggaaaattgtgagcacataagtgtttttcttggtcaaccatgtcattttatagccaaagtttgacttgacatactggaattaatccacacgactttgaaaagaataaactctttaaaaagagagtgagcgctccgagggtgttatgagagtcactgtctgaaaccctattgatcatattgtggcagaagaaatagagtcctgccatgaattatacttttcaggt

SEQ ID NO: 427201 - DNA, 615 bp, Homo sapiens
  misc_feature (599)..(599): n is a, c, g, or t
ggctgcatagtattccatggtgtatatgtgccacattttcttaatccagtctatcattgatggacatttgggttggttccaagtctttgctattgtgaatagtgctgcaataaacgtacatgtacatttgtctttatagcagcataatttataatcctttgggtatatacccagtaatgggatggctgagtcaagatggtatttctagttctagatccctgaggaattgccacactgttttctacaatggttgaactagtttatagtcccaccaacagtgtaaaagtgttcctgtttctctacatcctctccagcacctgttgtttcctgactttttaatgatcagatagcctcctattttttaactatgagttggaatttgctgcttttgatatgataagaaagttcaaagtttctcttccttgctttgttgtgtgttctaattcttttctgcccatcccccagtaaagaaaaggctcagtatgatttcttgaatagattgtttaagctattttcaaaacaggacttggtcaggggcaggtagtcttaaatgttcagaagccactggatggaaaattgtgagcaaagatacttcttgnatagctgctgatgttg

SEQ ID NO: 427202 - DNA, 645 bp, Homo sapiens
agtaatgacttacaaattatttactgtcaaaactgtaacatagccatttcttttttttttccaccccaagactccatctcaaaaaaaaaaaaaaaagacttaacagagcatttcacggggaagggccatgagggaacatcacctgggtgatggtaacattctgtatcttgataaggatttgagttatacaagtatatacatctgtcaaaattcaaagaatgtacactcaagatctgtgcatttcattatatgtaaatgttacattaaaatgttgtaaacaaatattgaacaaatatacgcatgctaaagtatttaagaggaagtactggtgtctgcaaaacaaaaattttttttccattttctgtggtaaaatatacataatataaatgtattattttaagtgtacaattcagtggcattaaatacactcagaaagttgtgcaaacatcccatttattcatttccacagattttttaattctcattccaaacagaagccctgtacccaaagagcaataactccgcatcctccaatccccactctctggtaacctctattctactttctgcctctatgaatttgccaattctaggtacctcatataagtggaatacagtatttatccttttgtgtctggcttcttt

SEQ ID NO: 427203 - DNA, 2686 bp, Homo sapiens
ggctgcatagtattccatggtgtatatgtgccacattttcttaatccagtctatcattgatggacatttgggttggttccaagtctttgctattgtgaatagtgctgcaataaacgtacatgtacatttgtctttatagcagcataatttataatcctttgggtatatacccagtaatgggatggctgagtcaagatggtatttctagttctagatccctgaggaattgccacactgttttctacaatggttgaactagtttatagtcccaccaacagtgtaaaagtgttcctgtttctctacatcctctccagcacctgttgtttcctgactttttaatgatcagatagcctcctattttttaactatgagttggaatttgctgcttttgatatgataagaaagttcaaagtttctcttccttgctttgttgtgtgttctaattcttttctgcccatcccccagtaaagaaaaggctcagtatgatttcttgaatagattgtttaagctattttcaaaacaggacttggtcaggggcaggtagtcttaaatgttcagaagccactggatggaaaattgtgagcacataagtgtttttcttggtcaaccatgtcattttatagccaaagtttgacttgacatactggaattaatccacacgactttgaaaagaataaactctttaaaaagagagtgagcgctccgagggtgttatgagagtcactgtctgaaaccctattgatcatattgtggcagaagaaatagagtcctgccatgaattatacttttcaggttaaaaaaaaaaaaagcaatttgtaggacagtttgaataatttagtacaattgttaaaaatacagacatgcacattcctgtatgtgcatttttaaatgttcacgaatgatataagccagatatatttcttagaggtgcttgaaaaaagttatttcttcttgggctttattatctcaatttaaaaaaattaagatgcataattctcataagataacagattcagaagaatatagttcaagaaaaaaaattaaagaactcataaaggagaaggaggaggaggaagagagtgtgaaacaggagcctcagataacttggtaaaggcatgtctcccatttgggaactgatgttcctaagatccgcactgacgctgctcagccggtccatcacacagcaaaggcgtgaggaagggtcactgcccagctggactccagggtggtccacgcatgacagtcacaccgaaccttcatgaggatgtgaactgttggctccaatttaccattcccagcaattccactcagatatttgtatactaatgttcacagcagcgtgaactccacagcaggtggagtaatgttccattgtgtgcatatgccacattttgtttatccattcatctgttgatgcacatttcggttgttcccacctttgggctattattaataatgctgctgtgaacattcccaagagaaataggaagacggctttgctaagaactaaaaaagggatggacaacaagggcatatacccaggggcagtgttctatcatgacagctttactgagagcagagtagttctgctcagaatcagaacacttgttccctatagcccccctgattgccccacaaccaccaccgcatactccccttttcccaaccatgggcagcagattgagctattaacagaagtgtcctttcgctggatttctcaaccctttcctcatcgtccacatagagaaacagtaacagattgctactcacccaacacccaggtcaagtccaatgcaggtaggaataacagcaaatccttcaatttcttgattctgctcttaaaaatcttaacagaggccgggcacggtggctcacgcctgtaatgccagcattttgggaggccgaggcgggtggatcaccaagaccagcctggccaagatggtgaaaccccgtctccactaaaaatacaaaaattagccaggcgtggtggtgggcacctgtaatcccaggtactcgggaggctgaggcagagaattgcttgaacgcgggaggcagagactgcagtgagccgagatcacaccactgcactccagcccaggtgacagagcaagactccatctcaaaaaaaaaaaaaaaagacttaacagagcatttcacggggaagggccatgagggaacatcacctgggtgatggtaacattctgtatcttgataaggatttgagttatacaagtatatacatctgtcaaaattcaaagaatgtacactcaagatctgtgcatttcattatatgtaaatgttacattaaaatgttgtaaacaaatattgaacaaatatacgcatgctaaagtatttaagaggaagtactggtgtctgcaaaacaaaaattttttttccattttctgtggtaaaatatacataatataaatgtattattttaagtgtacaattcagtggcattaaatacactcagaaagttgtgcaaacatcccatttattcatttccacagattttttaattctcattccaaacagaagccctgtacccaaagagcaataactccgcatcctccaatccccactctctggtaacctctattctactttctgcctctatgaatttgccaattctaggtacctcatataagtggaatacagtatttatccttttgtgtctggcttcttt

SEQ ID NO: 427204 - DNA, 2628 bp, Homo sapiens
ggctgcatagtattccatggtgtatatgtgccacattttcttaatccagtctatcattgatggacatttgggttggttccaagtctttgctattgtgaatagtgctgcaataaacgtacatgtacatttgtctttatagcagcataatttataatcctttgggtatatacccagtaatgggatggctgagtcaagatggtatttctagttctagatccctgaggaattgccacactgttttctacaatggttgaactagtttatagtcccaccaacagtgtaaaagtgttcctgtttctctacatcctctccagcacctgttgtttcctgactttttaatgatcagatagcctcctattttttaactatgagttggaatttgctgcttttgatatgataagaaagttcaaagtttctcttccttgctttgttgtgtgttctaattcttttctgcccatcccccagtaaagaaaaggctcagtatgatttcttgaatagattgtttaagctattttcaaaacaggacttggtcaggggcaggtagtcttaaatgttcagaagccactggatggaaaattgtgagcacataagtgtttttcttggtcaaccatgtcattttatagccaaagtttgacttgacatactggaattaatccacacgactttgaaaagaataaactctttaaaaagagagtgagcgctccgagggtgttatgagagtcactgtctgaaaccctattgatcatattgtggcagaagaaatagagtcctgccatgaattatacttttcaggttaaaaaaaaaaaaagcaatttgtaggacagtttgaataatttagtacaattgttaaaaatacagacatgcacattcctgtatgtgcatttttaaatgttcacgaatgatataagccagatatatttcttagaggtgcttgaaaaaagttatttcttcttgggctttattatctcaatttaaaaaaattaagatgcataattctcataagataacagattcagaagaatatagttcaaggagcctcagataacttggtaaaggcatgtctcccatttgggaactgatgttcctaagatccgcactgacgctgctcagccggtccatcacacagcaaaggcgtgaggaagggtcactgcccagctggactccagggtggtccacgcatgacagtcacaccgaaccttcatgaggatgtgaactgttggctccaatttaccattcccagcaattccactcagatatttgtatactaatgttcacagcagcgtgaactccacagcaggtggagtaatgttccattgtgtgcatatgccacattttgtttatccattcatctgttgatgcacatttcggttgttcccacctttgggctattattaataatgctgctgtgaacattcccaagagaaataggaagacggctttgctaagaactaaaaaagggatggacaacaagggcatatacccaggggcagtgttctatcatgacagctttactgagagcagagtagttctgctcagaatcagaacacttgttccctatagcccccctgattgccccacaaccaccaccgcatactccccttttcccaaccatgggcagcagattgagctattaacagaagtgtcctttcgctggatttctcaaccctttcctcatcgtccacatagagaaacagtaacagattgctactcacccaacacccaggtcaagtccaatgcaggtaggaataacagcaaatccttcaatttcttgattctgctcttaaaaatcttaacagaggccgggcacggtggctcacgcctgtaatgccagcattttgggaggccgaggcgggtggatcaccaagaccagcctggccaagatggtgaaaccccgtctccactaaaaatacaaaaattagccaggcgtggtggtgggcacctgtaatcccaggtactcgggaggctgaggcagagaattgcttgaacgcgggaggcagagactgcagtgagccgagatcacaccactgcactccagcccaggtgacagagcaagactccatctcaaaaaaaaaaaaaaaagacttaacagagcatttcacggggaagggccatgagggaacatcacctgggtgatggtaacattctgtatcttgataaggatttgagttatacaagtatatacatctgtcaaaattcaaagaatgtacactcaagatctgtgcatttcattatatgtaaatgttacattaaaatgttgtaaacaaatattgaacaaatatacgcatgctaaagtatttaagaggaagtactggtgtctgcaaaacaaaaattttttttccattttctgtggtaaaatatacataatataaatgtattattttaagtgtacaattcagtggcattaaatacactcagaaagttgtgcaaacatcccatttattcatttccacagattttttaattctcattccaaacagaagccctgtacccaaagagcaataactccgcatcctccaatccccactctctggtaacctctattctactttctgcctctatgaatttgccaattctaggtacctcatataagtggaatacagtatttatccttttgtgtctggcttcttt

SEQ ID NO: 427205 - DNA, 1479 bp, Homo sapiens
cctgctctaaatcttgtctcggtctctcactctgccttatacccctcagttgaattatttcttctgaggaggcaagaactgaggctgctgcagactgatatggattcaccactgctaacacctcctggttggaactacaggaatagaactggaaagggaaaaaaggcagcattcaccacatcccaatcctgaatccaagagtctaagatagtcccccactcctatctcaggcttagaggattagattaatctcctggagggaagactcttccttgaaacatttttttttatctgcctgtagctattgggataattcgggaaatccacagggacagttcaagtcatctttgtcctctactttctgttgcactctcagccttgttctctttttagaaactgcatggtaactattatatagctaaagaagagcattctgacctctgccctgggacttcctggatcctcctcttcttataaatacaagggcagagctggtatcccggggagccaggaagcagtgagcccaggagtcctcggccagccctgcctgcccaccaggaggatgaaggtctccgtggctgccctctcctgcctcatgcttgttgctgtccttggatcccaggcccagttcacaaatgatgcagagacagagttaatgatgtcaaagcttccactggaaaatccagtagttctgaacagctttcactttgctgctgactgctgcacctcctacatctcacaaagcatcccgtgttcactcatgaaaagttattttgaaacgagcagcgagtgctccaagccaggtgtcatattcctcaccaagaaggggcggcaagtctgtgccaaacccagtggtccgggagttcaggattgcatgaaaaagctgaagccctactcaatataataataaagagacaaaagaggccagccacccacctccaacacctcctgagcctctgaagctcccaccaggccagctctcctcccacaacagcttcccacagcatgaagatctccgtggctgccattcccttcttcctcctcatcaccatcgccctagggaccaagactgaatcctcctcacaaactggggggaaaccgaaggttgttaaaatacagctaaagttggtggggggaccttaccacccctcagagtgctgcttcacctacactacctacaagatcccgcgtcagcggattatggattactatgagaccaacagccagtgctccaagcccggaattgtcttcatcaccaaaaggggccattccgtctgtaccaaccccagtgacaagtgggtccaggactatatcaaggacatgaaggagaactgagtgacccagaaggggtggcgaaggcacagctcagagacataaagagaagatgccaaggccccctcctccacccaccgctaactctcagccccagtcaccctcttggagcttccctgctttgaattaaagaccactcatgctctt

SEQ ID NO: 427206 - DNA, 1044 bp, Homo sapiens
cctgctctaaatcttgtctcggtctctcactctgccttatacccctcagttgaattatttcttctgaggaggcaagaactgaggctgctgcagactgatatggattcaccactgctaacacctcctggttggaactacaggaatagaactggaaagggaaaaaaggcagcattcaccacatcccaatcctgaatccaagagtctaagatagtcccccactcctatctcaggcttagaggattagattaatctcctggagggaagactcttccttgaaacatttttttttatctgcctgtagctattgggataattcgggaaatccacagggacagttcaagtcatctttgtcctctactttctgttgcactctcagccttgttctctttttagaaactgcatggtaactattatatagctaaagaagagcattctgacctctgccctgggacttcctggatcctcctcttcttataaatacaagggcagagctggtatcccggggagccaggaagcagtgagcccaggagtcctcggccagccctgcctgcccaccaggaggatgaaggtctccgtggctgccctctcctgcctcatgcttgttgctgtccttggatcccaggcccagttcacaaatgatgcagagacagagttaatgatgtcaaagcttccactggaaaatccagtagttctgaacagctttcactttgctgctgactgctgcacctcctacatctcacaaagcatcccgtgttcactcatgaaaagttattttgaaacgagcagcgagtgctccaagccaggtgtcatattcctcaccaagaaggggcggcaagtctgtgccaaacccagtggtccgggagttcaggattgcatgaaaaagctgaagccctactcaatataataataaagagacaaaagaggccagccacccacctccaacacctcctgtgagtttcttggtctgaaatacttaaaaaatatatatattgttgtgtctggtaatgaaagtaatgcatctaataaagagtattcaatttttta

SEQ ID NO: 427207 - DNA, 700 bp, Homo sapiens
caccctctagtctctagatgaacagatcctgaatgtccaggccccacgtggcctgttctaaggcctgagatggaattggatacaggacacatccagccttgagatcttttgctaagtgtgacacagtgcccccagccctgtgctcatgttcatgcctagggaaaggcttctatcaaaagagttgaacttcttcccactggggatggaagaccatttcctcccttaaaccttggctctccctgcttccttcaggccaccaacaacacatgtgcaggatatgaaattgctgaggcatcactgctttcctacttcccttccaagtctcagctcccttattttaaaaaatatttggcctcaatgatcatttctcaacaattcctcaccgcaggagcctctgaagctcccaccaggccagctctcctcccacaacagcttcccacagcatgaagatctccgtggctgccattcccttcttcctcctcatcaccatcgccctagggaccaagactgaatcctcctcacgtgagtgcaatgccttgtcttccttccaacctagagccctctccgatgtcatttgtcagctcagaggaacaaggtgggagagtataggagctctgactgggtctcaggaaacaggggccccttatgccgttctttggatcgtgaggatgctgcctggaatggagctggaaaacccgct

SEQ ID NO: 427208 - DNA, 474 bp, Homo sapiens
taccggcctccactaaaaagggaaattttggcccctcaaggggccaaaaaatttcggcccaagggtccaaagccaaaagttaattgaatgtcaaaagcttccactggaaaatccagtagttctgaacagctttcactttgctgctgactgctgcacctcctacatctcacaaagcatcccgtgttcactcatgaaaagttattttgaaacgagcagcgagtgctccaagccaggtgtcatattcctcaccaagaaggggcggcaagtctgtgccaaacccagtggtccgggagttcaggattgcatgaaaaagctgaagccctactcaatataataataaagagacaaaagaggccagccacccacctccaacacctcctgtgagtttcttggtctgaaatacttaaaaaatatatatattgttgtgtctggtaatgaaagtaatgcatctaataaagagtattcaatttttta

SEQ ID NO: 427209 - DNA, 869 bp, Homo sapiens
caccctctagtctctagatgaacagatcctgaatgtccaggccccacgtggcctgttctaaggcctgagatggaattggatacaggacacatccagccttgagatcttttgctaagtgtgacacagtgcccccagccctgtgctcatgttcatgcctagggaaaggcttctatcaaaagagttgaacttcttcccactggggatggaagaccatttcctcccttaaaccttggctctccctgcttccttcaggccaccaacaacacatgtgcaggatatgaaattgctgaggcatcactgctttcctacttcccttccaagtctcagctcccttattttaaaaaatatttggcctcaatgatcatttctcaacaattcctcaccgcaggagcctctgaagctcccaccaggccagctctcctcccacaacagcttcccacagcatgaagatctccgtggctgccattcccttcttcctcctcatcaccatcgccctagggaccaagactgaatcctcctcacggggaccttaccacccctcagagtgctgcttcacctacactacctacaagatcccgcgtcagcggattatggattactatgagaccaacagccagtgctccaagcccggaattgtcttcatcaccaaaaggggccattccgtctgtaccaaccccagtgacaagtgggtccaggactatatcaaggacatgaaggagaactgagtgacccagaaggggtggcgaaggcacagctcagagacataaagagaagatgccaaggccccctcctccacccaccgctaactctcagccccagtcaccctcttggagcttccctgctttgaattaaagaccactcatgctctt

SEQ ID NO: 427210 - DNA, 1114 bp, Homo sapiens
cctgctctaaatcttgtctcggtctctcactctgccttatacccctcagttgaattatttcttctgaggaggcaagaactgaggctgctgcagactgatatggattcaccactgctaacacctcctggttggaactacaggaatagaactggaaagggaaaaaaggcagcattcaccacatcccaatcctgaatccaagagtctaagatagtcccccactcctatctcaggcttagaggattagattaatctcctggagggaagactcttccttgaaacatttttttttatctgcctgtagctattgggataattcgggaaatccacagggacagttcaagtcatctttgtcctctactttctgttgcactctcagccttgttctctttttagaaactgcatggtaactattatatagctaaagaagagcattctgacctctgccctgggacttcctggatcctcctcttcttataaatacaagggcagagctggtatcccggggagccaggaagcagtgagcccaggagtcctcggccagccctgcctgcccaccaggaggatgaaggtctccgtggctgccctctcctgcctcatgcttgttgctgtccttggatcccaggcccagttcacaaatgatgcagagacagagttaatgatgtcaaagcttccactggaaaatccagtagttctgaacagctttcactttgctgctgactgctgcacctcctacatctcacaaagcatcccgtgttcactcatgaaaagttattttgaaacgagcagcgagtgctccaagccaggtgtcatattcctcaccaagaaggggcggcaagtctgtgccaaacccagtggtccgggagttcaggattgcatgaaaaagctgaagccctactcaatataataataaagagacaaaagaggccagccacccacctccaacacctcctgagcctctgaagctcccaccaggccagctctcctcccacaacagcttcccacagcatgaagatctccgtggctgccattcccctcctccacccaccgctaactctcagccccagtcaccctcttggagcttccctgctttgaattaaagaccactcatgctctt

SEQ ID NO: 427211 - DNA, 854 bp, Homo sapiens
gctcccaccaggccagctctcctcccacaacagcttcccacagcatgaagatctccgtggctgccattcccttcttcctcctcatcaccatcgccctagggaccaagactgaatcctcctcacgtgagtgcaatgccttgtcttccttccaacctagagcctgcagggaaataagcaggagtgaggttggggctcaggggaagaccaggagcagggactcagaaaggagggctggtatcttcttgaaattgtgtgtatagcaacattatataaatgaattatctactgagcaccacagcacttcaccccatggtgtggtgagcaggatggagatgagacttaggactgtaggttctgcttaagagtttaagttgggatcttccagccttgaccaatgagacttgacttgggagactccaggcttcattccactaccccaaatgccctctagtctccaaataaacagatcctgaatctccaggcctcacatggccttgatctcttatcattgccccccaggaccagtccccccttgccctcaaggacatggagtgagaccagcctgcctctctactccctcaatttctctctctttgccgctaagcaaaagagtggcccaccccatttggggtatatttcctcagggagattaggagcagtgtcttgagcccctcaagggcatttttctattggcctcctgaggtttgggcccagcctgcttccagcgtcacctgtgcccagtgagtgcagcattgcttgggtatgggctggggggaaacacgacagtgtggggtccatcctaggcccccttttctcagctgatttcttagaataagctgcctttagagataacc

SEQ ID NO: 427212 - DNA, 1431 bp, Homo sapiens
cctgctctaaatcttgtctcggtctctcactctgccttatacccctcagttgaattatttcttctgaggaggcaagaactgaggctgctgcagactgatatggattcaccactgctaacacctcctggttggaactacaggaatagaactggaaagggaaaaaaggcagcattcaccacatcccaatcctgaatccaagagtctaagatagtcccccactcctatctcaggcttagaggattagattaatctcctggagggaagactcttccttgaaacatttttttttatctgcctgtagctattgggataattcgggaaatccacagggacagttcaagtcatctttgtcctctactttctgttgcactctcagccttgttctctttttagaaactgcatggtaactattatatagctaaagaagagcattctgacctctgccctgggacttcctggatcctcctcttcttataaatacaagggcagagctggtatcccggggagccaggaagcagtgagcccaggagtcctcggccagccctgcctgcccaccaggaggatgaaggtctccgtggctgccctctcctgcctcatgcttgttgctgtccttggatcccaggcccagttcacaaatgatgcagagacagagttaatgatgtcaaagcttccactggaaaatccagtagttctgaacagctttcactttgctgctgactgctgcacctcctacatctcacaaagcatcccgtgttcactcatgaaaagttattttgaaacgagcagcgagtgctccaagccaggtgtcatattcctcaccaagaaggggcggcaagtctgtgccaaacccagtggtccgggagttcaggattgcatgaaaaagctgaagccctactcaatataataataaagagacaaaagaggccagccacccacctccaacacctcctgagcctctgaagctcccaccaggccagctctcctcccacaacagcttcccacagcatgaagatctccgtggctgccattcccttcttcctcctcatcaccatcgccctagggaccaagactgaatcctcctcacggggaccttaccacccctcagagtgctgcttcacctacactacctacaagatcccgcgtcagcggattatggattactatgagaccaacagccagtgctccaagcccggaattgtcttcatcaccaaaaggggccattccgtctgtaccaaccccagtgacaagtgggtccaggactatatcaaggacatgaaggagaactgagtgacccagaaggggtggcgaaggcacagctcagagacataaagagaagatgccaaggccccctcctccacccaccgctaactctcagccccagtcaccctcttggagcttccctgctttgaattaaagaccactcatgctctt

SEQ ID NO: 427213 - DNA, 1090 bp, Homo sapiens
cctgctctaaatcttgtctcggtctctcactctgccttatacccctcagttgaattatttcttctgaggaggcaagaactgaggctgctgcagactgatatggattcaccactgctaacacctcctggttggaactacaggaatagaactggaaagggaaaaaaggcagcattcaccacatcccaatcctgaatccaagagtctaagatagtcccccactcctatctcaggcttagaggattagattaatctcctggagggaagactcttccttgaaacatttttttttatctgcctgtagctattgggataattcgggaaatccacagggacagttcaagtcatctttgtcctctactttctgttgcactctcagccttgttctctttttagaaactgcatggtaactattatatagctaaagaagagcattctgacctctgccctgggacttcctggatcctcctcttcttataaatacaagggcagagctggtatcccggggagccaggaagcagtgagcccaggagtcctcggccagccctgcctgcccaccaggaggatgaaggtctccgtggctgccctctcctgcctcatgcttgttgctgtccttggatcccaggcccagttcacaaatgatgcagagacagagttaatgatgtcaaagcttccactggaaaatccagtagttctgaacagctttcactttgctgctgactgctgcacctcctacatctcacaaagcatcccgtgttcactcatgaaaagttattttgaaacgagcagcgagtgctccaagccaggtgtcatattcctcaccaagaaggggcggcaagtctgtgccaaacccagtggtccgggagttcaggattgcatgaaaaagctgaagccctactcaatataataataaagagacaaaagaggccagccacccacctccaacacctcctgtgagtttcttggtctgaaatacttaaaaaatatatatattgttgtgtctggtaatgaaagtaatgcatctaataaagagtattcaattttttaactttgcttgagttttaagaggaaataaactaatataaaactgaag

SEQ ID NO: 427214 - DNA, 416 bp, Homo sapiens
tgcaggagcagccaatggtatggcctttaacaaggggcccctcctcagcatctgatgctctctcctcagggggaccttaccacccctcagagtgctgcttcacctacactacctacaagatcccgcgtcagcggattatggattactatgagaccaacagccagtgctccaagcccggaattgtcttcatcaccaaaaggggccattccgtctgtaccaaccccagtgacaagtgggtccaggactatatcaaggacatgaaggagaactgagtgacccagaaggggtggcgaaggcacagctcagagacataaagagaagatgccaaggccccctcctccacccaccgctaactctcagccccagtcaccctcttggagcttccctgctttgaattaaagaccactcatgctctt

SEQ ID NO: 427215 - DNA, 1747 bp, Homo sapiens
cctgctctaaatcttgtctcggtctctcactctgccttatacccctcagttgaattatttcttctgaggaggcaagaactgaggctgctgcagactgatatggattcaccactgctaacacctcctggttggaactacaggaatagaactggaaagggaaaaaaggcagcattcaccacatcccaatcctgaatccaagagtctaagatagtcccccactcctatctcaggcttagaggattagattaatctcctggagggaagactcttccttgaaacatttttttttatctgcctgtagctattgggataattcgggaaatccacagggacagttcaagtcatctttgtcctctactttctgttgcactctcagccttgttctctttttagaaactgcatggtaactattatatagctaaagaagagcattctgacctctgccctgggacttcctggatcctcctcttcttataaatacaagggcagagctggtatcccggggagccaggaagcagtgagcccaggagtcctcggccagccctgcctgcccaccaggaggatgaaggtctccgtggctgccctctcctgcctcatgcttgttgctgtccttggatcccaggcccagttcacaaatgatgcagagacagagttaatgatgtcaaagcttccactggaaaatccagtagttctgaacagctttcactttgctgctgactgctgcacctcctacatctcacaaagcatcccgtgttcactcatgaaaagttattttgaaacgagcagcgagtgctccaagccaggtgtcatattcctcaccaagaaggggcggcaagtctgtgccaaacccagtggtccgggagttcaggattgcatgaaaaagctgaagccctactcaatataataataaagagacaaaagaggccagccacccacctccaacacctcctgagcctctgaagctcccaccaggccagctctcctcccacaacagcttcccacagcatgaagatctccgtggctgccattcccttcttcctcctcatcaccatcgccctagggaccaagactgaatcctcctcacggggaccttaccacccctcagagtgctgcttcacctacactacctacaagatcccgcgtcagcggattatggattactatgagaccaacagccagtgctccaagcccggaattgtcttcatcaccaaaaggggccattccgtctgtaccaaccccagtgacaagtgggtccaggactatatcaaggacatgaaggagaactgagtgacccagaaggggtggcgaaggcacagctcagagacataaagagaagatgccaaggccccctcctccacccaccgctaactctcagccccagtcaccctcttggagcttccctgctttgaattaaagaccactcatgctcttaaaaaaaacaaaaaaaaacaaaaaaaaaaaaaacaaaaaaacaacaaaaaaacaaaaaaaaaaaaaaaagaggggggggcccccaaaaaaacccccgcggggggcccccagtttcgcagctcgccccccgtgctttgttgcacagagggtggccccccatatggagcggagctcgtgtttaccagctcctcgcacatgcctggccgccgcccgttttccccgcactgcctggtcgtcccccaacactcactcccccgtgggcctccctggcgaggaacccccatcccgtggcgggcacactcggcccccttccctt

SEQ ID NO: 427216 - DNA, 660 bp, Homo sapiens
atgtgtatccaaagcactgttattctttgccatgatgatagagattaattagccatatgcaagtttttctgctctttatatcttctttctaatgtttattttttgagaagaaacatctattagcccattgccttttggcacttgaagttaccacccaaactaacatttcaaagttatgttttatcatactgccacctctctcttgtgaagatatctgtttttattgtaacacataaagtccataaaccaggtaatgtatttcaatacttttccaaagtattaaaatagtgttttgaccatactttaagacaggggtgttcaatcttttggcttccctgggccacattggaagaagaagaattgtcttggtccacacataaaatacactagcactagatgatgagcttaaaaaaaaattacaactgggccacatgcggcccatggtccgtgggttggacaagcttactttaagaaactggaaacatattaaatcacaccagaaaatagtttttaaaaatctaatattaaattactacattaaattaattcaaattttaattagattcaattaaaatcttacatataagccagctaaaatcttgtcagttaaaatctaatatgaattcagttgcacactaattataacggtgactattacac

SEQ ID NO: 427217 - DNA, 991 bp, Homo sapiens
ggggctccggcctctgaagttcccaatttaaatggcgggcttggtagtctgaagagtttgtactccttcccggaaaacgtgatttaaaagacacagggcctaaaggattagaacacacttgtgagggggtcctagactggcttcttgatgaagggcagaaaccgcaggggccagcggcagcggtaactcctactgtagtgttgacgttgtggtctgcacaaatggtatttcaagagatctgcggcaaccgcgatgtgaagtggagatgtctaatttctgttgatagtcacaggagttggaaaaacaacattgatccataaagccagtgaggttttaaaatcctctggtgtgcctgttgatggattttataccgaagaagtcagacagggagggagaagaataggattcgatgtcgtcacgttgtccggcacccgggggcctttatcgagagttgggttagagcctccacctggaaaacgtgaatgccgagttgggcagtatgtggtcgacctgacttcttttgagcagttggcactacccgtcttgaggaatgccgactgcagcagtggcccagggcaaagagtgtgcgtcatcgatgagattgggaagatggagctcttcagtcagcttttcattcaagctgttcgtcagacgctgtctaccccagggactataatccttggcacaatcccagttcctaaaggaaagccactggctcttgtagaagaaatcagaaacagaaaggatgtgaaggtgtttaatgtcaccaaggaaaacagaaaccaccttctgccagatatcgtgacgtgcgtgcagagcagcaggaagtgaagacacgtgcattcctgccttccgtgaaggagtgcccagttcaagaggagcctgatggagccctgcctgtcgaggctgtatgcctatggggttatggaaccttgtgggcttttctagagaaaactcaacagctgtttcccataaaatgtttaaaagatca

SEQ ID NO: 427218 - DNA, 475 bp, Homo sapiens
gaaatctgtctgggctccaaacccactttgactttttgagctgtcacttggcagaaactgatgctgggactcggtgattcctgtcctgtttctgagtgctcctgaagagctgggcctcctgcctgggtaacaaaacatacctcaccctctcccagccttccaggcttttcttttagagagttacctagcacaagattgaagaagaggaaaggagctctgaagcctgttctctcacttcttcccacagtcaccaaggaaaacagaaaccaccttctgccagatatcgtgacgtgcgtgcagagcagcaggaagtgaagacacgtgcattcctgccttccgtgaaggagtgcccagttcaagaggagcctgatggagccctgcctgtcgaggctgtatgcctatggggttatggaaccttgtgggcttttctagagaaaactcaacagctgtttcccataaaatgtttaaaagatca

SEQ ID NO: 427219 - DNA, 1681 bp, Homo sapiens
  misc_feature (1496)..(1496): n is a, c, g, or t
  misc_feature (1544)..(1544): n is a, c, g, or t
  misc_feature (1618)..(1618): n is a, c, g, or t
agcgtgtggttctcctcaccatggccaaggcagaaagtccaaaggaacacgacccgttcacttacgactaccagtccctgcagatcggaggcctcgtcatcgccaggatcctcttcatcctgggcatcctcatcgtgctgagcagaagatgccggtgcaagttcaaccagcagcagaggactggggaacctggcgacacgcggtgggcgggtcctgagtcgcgaccctggtccggacctgacctgaattgcgaccccaacctggactgctcccctgaccgcaacccctacccccgcccaccagtatggcccggcacgtgttcctaacggggcccccaggagttggaaaaacaacattgatccataaagccagtgaggttttaaaatcctctggtgtgcctgttgatggattttataccgaagaagtcagacagggagggagaagaataggattcgatgtcgtcacgttgtccggcacccgggggcctttatcgagagttgggttagagcctccacctggaaaacgtgaatgccgagttgggcagtatgtggtcgacctgacttcttttgagcagttggcactacccgtcttgaggaatgccgactgcagcagtggcccagggcaaagagtgtgcgtcatcgatgagattgggaagatggagctcttcagtcagcttttcattcaagctgttcgtcagacgctgtctaccccagggactataatccttggcacaatcccagttcctaaaggaaagccactggctcttgtagaagaaatcagaaacagaaaggatgtgaaggtgtttaatgtcaccaaggaaaacagaaaccaccttctgccagatatcgtgacgtgcgtgcagagcagcaggaagtgaagacacgtgcattcctgccttccgtgaaggagtgcccagttcaagaggagcctgatggagccctgcctgtcgaggctgtatgcctatggggttatggaaccttgtgggcttttctagagaaaactcaacagctgtttcccataaaatgtttaaaagatcaaattagccttaatgctggattgtctgtacaagattaactatccattgtggcttatctatgcttaaagatttcttgtttatttcctcttgcagtcatgcacatgatttgggtaaactgtgagatgagaaatggttttcagagtattagatggaattcacccccgttgaagtttataaatgtgttcaggggaagcgggaggaaagagttcactgcctaatcagttttgcatgtcatgaaaattaaattcctctccaggtgcagcttcagcctcatgcaacttaaagtgataacagttatttgattttttaaaaaatattattccaaaagaaaaccattttaggtcatctcccccaactctgtttgcttactgcttaataaatataaaaataaatctgatggttacagacaggaaaaaaaaaaaaaaaaaaaaaccaggatttgaaggagctattttttttnaatgttgcaactagcaactcatcttcggaagacacagccaggggaatnaagtagaagtgaaaggtttataaatccatttgtaagcatttatcccatatattttaaattcaaggaaaattgtntttatctttgaattttgtattcaatactttatgtactatgtgactcatgcttctggataaata

SEQ ID NO: 427220 - DNA, 1635 bp, Homo sapiens
  misc_feature (1450)..(1450): n is a, c, g, or t
  misc_feature (1498)..(1498): n is a, c, g, or t
  misc_feature (1572)..(1572): n is a, c, g, or t
ggggctccggcctctgaagttcccaatttaaatggcgggcttggtagtctgaagagtttgtactccttcccggaaaacgtgatttaaaagacacagggcctaaaggattagaacacacttgtgagggggtcctagactggcttcttgatgaagggcagaaaccgcaggggccagcggcagcggtaactcctactgtagtgttgacgttgtggtctgcacaaatggtatttcaagagatctgcggcaaccgcgatgtgaagtggagatgtctaatttctgttgatagtcacaggagttggaaaaacaacattgatccataaagccagtgaggttttaaaatcctctggtgtgcctgttgatggattttataccgaagaagtcagacagggagggagaagaataggattcgatgtcgtcacgttgtccggcacccgggggcctttatcgagagttgggttagagcctccacctggaaaacgtgaatgccgagttgggcagtatgtggtcgacctgacttcttttgagcagttggcactacccgtcttgaggaatgccgactgcagcagtggcccagggcaaagagtgtgcgtcatcgatgagattgggaagatggagctcttcagtcagcttttcattcaagctgttcgtcagacgctgtctaccccagggactataatccttggcacaatcccagttcctaaaggaaagccactggctcttgtagaagaaatcagaaacagaaaggatgtgaaggtgtttaatgtcaccaaggaaaacagaaaccaccttctgccagatatcgtgacgtgcgtgcagagcagcaggaagtgaagacacgtgcattcctgccttccgtgaaggagtgcccagttcaagaggagcctgatggagccctgcctgtcgaggctgtatgcctatggggttatggaaccttgtgggcttttctagagaaaactcaacagctgtttcccataaaatgtttaaaagatcaaattagccttaatgctggattgtctgtacaagattaactatccattgtggcttatctatgcttaaagatttcttgtttatttcctcttgcagtcatgcacatgatttgggtaaactgtgagatgagaaatggttttcagagtattagatggaattcacccccgttgaagtttataaatgtgttcaggggaagcgggaggaaagagttcactgcctaatcagttttgcatgtcatgaaaattaaattcctctccaggtgcagcttcagcctcatgcaacttaaagtgataacagttatttgattttttaaaaaatattattccaaaagaaaaccattttaggtcatctcccccaactctgtttgcttactgcttaataaatataaaaataaatctgatggttacagacaggaaaaaaaaaaaaaaaaaaaaaccaggatttgaaggagctattttttttnaatgttgcaactagcaactcatcttcggaagacacagccaggggaatnaagtagaagtgaaaggtttataaatccatttgtaagcatttatcccatatattttaaattcaaggaaaattgtntttatctttgaattttgtattcaatactttatgtactatgtgactcatgcttctggataaata

SEQ ID NO: 427221 - DNA, 1518 bp, Homo sapiens
  misc_feature (1333)..(1333): n is a, c, g, or t
  misc_feature (1381)..(1381): n is a, c, g, or t
  misc_feature (1455)..(1455): n is a, c, g, or t
agcgtgtggttctcctcaccatggccaaggcagaaagtccaaaggaacacgacccgttcacttacgactaccagtccctgcagatcggaggcctcgtcatcgccaggatcctcttcatcctgggcatcctcatcgtgctgagcagaagatgccggtgcaagttcaaccagcagcagaggactggggaacctggcgacacgcggtgggcgggtcctgagtcgcgaccctggtccggacctgacctgaattgcgaccccaacctggactgctcccctgaccgcaacccctacccccgcccaccagtatggcccggcacgtgttcctaacggggcccccaggttagagcctccacctggaaaacgtgaatgccgagttgggcagtatgtggtcgacctgacttcttttgagcagttggcactacccgtcttgaggaatgccgactgcagcagtggcccagggcaaagagtgtgcgtcatcgatgagattgggaagatggagctcttcagtcagcttttcattcaagctgttcgtcagacgctgtctaccccagggactataatccttggcacaatcccagttcctaaaggaaagccactggctcttgtagaagaaatcagaaacagaaaggatgtgaaggtgtttaatgtcaccaaggaaaacagaaaccaccttctgccagatatcgtgacgtgcgtgcagagcagcaggaagtgaagacacgtgcattcctgccttccgtgaaggagtgcccagttcaagaggagcctgatggagccctgcctgtcgaggctgtatgcctatggggttatggaaccttgtgggcttttctagagaaaactcaacagctgtttcccataaaatgtttaaaagatcaaattagccttaatgctggattgtctgtacaagattaactatccattgtggcttatctatgcttaaagatttcttgtttatttcctcttgcagtcatgcacatgatttgggtaaactgtgagatgagaaatggttttcagagtattagatggaattcacccccgttgaagtttataaatgtgttcaggggaagcgggaggaaagagttcactgcctaatcagttttgcatgtcatgaaaattaaattcctctccaggtgcagcttcagcctcatgcaacttaaagtgataacagttatttgattttttaaaaaatattattccaaaagaaaaccattttaggtcatctcccccaactctgtttgcttactgcttaataaatataaaaataaatctgatggttacagacaggaaaaaaaaaaaaaaaaaaaaaccaggatttgaaggagctattttttttnaatgttgcaactagcaactcatcttcggaagacacagccaggggaatnaagtagaagtgaaaggtttataaatccatttgtaagcatttatcccatatattttaaattcaaggaaaattgtntttatctttgaattttgtattcaatactttatgtactatgtgactcatgcttctggataaata

SEQ ID NO: 427222 - DNA, 1421 bp, Homo sapiens
  misc_feature (1236)..(1236): n is a, c, g, or t
  misc_feature (1284)..(1284): n is a, c, g, or t
  misc_feature (1358)..(1358): n is a, c, g, or t
agcgtgtggttctcctcaccatggccaaggcagaaagtccaaaggaacacgacccgttcacttacgactaccagtccctgcagatcggaggcctcgtcatcgccaggatcctcttcatcctgggcatcctcatcgtgctgagcagaagatgccggtgcaagttcaaccagcagcagaggactggggaacctggcgacacgcggtgggcgggtcctgagtcgcgaccctggtccggacctgacctgaattgcgaccccaacctggactgctcccctgaccgcaacccctacccccgcccaccagtatggcccggcacgtgttcctaacggggcccccaggccgactgcagcagtggcccagggcaaagagtgtgcgtcatcgatgagattgggaagatggagctcttcagtcagcttttcattcaagctgttcgtcagacgctgtctaccccagggactataatccttggcacaatcccagttcctaaaggaaagccactggctcttgtagaagaaatcagaaacagaaaggatgtgaaggtgtttaatgtcaccaaggaaaacagaaaccaccttctgccagatatcgtgacgtgcgtgcagagcagcaggaagtgaagacacgtgcattcctgccttccgtgaaggagtgcccagttcaagaggagcctgatggagccctgcctgtcgaggctgtatgcctatggggttatggaaccttgtgggcttttctagagaaaactcaacagctgtttcccataaaatgtttaaaagatcaaattagccttaatgctggattgtctgtacaagattaactatccattgtggcttatctatgcttaaagatttcttgtttatttcctcttgcagtcatgcacatgatttgggtaaactgtgagatgagaaatggttttcagagtattagatggaattcacccccgttgaagtttataaatgtgttcaggggaagcgggaggaaagagttcactgcctaatcagttttgcatgtcatgaaaattaaattcctctccaggtgcagcttcagcctcatgcaacttaaagtgataacagttatttgattttttaaaaaatattattccaaaagaaaaccattttaggtcatctcccccaactctgtttgcttactgcttaataaatataaaaataaatctgatggttacagacaggaaaaaaaaaaaaaaaaaaaaaccaggatttgaaggagctattttttttnaatgttgcaactagcaactcatcttcggaagacacagccaggggaatnaagtagaagtgaaaggtttataaatccatttgtaagcatttatcccatatattttaaattcaaggaaaattgtntttatctttgaattttgtattcaatactttatgtactatgtgactcatgcttctggataaata

SEQ ID NO: 427223 - DNA, 1119 bp, Homo sapiens
  misc_feature (934)..(934): n is a, c, g, or t
  misc_feature (982)..(982): n is a, c, g, or t
  misc_feature (1056)..(1056): n is a, c, g, or t
gaaatctgtctgggctccaaacccactttgactttttgagctgtcacttggcagaaactgatgctgggactcggtgattcctgtcctgtttctgagtgctcctgaagagctgggcctcctgcctgggtaacaaaacatacctcaccctctcccagccttccaggcttttcttttagagagttacctagcacaagattgaagaagaggaaaggagctctgaagcctgttctctcacttcttcccacagtcaccaaggaaaacagaaaccaccttctgccagatatcgtgacgtgcgtgcagagcagcaggaagtgaagacacgtgcattcctgccttccgtgaaggagtgcccagttcaagaggagcctgatggagccctgcctgtcgaggctgtatgcctatggggttatggaaccttgtgggcttttctagagaaaactcaacagctgtttcccataaaatgtttaaaagatcaaattagccttaatgctggattgtctgtacaagattaactatccattgtggcttatctatgcttaaagatttcttgtttatttcctcttgcagtcatgcacatgatttgggtaaactgtgagatgagaaatggttttcagagtattagatggaattcacccccgttgaagtttataaatgtgttcaggggaagcgggaggaaagagttcactgcctaatcagttttgcatgtcatgaaaattaaattcctctccaggtgcagcttcagcctcatgcaacttaaagtgataacagttatttgattttttaaaaaatattattccaaaagaaaaccattttaggtcatctcccccaactctgtttgcttactgcttaataaatataaaaataaatctgatggttacagacaggaaaaaaaaaaaaaaaaaaaaaccaggatttgaaggagctattttttttnaatgttgcaactagcaactcatcttcggaagacacagccaggggaatnaagtagaagtgaaaggtttataaatccatttgtaagcatttatcccatatattttaaattcaaggaaaattgtntttatctttgaattttgtattcaatactttatgtactatgtgactcatgcttctggataaata

SEQ ID NO: 427224 - DNA, 1471 bp, Homo sapiens
  misc_feature (1286)..(1286): n is a, c, g, or t
  misc_feature (1334)..(1334): n is a, c, g, or t
  misc_feature (1408)..(1408): n is a, c, g, or t
agcgtgtggttctcctcaccatggccaaggcagaaagtccaaaggaacacgacccgttcacttacgactaccagtccctgcagatcggaggcctcgtcatcgccaggatcctcttcatcctgggcatcctcatcgtgctgagcagaagatgccggtgcaagttcaaccagcagcagaggactggggaacctggcgacacgcggtgggcgggtcctgagtcgcgaccctggtccggacctgacctgaattgcgaccccaacctggactgctcccctgaccgcaacccctacccccgcccaccagtatggcccggcacgtgttcctaacggggcccccaggagttggaaaaacaacattgatccataaagccagtgaggttttaaaatcctctggtgtgcctgttgatggattttataccgaagaagtcagacagggagggagaagaataggattcgatgtcgtcacgttgtccggcacccgggggcctttatcgagagttgggttagagcctccacctggaaaacgtgaatgccgagttgggcagtatgtggtcgacctgacttcttttgagcagttggcactacccgtcttgaggaatgtcaccaaggaaaacagaaaccaccttctgccagatatcgtgacgtgcgtgcagagcagcaggaagtgaagacacgtgcattcctgccttccgtgaaggagtgcccagttcaagaggagcctgatggagccctgcctgtcgaggctgtatgcctatggggttatggaaccttgtgggcttttctagagaaaactcaacagctgtttcccataaaatgtttaaaagatcaaattagccttaatgctggattgtctgtacaagattaactatccattgtggcttatctatgcttaaagatttcttgtttatttcctcttgcagtcatgcacatgatttgggtaaactgtgagatgagaaatggttttcagagtattagatggaattcacccccgttgaagtttataaatgtgttcaggggaagcgggaggaaagagttcactgcctaatcagttttgcatgtcatgaaaattaaattcctctccaggtgcagcttcagcctcatgcaacttaaagtgataacagttatttgattttttaaaaaatattattccaaaagaaaaccattttaggtcatctcccccaactctgtttgcttactgcttaataaatataaaaataaatctgatggttacagacaggaaaaaaaaaaaaaaaaaaaaaccaggatttgaaggagctattttttttnaatgttgcaactagcaactcatcttcggaagacacagccaggggaatnaagtagaagtgaaaggtttataaatccatttgtaagcatttatcccatatattttaaattcaaggaaaattgtntttatctttgaattttgtattcaatactttatgtactatgtgactcatgcttctggataaata

SEQ ID NO: 427225 - DNA, 1475 bp, Homo sapiens
agcgtgtggttctcctcaccatggccaaggcagaaagtccaaaggaacacgacccgttcacttacgactaccagtccctgcagatcggaggcctcgtcatcgccaggatcctcttcatcctgggcatcctcatcgtgctgagcagaagatgccggtgcaagttcaaccagcagcagaggactggggaacctggcgacacgcggtgggcgggtcctgagtcgcgaccctggtccggacctgacctgaattgcgaccccaacctggactgctcccctgaccgcaacccctacccccgcccaccagtatggcccggcacgtgttcctaacggggcccccaggagttggaaaaacaacattgatccataaagccagtgaggttttaaaatcctctggtgtgcctgttgatggattttataccgaagaagtcagacagggagggagaagaataggattcgatgtcgtcacgttgtccggcacccgggggcctttatcgagagttgggttagagcctccacctggaaaacgtgaatgccgagttgggcagtatgtggtcgacctgacttcttttgagcagttggcactacccgtcttgaggaatgccgactgcagcagtggcccagggcaaagagtgtgcgtcatcgatgagattgggaagatggagctcttcagtcagcttttcattcaagctgttcgtcagacgctgtctaccccagggactataatccttggcacaatcccagttcctaaaggaaagccactggctcttgtagaagaaatcagaaacagaaaggatgtgaaggtgtttaattcaccgtactgtgtcatagaagaccagagcaaattctccagctgtgtatcacagtccactctcacagagcctggctggaggcagaagctactgcaatcactgctgaactcagagtggaagaaaagggcccctgtggtgcccacctctgtgtcgcctcctttctacctcaggtggattccttgaatgcaaacaacaggaatggactttggctaacttaagtgaaaacagcatcaaaaagccttataggctttggagctgtcccatgaagccaaaggaaaagctgactgtcctcatttcaagtggagccacagccgcccaggattgacgcagccaggaccagtagaaatgggatcacaggattgacgcagccagaaccagaattgacgaggtccgctctgcatactccttcattgtccttgttcatgcctgtcctgtcctggtctgcgagctccatgaggtcagggtccttacctgtggtgcttctctatgcgcatctctgtgcctggctcctgtttgcccttccaccccatcagcgtgtgttgagtggatggatattatatgggccaagtaggaaggcactgtgatgggagcagagatggcccttcctttaccctggggcactcgggatggtgtggtagtgaaagaaaaataaacagatcatcgggta

SEQ ID NO: 427226 - DNA, 1830 bp, Homo sapiens
agcgtgtggttctcctcaccatggccaaggcagaaagtccaaaggaacacgacccgttcacttacgactaccagtccctgcagatcggaggcctcgtcatcgccaggatcctcttcatcctgggcatcctcatcgtgctgagcagaagatgccggtgcaagttcaaccagcagcagaggactggggaacctggcgacacgcggtgggcgggtcctgagtcgcgaccctggtccggacctgacctgaattgcgaccccaacctggactgctcccctgaccgcaacccctacccccgcccaccagtatggcccggcacgtgttcctaacggggcccccaggttagagcctccacctggaaaacgtgaatgccgagttgggcagtatgtggtcgacctgacttcttttgagcagttggcactacccgtcttgaggaatgccgactgcagcagtggcccagggcaaagagtgtgcgtcatcgatgagattgggaagatggagctcttcagtcagcttttcattcaagctgttcgtcagacgctgtctaccccagggactataatccttggcacaatcccagttcctaaaggaaagccactggctcttgtagaagaaatcagaaacagaaaggatgtgaaggtgtttaattcaccgtactgtgtcatagaagaccagagcaaattctccagctgtgtatcacagtccactctcacagagcctggctggaggcagaagctactgcaatcactgctgaactcagagtggaagaaaagggcccctgtggtgcccacctctgtgtcgcctcctttctacctcaggtggattccttgaatgcaaacaacaggaatggactttggctaacttaagtgaaaacagcatcaaaaagccttataggctttggagctgtcccatgaagccaaaggaaaagctgactgtcctcatttcaagtggagccacagccgcccaggattgacgcagccaggaccagtagaaatgggatcacaggattgacgcagccaggaccggtagaaatgggatcacgggactgacgcagccaggaccagtagaaatgggatcacgggattgacgcagccaggaccagtagaaatgggatcagcttctggcacttgctgcgtgagctcactcctcttggggtgcagatctcagtcactcctcttggggtacagatctcagagaagttgccagggcctggcttgcccacttgttggctgggggcaagtttcctagaccgtacagtctcctaaagacaaccagagcactcttccaagaagggtgagcaggtgccaggaaccagaattgacgaggtccgctctgcatctcctcttcagacatgtattggcacctattgtatgccaggccccctcttcagatacaaccaccctgaacctcagaaggcttccacatgcactccctgctcttaccgggaaccttggctcagccccttttccatggttcacctgtcgaaattacatccaggcttaagcacccctggaagcctttcctgcccctgaccccacacatgcccctgttcctgcctgccccccagactccttcattgtccttgttcatgcctgtcctgtcctggtctgcgagctccatgaggtcagggtccttacctgtggtgcttctctatgcgcatctctgtgcctggctcctgtttgcccttccaccccatcagcgtgtgttgagtggatggatattatatgggccaagtaggaaggcactgtgatgggagcagagatggcccttcctttaccctggggcactcgggatggtgtggtagtgaaagaaaaataaacagatcatcgggta

SEQ ID NO: 427227 - DNA, 883 bp, Homo sapiens
agcgtgtggttctcctcaccatggccaaggcagaaagtccaaaggaacacgacccgttcacttacgactaccagtccctgcagatcggaggcctcgtcatcgccaggatcctcttcatcctgggcatcctcatcgtgctgagcagaagatgccggtgcaagttcaaccagcagcagaggactggggaacctggcgacacgcggtgggcgggtcctgagtcgcgaccctggtccggacctgacctgaattgcgaccccaacctggactgctcccctgaccgcaacccctacccccgcccaccagtatggcccggcacgtgttcctaacggggcccccaggagttggaaaaacaacattgatccataaagccagtgaggttttaaaatcctctggtgtgcctgttgatggattttataccgaagaagtcagacagggagggagaagaataggattcgatgtcgtcacgttgtccggcacccgggggcctttatcgagagttggatggagctcttcagtcagcttttcattcaagctgttcgtcagacgctgtctaccccagggactataatccttggcacaatcccagttcctaaaggaaagccactggctcttgtagaagaaatcagaaacagaaaggatgtgaaggtgtttaatgtcaccaaggaaaacagaaaccaccttctgccagatatcgtgacgtgcgtgcagagcagcaggaagtgaagacacgtgcattcctgccttccgtgaaggagtgcccagttcaagaggagcctgatggagccctgcctgtcgaggctgtatgcctatggggttatggaaccttgtgggcttttctagagaaaactcaacagctgtttcccataaaatgtttaaaagatca

SEQ ID NO: 427228 - DNA, 513 bp, Homo sapiens
  misc_feature (1)..(1): n is a, c, g, or t
naactaacggctaggtacgaggccgggtggtgctgacttcttttgagcagttggcactacccgtcttgaggaatgccgactgcagcagtggcccagggcaaagagtgtgcgtcatcgatgagattgggaagatggagctcttcagtcagcttttcattcaagctgttcgtcagacgctgtctaccccagggactataatccttggcacaatcccagttcctaaaggaaagccactggctcttgtagaagaaatcagaaacagaaaggatgtgaaggtgtttaatgtcaccaaggaaaacagaaaccaccttctgccagatatcgtgacgtgcgtgcagagcagcaggaagtgaagacacgtgcattcctgccttccgtgaaggagtgcccagttcaagaggagcctgatggagccctgcctgtcgaggctgtatgcctatggggttatggaaccttgtgggcttttctagagaaaactcaacagctgtttcccataaaatgtttaaaagatca

SEQ ID NO: 427229 - DNA, 1531 bp, Homo sapiens
  misc_feature (1346)..(1346): n is a, c, g, or t
  misc_feature (1394)..(1394): n is a, c, g, or t
  misc_feature (1468)..(1468): n is a, c, g, or t
ggcggtgcttccggtcaaagcaccgcttgggggcggggcctggcgacacgcggtgggcgggtcctgagtcgcgaccctggtccggacctgacctgaattgcgaccccaacctggactgctcccctgaccgcaacccctacccccgcccaccagtatggcccggcacgtgttcctaacggggcccccaggagttggaaaaacaacattgatccataaagccagtgaggttttaaaatcctctggtgtgcctgttgatggattttataccgaagaagtcagacagggagggagaagaataggattcgatgtcgtcacgttgtccggcacccgggggcctttatcgagagttgggttagagcctccacctggaaaacgtgaatgccgagttgggcagtatgtggtcgacctgacttcttttgagcagttggcactacccgtcttgaggaatgccgactgcagcagtggcccagggcaaagagtgtgcgtcatcgatgagattgggaagatggagctcttcagtcagcttttcattcaagctgttcgtcagacgctgtctaccccagggactataatccttggcacaatcccagttcctaaaggaaagccactggctcttgtagaagaaatcagaaacagaaaggatgtgaaggtgtttaatgtcaccaaggaaaacagaaaccaccttctgccagatatcgtgacgtgcgtgcagagcagcaggaagtgaagacacgtgcattcctgccttccgtgaaggagtgcccagttcaagaggagcctgatggagccctgcctgtcgaggctgtatgcctatggggttatggaaccttgtgggcttttctagagaaaactcaacagctgtttcccataaaatgtttaaaagatcaaattagccttaatgctggattgtctgtacaagattaactatccattgtggcttatctatgcttaaagatttcttgtttatttcctcttgcagtcatgcacatgatttgggtaaactgtgagatgagaaatggttttcagagtattagatggaattcacccccgttgaagtttataaatgtgttcaggggaagcgggaggaaagagttcactgcctaatcagttttgcatgtcatgaaaattaaattcctctccaggtgcagcttcagcctcatgcaacttaaagtgataacagttatttgattttttaaaaaatattattccaaaagaaaaccattttaggtcatctcccccaactctgtttgcttactgcttaataaatataaaaataaatctgatggttacagacaggaaaaaaaaaaaaaaaaaaaaaccaggatttgaaggagctattttttttnaatgttgcaactagcaactcatcttcggaagacacagccaggggaatnaagtagaagtgaaaggtttataaatccatttgtaagcatttatcccatatattttaaattcaaggaaaattgtntttatctttgaattttgtattcaatactttatgtactatgtgactcatgcttctggataaata

SEQ ID NO: 427230 - DNA, 1157 bp, Homo sapiens
  misc_feature (1)..(1): n is a, c, g, or t
  misc_feature (972)..(972): n is a, c, g, or t
  misc_feature (1020)..(1020): n is a, c, g, or t
  misc_feature (1094)..(1094): n is a, c, g, or t
naactaacggctaggtacgaggccgggtggtgctgacttcttttgagcagttggcactacccgtcttgaggaatgccgactgcagcagtggcccagggcaaagagtgtgcgtcatcgatgagattgggaagatggagctcttcagtcagcttttcattcaagctgttcgtcagacgctgtctaccccagggactataatccttggcacaatcccagttcctaaaggaaagccactggctcttgtagaagaaatcagaaacagaaaggatgtgaaggtgtttaatgtcaccaaggaaaacagaaaccaccttctgccagatatcgtgacgtgcgtgcagagcagcaggaagtgaagacacgtgcattcctgccttccgtgaaggagtgcccagttcaagaggagcctgatggagccctgcctgtcgaggctgtatgcctatggggttatggaaccttgtgggcttttctagagaaaactcaacagctgtttcccataaaatgtttaaaagatcaaattagccttaatgctggattgtctgtacaagattaactatccattgtggcttatctatgcttaaagatttcttgtttatttcctcttgcagtcatgcacatgatttgggtaaactgtgagatgagaaatggttttcagagtattagatggaattcacccccgttgaagtttataaatgtgttcaggggaagcgggaggaaagagttcactgcctaatcagttttgcatgtcatgaaaattaaattcctctccaggtgcagcttcagcctcatgcaacttaaagtgataacagttatttgattttttaaaaaatattattccaaaagaaaaccattttaggtcatctcccccaactctgtttgcttactgcttaataaatataaaaataaatctgatggttacagacaggaaaaaaaaaaaaaaaaaaaaaccaggatttgaaggagctattttttttnaatgttgcaactagcaactcatcttcggaagacacagccaggggaatnaagtagaagtgaaaggtttataaatccatttgtaagcatttatcccatatattttaaattcaaggaaaattgtntttatctttgaattttgtattcaatactttatgtactatgtgactcatgcttctggataaata

SEQ ID NO: 427231 - DNA, 1037 bp, Homo sapiens
agcgtgtggttctcctcaccatggccaaggcagaaagtccaaaggaacacgacccgttcacttacgactaccagtccctgcagatcggaggcctcgtcatcgccaggatcctcttcatcctgggcatcctcatcgtgctgagcagaagatgccggtgcaagttcaaccagcagcagaggactggggaacctggcgacacgcggtgggcgggtcctgagtcgcgaccctggtccggacctgacctgaattgcgaccccaacctggactgctcccctgaccgcaacccctacccccgcccaccagtatggcccggcacgtgttcctaacggggcccccaggagttggaaaaacaacattgatccataaagccagtgaggttttaaaatcctctggtgtgcctgttgatggattttataccgaagaagtcagacagggagggagaagaataggattcgatgtcgtcacgttgtccggcacccgggggcctttatcgagagttgggttagagcctccacctggaaaacgtgaatgccgagttgggcagtatgtggtcgacctgacttcttttgagcagttggcactacccgtcttgaggaatgccgactgcagcagtggcccagggcaaagagtgtgcgtcatcgatgagattgggaagatggagctcttcagtcagcttttcattcaagctgttcgtcagacgctgtctaccccagggactataatccttggcacaatcccagttcctaaaggaaagccactggctcttgtagaagaaatcagaaacagaaaggatgtgaaggtgtttaatgtcaccaaggaaaacagaaaccaccttctgccagatatcgtgacgtgcgtgcagagcagcaggaagtgaagacacgtgcattcctgccttccgtgaaggagtgcccagttcaagaggagcctgatggagccctgcctgtcgaggctgtatgcctatggggttatggaaccttgtgggcttttctagagaaaactcaacagctgtttcccataaaatgtttaaaagatca

SEQ ID NO: 427232 - DNA, 1993 bp, Homo sapiens
agcgtgtggttctcctcaccatggccaaggcagaaagtccaaaggaacacgacccgttcacttacgactaccagtccctgcagatcggaggcctcgtcatcgccaggatcctcttcatcctgggcatcctcatcgtgctgagcagaagatgccggtgcaagttcaaccagcagcagaggactggggaacctggcgacacgcggtgggcgggtcctgagtcgcgaccctggtccggacctgacctgaattgcgaccccaacctggactgctcccctgaccgcaacccctacccccgcccaccagtatggcccggcacgtgttcctaacggggcccccaggagttggaaaaacaacattgatccataaagccagtgaggttttaaaatcctctggtgtgcctgttgatggattttataccgaagaagtcagacagggagggagaagaataggattcgatgtcgtcacgttgtccggcacccgggggcctttatcgagagttgggttagagcctccacctggaaaacgtgaatgccgagttgggcagtatgtggtcgacctgacttcttttgagcagttggcactacccgtcttgaggaatgccgactgcagcagtggcccagggcaaagagtgtgcgtcatcgatgagattgggaagatggagctcttcagtcagcttttcattcaagctgttcgtcagacgctgtctaccccagggactataatccttggcacaatcccagttcctaaaggaaagccactggctcttgtagaagaaatcagaaacagaaaggatgtgaaggtgtttaattcaccgtactgtgtcatagaagaccagagcaaattctccagctgtgtatcacagtccactctcacagagcctggctggaggcagaagctactgcaatcactgctgaactcagagtggaagaaaagggcccctgtggtgcccacctctgtgtcgcctcctttctacctcaggtggattccttgaatgcaaacaacaggaatggactttggctaacttaagtgaaaacagcatcaaaaagccttataggctttggagctgtcccatgaagccaaaggaaaagctgactgtcctcatttcaagtggagccacagccgcccaggattgacgcagccaggaccagtagaaatgggatcacaggattgacgcagccaggaccggtagaaatgggatcacgggactgacgcagccaggaccagtagaaatgggatcacgggattgacgcagccaggaccagtagaaatgggatcagcttctggcacttgctgcgtgagctcactcctcttggggtgcagatctcagtcactcctcttggggtacagatctcagagaagttgccagggcctggcttgcccacttgttggctgggggcaagtttcctagaccgtacagtctcctaaagacaaccagagcactcttccaagaagggtgagcaggtgccaggaaccagaattgacgaggtccgctctgcatctcctcttcagacatgtattggcacctattgtatgccaggccccctcttcagatacaaccaccctgaacctcagaaggcttccacatgcactccctgctcttaccgggaaccttggctcagccccttttccatggttcacctgtcgaaattacatccaggcttaagcacccctggaagcctttcctgcccctgaccccacacatgcccctgttcctgcctgccccccagactccttcattgtccttgttcatgcctgtcctgtcctggtctgcgagctccatgaggtcagggtccttacctgtggtgcttctctatgcgcatctctgtgcctggctcctgtttgcccttccaccccatcagcgtgtgttgagtggatggatattatatgggccaagtaggaaggcactgtgatgggagcagagatggcccttcctttaccctggggcactcgggatggtgtggtagtgaaagaaaaataaacagatcatcgggta

SEQ ID NO: 427233 - DNA, 827 bp, Homo sapiens
agcgtgtggttctcctcaccatggccaaggcagaaagtccaaaggaacacgacccgttcacttacgactaccagtccctgcagatcggaggcctcgtcatcgccaggatcctcttcatcctgggcatcctcatcgtgctgagcagaagatgccggtgcaagttcaaccagcagcagaggactggggaacctggcgacacgcggtgggcgggtcctgagtcgcgaccctggtccggacctgacctgaattgcgaccccaacctggactgctcccctgaccgcaacccctacccccgcccaccagtatggcccggcacgtgttcctaacggggcccccaggagttggaaaaacaacattgatccataaagccagtgaggttttaaaatcctctggtgtgcctgttgatggattttataccgaagaagtcagacagggagggagaagaataggattcgatgtcgtcacgttgtccggcacccgggggcctttatcgagagttgggttagagcctccacctggaaaacgtgaatgccgagttgggcagtatgtggtcgacctgacttcttttgagcagttggcactacccgtcttgaggaatgtcaccaaggaaaacagaaaccaccttctgccagatatcgtgacgtgcgtgcagagcagcaggaagtgaagacacgtgcattcctgccttccgtgaaggagtgcccagttcaagaggagcctgatggagccctgcctgtcgaggctgtatgcctatggggttatggaaccttgtgggcttttctagagaaaactcaacagctgtttcccataaaatgtttaaaagatca

SEQ ID NO: 427234 - DNA, 1151 bp, Homo sapiens
cggcgcgcaggttgattagtctttgcaaaggttaaatggaaaggaaaaggtgggaaatacaccaagagtgatttcaaggagtatgaaaaagaacaggataaaccacctaatttggttctgaaagataaagtaaagcccaaacaggatacaaaatacgatcttatattagatgagcaggccgaagactcaaaatcaagtcactcacacacaagtaaaaaacacaagaagaaaacccatcactgttctgaagagaaagaagatgaggactacatgccaatcaaaaatactaatcaggatatctatagagaaatggggtttggtcactatgaagaagaagaaagctgttgggagaaacaaaagagtgaaaagagagaccgaactcagaaccgaagtcgtagccgatctcgagagagggatggccattatagtaatagtcataaatcaaaataccaaacagatctttatgaaagagaaaggagtaaaaagagagaccgaagcagaagtccaaagaagtccaaagataaagaaaaatctaagtatagatgaaagatgaagaggcagaattgagaggctaacatatttactcttgtctaacttaagagtgccaggaaagcagatgcttagattttgtgtcaaagcttgttatttttttcatactaggattatggtctttagattaatactgattatatagagcacggaaagataaagaattgaacattttctttgtatacttttttacactaattttattgttatacataaatggtagtcttcatttttgaagtcttacattttcactctttttttaatgaagtatttcatactacaaaaatacataaacgtatatataaagggataataaatgtaaatatctgtgtactcatcagccagcttaagatacagatgttgtcgacattttagaagttccctaaggccctctccctctcaaataattatttggaattttgtgtttgtcatttgtctattatagttttacaacatacgtatgtatctgtaagtgaaatgttaattttgtatgtttctgaattttatataaatggcaaaatgtttacttctgtgactttctttcatttttattgctatatagtattatataaatatactacaacttattcattcttgatgga

SEQ ID NO: 427235 - DNA, 2121 bp, Homo sapiens
tcctcccggggtttgtagcggaggaggagcgggcgccatggcggttctactggagaccactttaggcgacgtcgtcatcgacttgtacaccgaagaacggccgcgtgcctgcttgaatttcttgaaactgtgcaaaataaaatattacaattattgccttattcacaatgtacagagggattttatcatacaaactggcgatcctacagggactggccgtggaggagagtctatctttggccaactgtatggtgatcaagcaagcttttttgaggcagaaaaagtcccaagaattaagcacaagaagaaaggcacagtgtccatggtgaataatggcagtgatcaacatggatctcagtttcttatcaccacaggagaaaatctagattatcttgatggtgtccatacggtgtttggtgaggtgacagaaggcatggacataattaagaaaattaatgagacctttgttgacaaggactttgtaccatatcaggatatcaggataaatcatacggtgattttagatgatccatttgatgaccctcctgatttattaatccctgatcgatcaccagaacctacaagggaacaattagatagtggtcgaataggagcagatgaagaaattgatgatttcaaaggaagatcagctgaggaagtagaagaaataaaggcagaaaaagaggctaaaactcaggctatacttttggagatggtgggagacctacctgatgcagatattaaacctccagaaaatgtactgtttgtgtgtaaattgaacccagtgaccacagatgaggatctggaaataatattctctagatttgggccaataagaagttgtgaagttatccgagactggaagacaggagagtccctctgttacgcttttattgaatttgaaaaggaagaagattgtgagaaagcattcttcaaaatggacaatgtgcttatagatgacagaagaatacatgtggattttagccagtcggttgcaaaggttaaatggaaaggaaaaggtgggaaatacaccaagagtgatttcaaggagtatgaaaaagaacaggataaaccacctaatttggttctgaaagataaagtaaagcccaaacaggatacaaaatacgatcttatattagatgagcaggccgaagactcaaaatcaagtcactcacacacaagtaaaaaacacaagaagaaaacccatcactgttctgaagagaaagaagatgaggactacatgccaatcaaaaatactaatcaggatatctatagagaaatggggtttggtcactatgaagaagaagaaagctgttgggagaaacaaaagagtgaaaagagagaccgaactcagaaccgaagtcgtagccgatctcgagagagggatggccattatagtaatagtcataaatcaaaataccaaacagatctttatgaaagagaaaggagtaaaaagagagaccgaagcagaagtccaaagaagtccaaagataaagaaaaatctaagtatagatgaaagatgaagaggcagaattgagaggctaacatatttactcttgtctaacttaagagtgccaggaaagcagatgcttagattttgtgtcaaagcttgttatttttttcatactaggattatggtctttagattaatactgattatatagagcacggaaagataaagaattgaacattttctttgtatacttttttacactaattttattgttatacataaatggtagtcttcatttttgaagtcttacattttcactctttttttaatgaagtatttcatactacaaaaatacataaacgtatatataaagggataataaatgtaaatatctgtgtactcatcagccagcttaagatacagatgttgtcgacattttagaagttccctaaggccctctccctctcaaataattatttggaattttgtgtttgtcatttgtctattatagttttacaacatacgtatgtatctgtaagtgaaatgttaattttgtatgtttctgaattttatataaatggcaaaatgtttacttctgtgactttctttcatttttattgctatatagtattatataaatatactacaacttattcattcttgatgga

SEQ ID NO: 427236 - DNA, 2239 bp, Homo sapiens
tcctcccggggtttgtagcggaggaggagcgggcgccatggcggttctactggagaccactttaggcgacgtcgtcatcgacttgtacaccgaagaacggccgcgtgcctgcttgaatttcttgaaactgtgcaaaataaaatattacaattattgccttattcacaatgtacagagggattttatcatacaaactggcgatcctacagggactggccgtggaggagagtctatctttggccaactgtatggtgatcaagcaagcttttttgaggcagaaaaagtcccaagaattaagcacaagaagaaaggcacagtgtccatggtgaataatggcagtgatcaacatggatctcagtttcttatcaccacaggagaaaatctagattatcttgatggtgtccatacggtgtttggtgaggtgacagaaggcatggacataattaagaaaattaatgagacctttgttgacaaggactttgtaccatatcaggatatcaggataaatcatacggtgattttagatgatccatttgatgaccctcctgatttattaatccctgatcgatcaccagaacctacaagggaacaattagatagtggtcgaataggagcagatgaagaaattgatgatttcaaaggaagatcagctgaggaagtagaagaaataaaggcagaaaaagaggctaaaactcaggctatacttttggagatggtgggagacctacctgatgcagatattaaacctccagaaaatgtactgtttgtgtgtaaattgaacccagtgaccacagatgaggatctggaaataatattctctagatttgggccaataagaagttgtgaagttatccgagactggaagacaggagagtccctctgttacgcttttattgaatttgaaaaggaagaagattgtgagaaagcattcttcaaaatggacaatgtgcttatagatgacagaagaatacatgtggattttagccagtcggttgcaaaggttaaatggaaaggaaaaggtgggaaatacaccaagagtgatttcaaggagtatgaaaaagaacaggataaaccacctaatttggttctgaaagataaagtaaagcccaaacaggatacaaaatacgatcttatattagatgagcaggccgaagactcaaaatcaagtcactcacacacaagtaaaaaacacaagaagaaaacccatcactgttctgaagagaaagaagatgaggactacatgccaatcaaaaatactaatcaggatatctatagagaaatggggtttggtcactatgaagaagaagaaagctgttgggagaaacaaaagagtgaaaagagagaccgaactcagaaccgaagtcgtagccgatctcgagagagggatggccattatagtaatagtcataaatcaaaataccaaacagatctttatgaaagagaaaggagtaaaaagagagaccgaagcagaagtccaaagaagtccaaagataaagaaaaatctaagtatagatgaaagatgaagaggcagaattgagaggctaacatatttactcttgtctaacttaagagtgccaggaaagcagatgcttagattttgtgtcaaagcttgttatttttttcatactaggattatggtctttagattaatactgattatatagagcacggaaagataaagaattgaacattttctttgtatacttttttacactaattttattgttatacataaatggtagtcttcatttttgaagtcttacattttcactctttttttaatgaagtatttcatactacaaaaatacataaacgtatatataaagggataataaatgtaaatatctgtgtactcatcagccagcttaagatacagatgttgtcgacattttagaagttccctaaggccctctccctctcaaataattatttggaattttgtgtttgtcatttgtctattatagttttacaacatacgtatgtatctgtaagtgaaatgttaattttgtatgtttctgaattttatataaatggcaaaatgtttacttctgtgactttctttcatttttattgctatatagtattatataaatatactacaacttattcattcttgatggacatttgagttttgtttatttgtttttgctgttgaaacaatgctgctgtgaacattgtatctagcagttatattgcttgatatattgataaaataatgccaaatttgtgttctgaaaaa

SEQ ID NO: 427237 - DNA, 1297 bp, Homo sapiens
gttatttcaatgatatcttcttataggattcttatgggaattttagtagtttcattgcagatcaataatgggaccacgttttgggggagtgaagggtggggagctgggaataagactatacataatcagaatttttgattttgcagattgctctagagacatgttctgatttcagttgagctatttcagttccatatttttgaagctgatccttcgtttcagccaaaatagtagatacaaatcaatgacgttgttaaacctttttctgaattattttattgctttgtaatttacaagattcttgacattagtggtagtgttcacatttaagctgttataacagccttctaatggtagacttttctaagttttattaattgaaaatgcccacaaaatgattattttactgattcacttgtaattcccccttcctttgacaggatatctatagagaaatggggtttggtcactatgaagaagaagaaagctgttgggagaaacaaaagagtgaaaagagagaccgaactcagaaccgaagtcgtagccgatctcgagagagggatggccattatagtaatagtcataaatcaaaataccaaacagatctttatgaaagagaaaggagtaaaaagagagaccgaagcagaagtccaaagaagtccaaagataaagaaaaatctaagtatagatgaaagatgaagaggcagaattgagaggctaacatatttactcttgtctaacttaagagtgccaggaaagcagatgcttagattttgtgtcaaagcttgttatttttttcatactaggattatggtctttagattaatactgattatatagagcacggaaagataaagaattgaacattttctttgtatacttttttacactaattttattgttatacataaatggtagtcttcatttttgaagtcttacattttcactctttttttaatgaagtatttcatactacaaaaatacataaacgtatatataaagggataataaatgtaaatatctgtgtactcatcagccagcttaagatacagatgttgtcgacattttagaagttccctaaggccctctccctctcaaataattatttggaattttgtgtttgtcatttgtctattatagttttacaacatacgtatgtatctgtaagtgaaatgttaattttgtatgtttctgaattttatataaatggcaaaatgtttacttctgtgactttctttcatttttattgctatatagtattatataaatatactacaacttattcattcttgatgga

SEQ ID NO: 427238 - DNA, 634 bp, Homo sapiens
ccactgcactccagctcgggcaacagggcaagactccgtctcaaaaaaaataataagaagaatttaaacatgataactcgatatgcattgctgaatttcctcttgattgaactaaaagaagagacatacaaatgtacctgttatcttatatagcttttctgggcattggaatttataataattttttctagttaaagatgtccctcattttctaaatttaaattttttaaattattgacaaatacgtttattttttcctcctaatttttttgcctactagtctttattttaagattgtttaggattaggattctttccatttctcctgactatataatgaaagaaaatgttagttttgttttagaaatgtactatattcttttgagatgctttttgctttagttacttttagccttatgacctcctttgtttaccagatcttaagttttgatgtcttaccagtattatttatcacatttatccttaactaactactgcagtacaaaatacgatcttatattagatgagcaggccgaagactcaaaatcaagtcactcacacacaagtaaaaaacacaagaagaaaacccatcactgttctgaagagaaagaagatgaggactacatgccaatca

SEQ ID NO: 427239 - DNA, 2069 bp, Homo sapiens
tcctcccggggtttgtagcggaggaggagcgggcgccatggcggttctactggagaccactttaggcgacgtcgtcatcgacttgtacaccgaagaacggccgcgtgcctgcttgaatttcttgaaactgtgcaaaataaaatattacaattattgccttattcacaatgtacagagggattttatcatacaaactggcgatcctacagggactggccgtggaggagagtctatctttggccaactgtatggtgatcaagcaagcttttttgaggcagaaaaagtcccaagaattaagcacaagaagaaaggcacagtgtccatggtgaataatggcagtgatcaacatggatctcagtttcttatcaccacaggagaaaatctagattatcttgatggtgtccatacggtgtttggtgaggtgacagaaggcatggacataattaagaaaattaatgagacctttgttgacaaggactttgtaccatatcaggatatcaggataaatcatacggtgattttagatgatccatttgatgaccctcctgatttattaatccctgatcgatcaccagaacctacaagggaacaattagatagtggtcgaataggagcagatgaagaaattgatgatttcaaaggaagatcagctgaggaagtagaagaaataaaggcagaaaaagaggctaaaactcaggctatacttttggagatggtgggagacctacctgatgcagatattaaacctccagaaaatgtactgtttgtgtgtaaattgaacccagtgaccacagatgaggatctggaaataatattctctagatttgggccaataagaagttgtgaagttatccgagactggaagacaggagagtccctctgttacgcttttattgaatttgaaaaggaagaagattgtgagaaagcattcttcaaaatggacaatgtgcttatagatgacagaagaatacatgtggattttagccagtcggttgcaaaggttaaatggaaaggaaaaggtgggaaatacaccaagagtgatttcaaggagtatgaaaaagaacaggataaaccacctaatttggttctgaaagataaagtaaagcccaaacaggatacaaaatacgatcttatattagatgagcaggccgaagactcaaaatcaagtcactcacacacaagtaaaaaacacaagaagaaaacccatcactgttctgaagagaaagaagatgaggactacatgccaatcaaaaatactaatcaggatatctatagagaaatggggtttggtcactatgaagaagaagaaagctgttgggagaaacaaaagaggatggccattatagtaatagtcataaatcaaaataccaaacagatctttatgaaagagaaaggagtaaaaagagagaccgaagcagaagtccaaagaagtccaaagataaagaaaaatctaagtatagatgaaagatgaagaggcagaattgagaggctaacatatttactcttgtctaacttaagagtgccaggaaagcagatgcttagattttgtgtcaaagcttgttatttttttcatactaggattatggtctttagattaatactgattatatagagcacggaaagataaagaattgaacattttctttgtatacttttttacactaattttattgttatacataaatggtagtcttcatttttgaagtcttacattttcactctttttttaatgaagtatttcatactacaaaaatacataaacgtatatataaagggataataaatgtaaatatctgtgtactcatcagccagcttaagatacagatgttgtcgacattttagaagttccctaaggccctctccctctcaaataattatttggaattttgtgtttgtcatttgtctattatagttttacaacatacgtatgtatctgtaagtgaaatgttaattttgtatgtttctgaattttatataaatggcaaaatgtttacttctgtgactttctttcatttttattgctatatagtattatataaatatactacaacttattcattcttgatgga

SEQ ID NO: 427240 - DNA, 1272 bp, Homo sapiens
gaaagcattcttcaaaatccacatgtattcttctgtcatctataagcacattgtccattttgaagaatgctttctcacattcttcaaaatggacaatgtgcttatagatgacagaagaatacatgtggattttagccagtcggttgcaaaggttaaatggaaaggaaaaggtgggaaatacaccaagagtgatttcaaggagtatgaaaaagaacaggataaaccacctaatttggttctgaaagataaagtaaagcccaaacaggatacaaaatacgatcttatattagatgagcaggccgaagactcaaaatcaagtcactcacacacaagtaaaaaacacaagaagaaaacccatcactgttctgaagagaaagaagatgaggactacatgccaatcaaaaatactaatcaggatatctatagagaaatggggtttggtcactatgaagaagaagaaagctgttgggagaaacaaaagagtgaaaagagagaccgaactcagaaccgaagtcgtagccgatctcgagagagggatggccattatagtaatagtcataaatcaaaataccaaacagatctttatgaaagagaaaggagtaaaaagagagaccgaagcagaagtccaaagaagtccaaagataaagaaaaatctaagtatagatgaaagatgaagaggcagaattgagaggctaacatatttactcttgtctaacttaagagtgccaggaaagcagatgcttagattttgtgtcaaagcttgttatttttttcatactaggattatggtctttagattaatactgattatatagagcacggaaagataaagaattgaacattttctttgtatacttttttacactaattttattgttatacataaatggtagtcttcatttttgaagtcttacattttcactctttttttaatgaagtatttcatactacaaaaatacataaacgtatatataaagggataataaatgtaaatatctgtgtactcatcagccagcttaagatacagatgttgtcgacattttagaagttccctaaggccctctccctctcaaataattatttggaattttgtgtttgtcatttgtctattatagttttacaacatacgtatgtatctgtaagtgaaatgttaattttgtatgtttctgaattttatataaatggcaaaatgtttacttctgtgactttctttcatttttattgctatatagtattatataaatatactacaacttattcattcttgatgga

SEQ ID NO: 427241 - DNA, 1846 bp, Homo sapiens
ttgggcgccacaccttgcgcgccccggggcccaaggagacgaccctgaagaggagcctggctacttttgcctcagacgagtccggagcgccgggttaaccggtctgaagtcccaggggctttctgggactgctcagccaccggcagcttccggcaccaggggacgccggacgccgtccggacattcggcgcgcttgccacgatcttggacgggtctcgggcctcgacctttgaattccccgctccggctccaagatgtcagcaacgctgatcctggagcccccaggccgctgctgctggaacgagccggtgcgcattgccgtgcgcggcctggccccggagcagcgggttacgctgcgcgcgtccctgcgcgacgagaagggcgcgctcttccgggcccacgcgcgctactgcgccgacgcccgcggcgagctggacctggagcgcgcacccgcgctgggcggcagcttcgcgggactcgagcccatggggctgctctgggccctggaacccgagaagcctttttggcgcttcctgaagcgggacgtacagattccttttgtcgtggagttggaggtgctggacggccacgaccccgagcctggacggctgctgtgccaggcgcagcacgagcgccacttcctcccgccaggggtgcggcgccagtcggtgcgagcgggccgggtgcgcgccacgctcttcctgccgccaggacctggacccttcccagggatcattgacatctttggtattggagggggcctcttggaatatcgagccagcctccttgctggccatggctttgccacgttggctctagcttattataactttgaagatctccccaataacatggacaacatatccctggagtacttcgaagaagccgtatgctacatgcttcaacatccccaggtaaaaggcccaggcattgggcttttgggcatttctctaggagctgatatttgtctctcaatggcctcattcttgaagaatgtctcagccacagtttccatcaatggatctgggatcagtgggaacacagccatcaactataagcacagtagcattccaccattgggctatgacctgaggagaatcaaggtagctttctcaggcctcgtggacatcgtggatataaggaatgctctcgtaggagggtacaagaaccccagcatgattccaatagagaaggcccaggggcccatcctgctcattgttggtcaggatgaccataactggagaagtgagttgtatgcccaaacagtctctgaacggttacaggcccatggaaaggaaaaaccccagatcatctgttaccctgggactgggcattacatcgagcctccttacttccccctgtgcccagcttcccttcacagattactgaacaaacatgttatatggggtggggagcccagggctcattctaaggcccaggaagatgcctggaagcaaattctagccttcttctgcaaacacctgggaggtacccagaaaacagctgtccctaaattgtaatgcatttgtctgttgttgacatgagagattcaagatcagattctagtgttcagtaaccctatgtgaatcagatgtctcctggataacattaaagccatgtctttgtcattaaaagaaaaaacgttatagactaaaaaaagaaaaaaaaaaagggggggggaaaaaatttcgcgggggcgaatttggtcacgcgtttttgacagagggccctaagggggtttaaaacgggggggggttaaagtggagaaacgtctgggtttggggagacctttggtggtgggacccacaaatcgcgggaattagtgttgaacttggggttgtaaagg

SEQ ID NO: 427242 - DNA, 7223 bp, Homo sapiens
tagccggacggcgcggtggtcgggacagactggccgttgctgtggagacgcctggagagttgtggactggggcaacctttgccagtgatgagaagtgatgctcgtggcagtgctgaatctctctgaatatgattcgaattgcagccttaaatgccagctccaccattgaggatgatcatgaaggaagctttaaaagtcacaaaacccagacaaaggaggctcaggaagcagaggcttttgcattgtaccacaaggcccttgatctgcagaaacatgaccggtttgaggagtctgccaaagcctaccatgagctcttggaggcgagcctgctgcgggaggcagtttcatccggtgatgagaaagaggggttgaaacaccctgggctgatactgaaatattccacttataagaacttggcccagctggcagcccagcgggaggatctggagacagccatggagttctacttagaggcagtgatgctggactccacagatgtcaacctctggtataagattggacatgtggccctgaggctcatccggatccccctggctcgccatgcttttgaggaagggctgcggtgcaatcctgaccactggccctgtttggataacctaatcactgtcctgtacaccctcagtgattacacaacatgtctgtacttcatctgcaaagctttggagaaggattgccggtacagcaaagggctggtcctcaaggagaagatttttgaggagcagccttgtctccggaaggactctctcagaatgttcctcaaatgtgacatgtcgattcacgatgtttcggtgagtgcagctgagacacaggcgattgtagatgaggccttggggctgcgaaaaaagaggcaagcgctgattgtgcgggagaaggagccggacctgaaacttgtgcagcccattcctttcttcacctggaagtgcctcggagagagcttgctggccatgtacaatcatctcaccacctgtgagcccccacgtcccagccttggcaaaaggattgatttgtcggactaccaggaccccagccagcctcttgagtcctccatggtggtgacgccagttaacgtgatccagccaagcactgtcagcaccaacccagctgtggctgtcgccgagcctgtggtctcctacacctctgtggctacaaccagcttcccactgcacagtcctggtctgttggagacaggcgctcctgtgggtgatatttctgggggagataaatccaagaaaggggtaaaacggaagaagatttcagaagagagtggagaaacagcaaagcggcggtctgcccgtgtccgaaacaccaagtgcaaaaaagaagagaaagtagacttccaggagcttctgatgaagttcttgccgtccaggttaagaaagctggaccctgaggaggaagatgattcctttaataactatgaagtccagtcagaagccaaactggaaagcttcccaagcattgggcctcaaaggctgtcatttgactcagccacattcatggaatctgaaaagcaggacgtgcatgagttcctgctggagaacctaaccaacgggggcatcctggagctgatgatgcgctacctgaaagccatgggccacaagttcttggtaaggtggcctccaggcttggcggaggtcgtgctcagcgtctaccacagctggaggaggcacagcaccagcctgcccaacccgctgctgagggactgcagcaacaagcacatcaaggacatgatgctgatgtctctctcctgcatggaactccagctggaccagtggctgctgaccaaaggcagaagctctgcagtgtctcctcggaactgccctgctggtatggtgaatggcagatttggacctgacttcccagggacccactgcctgggtgacctcctacagctgtcatttgcctcgtcccagcgcgacctgttcgaggatggttggctggagtttgtggtccgtgtttactggctgaaggctcgcttcctggcgctgcagggagacatggagcaggccctggagaactatgacatctgcacagaaatgctccagagttccaccgccatccaggtggaggcaggggctgaacgaagagacattgtcatccggctgcccaacctccataatgactctgtggtttccctggaggagattgataagaacctgaagtcgctggagcggtgccagtccctggaggagattcagcggctgtatgaagcaggcgactacaaggctgttgtgcatctgctccgccccactttgtgcaccagtgggtttgaccgggccaaacacctggagtttatgacttccattcctgagaggccagcccagctgcttcttctgcaggactccttgctccggctgaaggactatcggcagtgttttgagtgttccgatgtggctctgaacgaggctgtccagcagatggtgaactcaggtgaggctgccgccaaggaggagtgggtggccacagtgacccaactgctgatgggcatcgagcaggccctctctgcggacagcagtggtagcatcctgaaggtatcatcctccaccactggccttgtgcggctcaccaacaacctcatccaggtcattgactgcagcatggctgtgcaggaggaggccaaggagccccacgtctcttcagtgctaccctggatcattctacaccggatcatctggcaggaggaagacaccttccattctctgtgccaccagcagcagctccaaaacccagcggaggaagggatgtcagagacgcccatgctcccatcctccctcatgctgctgaacacagcccacgagtatttgggcagaaggtcctggtgctgcaattcagatggggctctgctgcgattctatgtgcgagtactccagaaggaactggctgcatccacctctgaagacacgcacccttacaaggaggagctggagacagccttggagcagtgcttctactgcctgtacagcttccccagcaagaagagtaaggccaggtacctggaggaacactcggcccagcaggtggatcttatatgggaggatgcactgttcatgtttgagtattttaagcccaagacccttcctgaatttgacagctataagaccagcaccgtgtctgctgacttggccaacctactgaagagaattgccaccattgtgcctcgcacagagaggccagcccttagcctggacaaagtctctgcctacattgagggaacttcaactgaggtaccctgcctcccagagggggctgacccctcccctccagtggtgaacgagctttactacctcctggctgattatcatttcaaaaacaaggagcagtccaaggccatcaagttctacatgcatgacatctgcatctgccccaataggtttgattcctgggcaggcatggctctggcccgggccagccgcattcaggacaagctgaactccaatgagctgaagagtgatgggcccatttggaagcatgccacgcccgtcttgaactgcttccgtcgggccctggagattgacagctccaacttgtccctatggattgagtatggcaccatgtcctatgccttgcactcattcgcctcacgtcaattgaagcagtggagaggcgagctgccccctgagctcgtgcagcagatggagggccggcgcgacagcatgctagagacagccaagcactgtttcacatcagcagcccgctgcgagggtgatggtgacgaggaggagtggctcatccactacatgctgggcaaggtggctgagaagcagcagcagccacccaccgtttacttgctgcactacaggcaggctggccactacctgcacgaggaggctgcccgctaccccaagaagatccactaccacaacccacctgagctggccatggaggccctggaggtgtactttcggctccatgcttccatcctgaagctcctggggaagcccgattctggggttggtgcagaggtcctggtcaactttatgaaggaggctgcagaaggaccctttgccaggggcgaggagaagaacacacccaaagcttcagaaaaggagaaggcctgcctggtggacgaggactcccactcttcagctgggacactgccgggccccggagcctccctcccctcctcctctggcccaggtctgacatccccaccttacacagccactccgattgaccacgattacgtcaaatgtaaaaaaccccaccagcaggcaacgccggacgaccgaagccaggacagcacagccgtagcactctcagactctagctcaacgcaggacttctttaatgagcccaccagcttactggaaggctccaggaaatcctacacagagaagaggctgcccattctcagttcccaagcaggagcgacgggtaaagatcttcagggggccacagaagaaagaggaaaaaacgaggagtcattggagagtacagaaggcttccgggctgcagagcaaggtgtccagaagcctgctgcagaaaccccagcctctgcttgcatccctggcaagccctcagcatccacacccaccctgtgggatgggaagaagagaggggacctcccaggggagccagtggccttcccccaggggctgccggctggtgctgaggagcagcggcagtttctcacagagcagtgcatcgcctccttccgcctgtgcctgagccgcttcccccagcactataagagtctctaccgtctggccttcctctacacctacagcaagacccaccggaacctccagtgggcccgcgacgtgttgctaggcagcagtatcccgtggcaacaactgcagcacatgccggcacaggggctcttctgcgagaggaacaagaccaatttcttcaacggcatctggcggatccccgtggacgagattgaccggccgggcagctttgcctggcacatgaaccgctccatcgtgctgctgctcaaggtgctggcccagctgcgggaccacagcaccctgctgaaggtgtcctccatgcttcagcggaccccagaccagggcaagaagtatctgcgagatgctgaccgccaggtcctggcgcagcgggccttcatcctcactgtgaaggtgctcgaagacacgctgagcgagctcgcagaggggtcagaacgcccagggcccaaggtctgtggcctccccggagccaggatgaccaccgatgtctcacacaaggccagtcctgaggatggccaggagggcctcccccagccgaagaagccccctctggctgatggctcagggccagggcccgagccaggaggcaaagtgggcctcctcaaccaccggcctgtggccatggatgcaggagacagtgcagaccaaagcggggagcggaaggataaagagagcccacgggcagggcccactgagcccatggacacgagtgaggccactgtttgccactcagacttggagcggacaccacccctgctgccaggtcgccccgcaagggaccggggccccgagagccggcccactgagctgtccctggaggagctgagcatcagtgcccggcagcagcccaccccgctcaccccagcccagccagcccccgcccccgcccccgccaccaccacagggaccagggcagggggccacccggaggagccgctctcccggctcagccgcaagaggaagctcctggaggacacagagtcaggcaagacacttctgttggatgcctaccgtgtgtggcagcagggccagaagggtgtggcctatgacctgggccgtgtggagaggatcatgtcggagacctacatgctcatcaagcaggtggatgaggaggctgcgctggagcaggctgtgaagttctgccaggtccatcttggggctgccgcccagagacaggcctcgggggacacccccaccactccaaagcaccccaaagacagccgagagaacttctttcctgtgacagtggtgcccacagcccctgaccctgtgccagctgactctgtccagcggcccagtgatgctcacaccaagcctcgccctgcactagctgccgccacaactattatcacctgccctccgtcagcatcagcttccaccctggaccagtccaaggaccctgggcctccccggccacacaggcctgaagctacccccagcatggcctctctgggcccagagggagaagagctggcgagagtggcagagggcaccagcttcccgcctcaggagccacggcacagtccgcaggtgaagatggcccccacaagttccccggcagagccacactgctggccggcagaggctgccctgggcacaggcgctgagcccacctgcagccaggaggggaaactgaggcctgagccgagaagggatggggaggctcaggaggctgcgagtgagactcagcccctgagctctcccccaacagctgccagctccaaggcccccagcagtgggagtgcccagccaccagagggtcacccaggcaagcctgagcccagccgggctaagtcccgccccctgcccaacatgccaaagctggtcatcccctccgccgccaccaagttcccccctgagatcaccgtcacgccacccaccccaaccctgctctcccccaaaggcagcatctcggaggagaccaagcagaagctgaagtcagccatcctttctgcccagtctgctgccaacgtgaggaaggagagcctatgccagccagccctggaggtcctggagacatccagccaggagtcctcgctggagagcgagacagacgaggacgacgactacatggacatttgaggggccactgcagccccaccgccacgccccaggggaccagccaggcctggaatgccccctgggcaggaccctgggcaggaccagaggcccacatggatgccactccccacacagcccccaggcctgcccagcccacctcctcatggcatcctccctgtacccaggtcaggctgtccacaccacatgggagcccagaggaggaggggcccgccttagccatgtgaaggtggattggtcgccatctgcacgccaggcggcatccttttctatgaagtgttgactttgtaaatctgcccacacccagctggccatatccacccctcgacgccgggatgagccggctctgcctgtgtcacagtggaggggtcctttagggccaggctcacccctcaccctttttttggttgcttttctaataaagatggaacagtt

SEQ ID NO: 427243 - DNA, 7353 bp, Homo sapiens
gggtgaggctcagcagagcccggggcacaggccggaggggctgcaggcgcgaggctgggttacgtgaggaagctgggggtttcgcgggcagctttagagccccagtcagggaaaccgaggccgggcttcctggctgcctcgcgagcctcttcatggctctcgccgccgccctgaggtgcctagaatgggttccggcctccggggaggttcccagtaaccgcaggagccaccattgatttggcgtctgctgggtgcaaagcccagcgcgctaaccctttactcgcgacctttcgcttcaccttcacagcagccctgcgaggagagttgtggactggggcaacctttgccagtgatgagaagtgatgctcgtggcagtgctgaatctctctgaatatgattcgaattgcagccttaaatgccagctccaccattgaggatgatcatgaaggaagctttaaaagtcacaaaacccagacaaaggaggctcaggaagcagaggcttttgcattgtaccacaaggcccttgatctgcagaaacatgaccggtttgaggagtctgccaaagcctaccatgagctcttggaggcgagcctgctgcgggaggcagtgatgctggactccacagatgtcaacctctggtataagattggacatgtggccctgaggctcatccggatccccctggctcgccatgcttttgaggaagggctgcggtgcaatcctgaccactggccctgtttggataacctaatcactgtcctgtacaccctcagtgattacacaacatgtctgtacttcatctgcaaagctttggagaaggattgccggtacagcaaagggctggtcctcaaggagaagatttttgaggagcagccttgtctccggaaggactctctcagaatgttcctcaaatgtgacatgtcgattcacgatgtttcggtgagtgcagctgagacacaggcgattgtagatgaggccttggggctgcgaaaaaagaggcaagcgctgattgtgcgggagaaggagccggacctgaaacttgtgcagcccattcctttcttcacctggaagtgcctcggagagagcttgctggccatgtacaatcatctcaccacctgtgagcccccacgtcccagccttggcaaaaggattgatttgtcggactaccaggaccccagccagcctcttgagtcctccatggtggtgacgccagttaacgtgatccagccaagcactgtcagcaccaacccagctgtggctgtcgccgagcctgtggtctcctacacctctgtggctacaaccagcttcccactgcacagtcctggtctgttggagacaggcgctcctgtgggtgatatttctgggggagataaatccaagaaaggggtaaaacggaagaagatttcagaagagagtggagaaacagcaaagcggcggtctgcccgtgtccgaaacaccaagtgcaaaaaagaagagaaagtagacttccaggagcttctgatgaagttcttgccgtccaggttaagaaagctggaccctgaggaggaagatgattcctttaataactatgaagtccagtcagaagccaaactggaaagcttcccaagcattgggcctcaaaggctgtcatttgactcagccacattcatggaatctgaaaagcaggacgtgcatgagttcctgctggagaacctaaccaacgggggcatcctggagctgatgatgcgctacctgaaagccatgggccacaagttcttggtaaggtggcctccaggcttggcggaggtcgtgctcagcgtctaccacagctggaggaggcacagcaccagcctgcccaacccgctgctgagggactgcagcaacaagcacatcaaggacatgatgctgatgtctctctcctgcatggaactccagctggaccagtggctgctgaccaaaggcagaagctctgcagtgtctcctcggaactgccctgctggtatggtgaatggcagatttggacctgacttcccagggacccactgcctgggtgacctcctacagctgtcatttgcctcgtcccagcgcgacctgttcgaggatggttggctggagtttgtggtccgtgtttactggctgaaggctcgcttcctggcgctgcagggagacatggagcaggccctggagaactatgacatctgcacagaaatgctccagagttccaccgccatccaggtggaggcaggggctgaacgaagagacattgtcatccggctgcccaacctccataatgactctgtggtttccctggaggagattgataagaacctgaagtcgctggagcggtgccagtccctggaggagattcagcggctgtatgaagcaggcgactacaaggctgttgtgcatctgctccgccccactttgtgcaccagtgggtttgaccgggccaaacacctggagtttatgacttccattcctgagaggccagcccagctgcttcttctgcaggactccttgctccggctgaaggactatcggcagtgttttgagtgttccgatgtggctctgaacgaggctgtccagcagatggtgaactcaggtgaggctgccgccaaggaggagtgggtggccacagtgacccaactgctgatgggcatcgagcaggccctctctgcggacagcagtggtagcatcctgaaggtatcatcctccaccactggccttgtgcggctcaccaacaacctcatccaggtcattgactgcagcatggctgtgcaggaggaggccaaggagccccacgtctcttcagtgctaccctggatcattctacaccggatcatctggcaggaggaagacaccttccattctctgtgccaccagcagcagctccaaaacccagcggaggaagggatgtcagagacgcccatgctcccatcctccctcatgctgctgaacacagcccacgagtatttgggcagaaggtcctggtgctgcaattcagatggggctctgctgcgattctatgtgcgagtactccagaaggaactggctgcatccacctctgaagacacgcacccttacaaggaggagctggagacagccttggagcagtgcttctactgcctgtacagcttccccagcaagaagagtaaggccaggtacctggaggaacactcggcccagcaggtggatcttatatgggaggatgcactgttcatgtttgagtattttaagcccaagacccttcctgaatttgacagctataagaccagcaccgtgtctgctgacttggccaacctactgaagagaattgccaccattgtgcctcgcacagagaggccagcccttagcctggacaaagtctctgcctacattgagggaacttcaactgaggtaccctgcctcccagagggggctgacccctcccctccagtggtgaacgagctttactacctcctggctgattatcatttcaaaaacaaggagcagtccaaggccatcaagttctacatgcatgacatctgcatctgccccaataggtttgattcctgggcaggcatggctctggcccgggccagccgcattcaggacaagctgaactccaatgagctgaagagtgatgggcccatttggaagcatgccacgcccgtcttgaactgcttccgtcgggccctggagattgacagctccaacttgtccctatggattgagtatggcaccatgtcctatgccttgcactcattcgcctcacgtcaattgaagcagtggagaggcgagctgccccctgagctcgtgcagcagatggagggccggcgcgacagcatgctagagacagccaagcactgtttcacatcagcagcccgctgcgagggtgatggtgacgaggaggagtggctcatccactacatgctgggcaaggtggctgagaagcagcagcagccacccaccgtttacttgctgcactacaggcaggctggccactacctgcacgaggaggctgcccgctaccccaagaagatccactaccacaacccacctgagctggccatggaggccctggaggtgtactttcggctccatgcttccatcctgaagctcctggggaagcccgattctggggttggtgcagaggtcctggtcaactttatgaaggaggctgcagaaggaccctttgccaggggcgaggagaagaacacacccaaagcttcagaaaaggagaaggcctgcctggtggacgaggactcccactcttcagctgggacactgccgggccccggagcctccctcccctcctcctctggcccaggtctgacatccccaccttacacagccactccgattgaccacgattacgtcaaatgtaaaaaaccccaccagcaggcaacgccggacgaccgaagccaggacagcacagccgtagcactctcagactctagctcaacgcaggacttctttaatgagcccaccagcttactggaaggctccaggaaatcctacacagagaagaggctgcccattctcagttcccaagcaggagcgacgggtaaagatcttcagggggccacagaagaaagaggaaaaaacgaggagtcattggagagtacagaaggcttccgggctgcagagcaaggtgtccagaagcctgctgcagaaaccccagcctctgcttgcatccctggcaagccctcagcatccacacccaccctgtgggatgggaagaagagaggggacctcccaggggagccagtggccttcccccaggggctgccggctggtgctgaggagcagcggcagtttctcacagagcagtgcatcgcctccttccgcctgtgcctgagccgcttcccccagcactataagagtctctaccgtctggccttcctctacacctacagcaagacccaccggaacctccagtgggcccgcgacgtgttgctaggcagcagtatcccgtggcaacaactgcagcacatgccggcacaggggctcttctgcgagaggaacaagaccaatttcttcaacggcatctggcggatccccgtggacgagattgaccggccgggcagctttgcctggcacatgaaccgctccatcgtgctgctgctcaaggtgctggcccagctgcgggaccacagcaccctgctgaaggtgtcctccatgcttcagcggaccccagaccagggcaagaagtatctgcgagatgctgaccgccaggtcctggcgcagcgggccttcatcctcactgtgaaggtgctcgaagacacgctgagcgagctcgcagaggggtcagaacgcccagggcccaaggtctgtggcctccccggagccaggatgaccaccgatgtctcacacaaggccagtcctgaggatggccaggagggcctcccccagccgaagaagccccctctggctgatggctcagggccagggcccgagccaggaggcaaagtgggcctcctcaaccaccggcctgtggccatggatgcaggagacagtgcagaccaaagcggggagcggaaggataaagagagcccacgggcagggcccactgagcccatggacacgagtgaggccactgtttgccactcagacttggagcggacaccacccctgctgccaggtcgccccgcaagggaccggggccccgagagccggcccactgagctgtccctggaggagctgagcatcagtgcccggcagcagcccaccccgctcaccccagcccagccagcccccgcccccgcccccgccaccaccacagggaccagggcagggggccacccggaggagccgctctcccggctcagccgcaagaggaagctcctggaggacacagagtcaggcaagacacttctgttggatgcctaccgtgtgtggcagcagggccagaagggtgtggcctatgacctgggccgtgtggagaggatcatgtcggagacctacatgctcatcaagcaggtggatgaggaggctgcgctggagcaggctgtgaagttctgccaggtccatcttggggctgccgcccagagacaggcctcgggggacacccccaccactccaaagcaccccaaagacagccgagagaacttctttcctgtgacagtggtgcccacagcccctgaccctgtgccagctgactctgtccagcggcccagtgatgctcacaccaagcctcgccctgcactagctgccgccacaactattatcacctgccctccgtcagcatcagcttccaccctggaccagtccaaggaccctgggcctccccggccacacaggcctgaagctacccccagcatggcctctctgggcccagagggagaagagctggcgagagtggcagagggcaccagcttcccgcctcaggagccacggcacagtccgcaggtgaagatggcccccacaagttccccggcagagccacactgctggccggcagaggctgccctgggcacaggcgctgagcccacctgcagccaggaggggaaactgaggcctgagccgagaagggatggggaggctcaggaggctgcgagtgagactcagcccctgagctctcccccaacagctgccagctccaaggcccccagcagtgggagtgcccagccaccagagggtcacccaggcaagcctgagcccagccgggctaagtcccgccccctgcccaacatgccaaagctggtcatcccctccgccgccaccaagttcccccctgagatcaccgtcacgccacccaccccaaccctgctctcccccaaaggcagcatctcggaggagaccaagcagaagctgaagtcagccatcctttctgcccagtctgctgccaacgtgaggaaggagagcctatgccagccagccctggaggtcctggagacatccagccaggagtcctcgctggagagcgagacagacgaggacgacgactacatggacatttgaggggccactgcagccccaccgccacgccccaggggaccagccaggcctggaatgccccctgggcaggaccctgggcaggaccagaggcccacatggatgccactccccacacagcccccaggcctgcccagcccacctcctcatggcatcctccctgtacccaggtcaggctgtccacaccacatgggagcccagaggaggaggggcccgccttagccatgtgaaggtggattggtcgccatctgcacgccaggcggcatccttttctatgaagtgttgactttgtaaatctgcccacacccagctggccatatccacccctcgacgccgggatgagccggctctgcctgtgtcacagtggaggggtcctttagggccaggctcacccctcaccctttttttggttgcttttctaataaagatggaacagtt

SEQ ID NO: 427244 - DNA, 7488 bp, Homo sapiens
gggtgaggctcagcagagcccggggcacaggccggaggggctgcaggcgcgaggctgggttacgtgaggaagctgggggtttcgcgggcagctttagagccccagtcagggaaaccgaggccgggcttcctggctgcctcgcgagcctcttcatggctctcgccgccgccctgaggtgcctagaatgggttccggcctccggggaggttcccagtaaccgcaggagccaccattgatttggcgtctgctgggtgcaaagcccagcgcgctaaccctttactcgcgacctttcgcttcaccttcacagcagccctgcgaggagagttgtggactggggcaacctttgccagtgatgagaagtgatgctcgtggcagtgctgaatctctctgaatatgattcgaattgcagccttaaatgccagctccaccattgaggatgatcatgaaggaagctttaaaagtcacaaaacccagacaaaggaggctcaggaagcagaggcttttgcattgtaccacaaggcccttgatctgcagaaacatgaccggtttgaggagtctgccaaagcctaccatgagctcttggaggcgagcctgctgcgggaggcagtttcatccggtgatgagaaagaggggttgaaacaccctgggctgatactgaaatattccacttataagaacttggcccagctggcagcccagcgggaggatctggagacagccatggagttctacttagaggcagtgatgctggactccacagatgtcaacctctggtataagattggacatgtggccctgaggctcatccggatccccctggctcgccatgcttttgaggaagggctgcggtgcaatcctgaccactggccctgtttggataacctaatcactgtcctgtacaccctcagtgattacacaacatgtctgtacttcatctgcaaagctttggagaaggattgccggtacagcaaagggctggtcctcaaggagaagatttttgaggagcagccttgtctccggaaggactctctcagaatgttcctcaaatgtgacatgtcgattcacgatgtttcggtgagtgcagctgagacacaggcgattgtagatgaggccttggggctgcgaaaaaagaggcaagcgctgattgtgcgggagaaggagccggacctgaaacttgtgcagcccattcctttcttcacctggaagtgcctcggagagagcttgctggccatgtacaatcatctcaccacctgtgagcccccacgtcccagccttggcaaaaggattgatttgtcggactaccaggaccccagccagcctcttgagtcctccatggtggtgacgccagttaacgtgatccagccaagcactgtcagcaccaacccagctgtggctgtcgccgagcctgtggtctcctacacctctgtggctacaaccagcttcccactgcacagtcctggtctgttggagacaggcgctcctgtgggtgatatttctgggggagataaatccaagaaaggggtaaaacggaagaagatttcagaagagagtggagaaacagcaaagcggcggtctgcccgtgtccgaaacaccaagtgcaaaaaagaagagaaagtagacttccaggagcttctgatgaagttcttgccgtccaggttaagaaagctggaccctgaggaggaagatgattcctttaataactatgaagtccagtcagaagccaaactggaaagcttcccaagcattgggcctcaaaggctgtcatttgactcagccacattcatggaatctgaaaagcaggacgtgcatgagttcctgctggagaacctaaccaacgggggcatcctggagctgatgatgcgctacctgaaagccatgggccacaagttcttggtaaggtggcctccaggcttggcggaggtcgtgctcagcgtctaccacagctggaggaggcacagcaccagcctgcccaacccgctgctgagggactgcagcaacaagcacatcaaggacatgatgctgatgtctctctcctgcatggaactccagctggaccagtggctgctgaccaaaggcagaagctctgcagtgtctcctcggaactgccctgctggtatggtgaatggcagatttggacctgacttcccagggacccactgcctgggtgacctcctacagctgtcatttgcctcgtcccagcgcgacctgttcgaggatggttggctggagtttgtggtccgtgtttactggctgaaggctcgcttcctggcgctgcagggagacatggagcaggccctggagaactatgacatctgcacagaaatgctccagagttccaccgccatccaggtggaggcaggggctgaacgaagagacattgtcatccggctgcccaacctccataatgactctgtggtttccctggaggagattgataagaacctgaagtcgctggagcggtgccagtccctggaggagattcagcggctgtatgaagcaggcgactacaaggctgttgtgcatctgctccgccccactttgtgcaccagtgggtttgaccgggccaaacacctggagtttatgacttccattcctgagaggccagcccagctgcttcttctgcaggactccttgctccggctgaaggactatcggcagtgttttgagtgttccgatgtggctctgaacgaggctgtccagcagatggtgaactcaggtgaggctgccgccaaggaggagtgggtggccacagtgacccaactgctgatgggcatcgagcaggccctctctgcggacagcagtggtagcatcctgaaggtatcatcctccaccactggccttgtgcggctcaccaacaacctcatccaggtcattgactgcagcatggctgtgcaggaggaggccaaggagccccacgtctcttcagtgctaccctggatcattctacaccggatcatctggcaggaggaagacaccttccattctctgtgccaccagcagcagctccaaaacccagcggaggaagggatgtcagagacgcccatgctcccatcctccctcatgctgctgaacacagcccacgagtatttgggcagaaggtcctggtgctgcaattcagatggggctctgctgcgattctatgtgcgagtactccagaaggaactggctgcatccacctctgaagacacgcacccttacaaggaggagctggagacagccttggagcagtgcttctactgcctgtacagcttccccagcaagaagagtaaggccaggtacctggaggaacactcggcccagcaggtggatcttatatgggaggatgcactgttcatgtttgagtattttaagcccaagacccttcctgaatttgacagctataagaccagcaccgtgtctgctgacttggccaacctactgaagagaattgccaccattgtgcctcgcacagagaggccagcccttagcctggacaaagtctctgcctacattgagggaacttcaactgaggtaccctgcctcccagagggggctgacccctcccctccagtggtgaacgagctttactacctcctggctgattatcatttcaaaaacaaggagcagtccaaggccatcaagttctacatgcatgacatctgcatctgccccaataggtttgattcctgggcaggcatggctctggcccgggccagccgcattcaggacaagctgaactccaatgagctgaagagtgatgggcccatttggaagcatgccacgcccgtcttgaactgcttccgtcgggccctggagattgacagctccaacttgtccctatggattgagtatggcaccatgtcctatgccttgcactcattcgcctcacgtcaattgaagcagtggagaggcgagctgccccctgagctcgtgcagcagatggagggccggcgcgacagcatgctagagacagccaagcactgtttcacatcagcagcccgctgcgagggtgatggtgacgaggaggagtggctcatccactacatgctgggcaaggtggctgagaagcagcagcagccacccaccgtttacttgctgcactacaggcaggctggccactacctgcacgaggaggctgcccgctaccccaagaagatccactaccacaacccacctgagctggccatggaggccctggaggtgtactttcggctccatgcttccatcctgaagctcctggggaagcccgattctggggttggtgcagaggtcctggtcaactttatgaaggaggctgcagaaggaccctttgccaggggcgaggagaagaacacacccaaagcttcagaaaaggagaaggcctgcctggtggacgaggactcccactcttcagctgggacactgccgggccccggagcctccctcccctcctcctctggcccaggtctgacatccccaccttacacagccactccgattgaccacgattacgtcaaatgtaaaaaaccccaccagcaggcaacgccggacgaccgaagccaggacagcacagccgtagcactctcagactctagctcaacgcaggacttctttaatgagcccaccagcttactggaaggctccaggaaatcctacacagagaagaggctgcccattctcagttcccaagcaggagcgacgggtaaagatcttcagggggccacagaagaaagaggaaaaaacgaggagtcattggagagtacagaaggcttccgggctgcagagcaaggtgtccagaagcctgctgcagaaaccccagcctctgcttgcatccctggcaagccctcagcatccacacccaccctgtgggatgggaagaagagaggggacctcccaggggagccagtggccttcccccaggggctgccggctggtgctgaggagcagcggcagtttctcacagagcagtgcatcgcctccttccgcctgtgcctgagccgcttcccccagcactataagagtctctaccgtctggccttcctctacacctacagcaagacccaccggaacctccagtgggcccgcgacgtgttgctaggcagcagtatcccgtggcaacaactgcagcacatgccggcacaggggctcttctgcgagaggaacaagaccaatttcttcaacggcatctggcggatccccgtggacgagattgaccggccgggcagctttgcctggcacatgaaccgctccatcgtgctgctgctcaaggtgctggcccagctgcgggaccacagcaccctgctgaaggtgtcctccatgcttcagcggaccccagaccagggcaagaagtatctgcgagatgctgaccgccaggtcctggcgcagcgggccttcatcctcactgtgaaggtgctcgaagacacgctgagcgagctcgcagaggggtcagaacgcccagggcccaaggtctgtggcctccccggagccaggatgaccaccgatgtctcacacaaggccagtcctgaggatggccaggagggcctcccccagccgaagaagccccctctggctgatggctcagggccagggcccgagccaggaggcaaagtgggcctcctcaaccaccggcctgtggccatggatgcaggagacagtgcagaccaaagcggggagcggaaggataaagagagcccacgggcagggcccactgagcccatggacacgagtgaggccactgtttgccactcagacttggagcggacaccacccctgctgccaggtcgccccgcaagggaccggggccccgagagccggcccactgagctgtccctggaggagctgagcatcagtgcccggcagcagcccaccccgctcaccccagcccagccagcccccgcccccgcccccgccaccaccacagggaccagggcagggggccacccggaggagccgctctcccggctcagccgcaagaggaagctcctggaggacacagagtcaggcaagacacttctgttggatgcctaccgtgtgtggcagcagggccagaagggtgtggcctatgacctgggccgtgtggagaggatcatgtcggagacctacatgctcatcaagcaggtggatgaggaggctgcgctggagcaggctgtgaagttctgccaggtccatcttggggctgccgcccagagacaggcctcgggggacacccccaccactccaaagcaccccaaagacagccgagagaacttctttcctgtgacagtggtgcccacagcccctgaccctgtgccagctgactctgtccagcggcccagtgatgctcacaccaagcctcgccctgcactagctgccgccacaactattatcacctgccctccgtcagcatcagcttccaccctggaccagtccaaggaccctgggcctccccggccacacaggcctgaagctacccccagcatggcctctctgggcccagagggagaagagctggcgagagtggcagagggcaccagcttcccgcctcaggagccacggcacagtccgcaggtgaagatggcccccacaagttccccggcagagccacactgctggccggcagaggctgccctgggcacaggcgctgagcccacctgcagccaggaggggaaactgaggcctgagccgagaagggatggggaggctcaggaggctgcgagtgagactcagcccctgagctctcccccaacagctgccagctccaaggcccccagcagtgggagtgcccagccaccagagggtcacccaggcaagcctgagcccagccgggctaagtcccgccccctgcccaacatgccaaagctggtcatcccctccgccgccaccaagttcccccctgagatcaccgtcacgccacccaccccaaccctgctctcccccaaaggcagcatctcggaggagaccaagcagaagctgaagtcagccatcctttctgcccagtctgctgccaacgtgaggaaggagagcctatgccagccagccctggaggtcctggagacatccagccaggagtcctcgctggagagcgagacagacgaggacgacgactacatggacatttgaggggccactgcagccccaccgccacgccccaggggaccagccaggcctggaatgccccctgggcaggaccctgggcaggaccagaggcccacatggatgccactccccacacagcccccaggcctgcccagcccacctcctcatggcatcctccctgtacccaggtcaggctgtccacaccacatgggagcccagaggaggaggggcccgccttagccatgtgaaggtggattggtcgccatctgcacgccaggcggcatccttttctatgaagtgttgactttgtaaatctgcccacacccagctggccatatccacccctcgacgccgggatgagccggctctgcctgtgtcacagtggaggggtcctttagggccaggctcacccctcaccctttttttggttgcttttctaataaagatggaacagtt

SEQ ID NO: 427245 - DNA, 7252 bp, Homo sapiens
tttccctggaggagattgataagaacctgaagtcgctggagcggtgccagtccctggaggagattcagcggctgtatgaagcagagagttgtggactggggcaacctttgccagtgatgagaagtgatgctcgtggcagtgctgaatctctctgaatatgattcgaattgcagccttaaatgccagctccaccattgaggatgatcatgaaggaagctttaaaagtcacaaaacccagacaaaggaggctcaggaagcagaggcttttgcattgtaccacaaggcccttgatctgcagaaacatgaccggtttgaggagtctgccaaagcctaccatgagctcttggaggcgagcctgctgcgggaggcagtttcatccggtgatgagaaagaggggttgaaacaccctgggctgatactgaaatattccacttataagaacttggcccagctggcagcccagcgggaggatctggagacagccatggagttctacttagaggcagtgatgctggactccacagatgtcaacctctggtataagattggacatgtggccctgaggctcatccggatccccctggctcgccatgcttttgaggaagggctgcggtgcaatcctgaccactggccctgtttggataacctaatcactgtcctgtacaccctcagtgattacacaacatgtctgtacttcatctgcaaagctttggagaaggattgccggtacagcaaagggctggtcctcaaggagaagatttttgaggagcagccttgtctccggaaggactctctcagaatgttcctcaaatgtgacatgtcgattcacgatgtttcggtgagtgcagctgagacacaggcgattgtagatgaggccttggggctgcgaaaaaagaggcaagcgctgattgtgcgggagaaggagccggacctgaaacttgtgcagcccattcctttcttcacctggaagtgcctcggagagagcttgctggccatgtacaatcatctcaccacctgtgagcccccacgtcccagccttggcaaaaggattgatttgtcggactaccaggaccccagccagcctcttgagtcctccatggtggtgacgccagttaacgtgatccagccaagcactgtcagcaccaacccagctgtggctgtcgccgagcctgtggtctcctacacctctgtggctacaaccagcttcccactgcacagtcctggtctgttggagacaggcgctcctgtgggtgatatttctgggggagataaatccaagaaaggggtaaaacggaagaagatttcagaagagagtggagaaacagcaaagcggcggtctgcccgtgtccgaaacaccaagtgcaaaaaagaagagaaagtagacttccaggagcttctgatgaagttcttgccgtccaggttaagaaagctggaccctgaggaggaagatgattcctttaataactatgaagtccagtcagaagccaaactggaaagcttcccaagcattgggcctcaaaggctgtcatttgactcagccacattcatggaatctgaaaagcaggacgtgcatgagttcctgctggagaacctaaccaacgggggcatcctggagctgatgatgcgctacctgaaagccatgggccacaagttcttggtaaggtggcctccaggcttggcggaggtcgtgctcagcgtctaccacagctggaggaggcacagcaccagcctgcccaacccgctgctgagggactgcagcaacaagcacatcaaggacatgatgctgatgtctctctcctgcatggaactccagctggaccagtggctgctgaccaaaggcagaagctctgcagtgtctcctcggaactgccctgctggtatggtgaatggcagatttggacctgacttcccagggacccactgcctgggtgacctcctacagctgtcatttgcctcgtcccagcgcgacctgttcgaggatggttggctggagtttgtggtccgtgtttactggctgaaggctcgcttcctggcgctgcagggagacatggagcaggccctggagaactatgacatctgcacagaaatgctccagagttccaccgccatccaggtggaggcaggggctgaacgaagagacattgtcatccggctgcccaacctccataatgactctgtggtttccctggaggagattgataagaacctgaagtcgctggagcggtgccagtccctggaggagattcagcggctgtatgaagcaggcgactacaaggctgttgtgcatctgctccgccccactttgtgcaccagtgggtttgaccgggccaaacacctggagtttatgacttccattcctgagaggccagcccagctgcttcttctgcaggactccttgctccggctgaaggactatcggcagtgttttgagtgttccgatgtggctctgaacgaggctgtccagcagatggtgaactcaggtgaggctgccgccaaggaggagtgggtggccacagtgacccaactgctgatgggcatcgagcaggccctctctgcggacagcagtggtagcatcctgaaggtatcatcctccaccactggccttgtgcggctcaccaacaacctcatccaggtcattgactgcagcatggctgtgcaggaggaggccaaggagccccacgtctcttcagtgctaccctggatcattctacaccggatcatctggcaggaggaagacaccttccattctctgtgccaccagcagcagctccaaaacccagcggaggaagggatgtcagagacgcccatgctcccatcctccctcatgctgctgaacacagcccacgagtatttgggcagaaggtcctggtgctgcaattcagatggggctctgctgcgattctatgtgcgagtactccagaaggaactggctgcatccacctctgaagacacgcacccttacaaggaggagctggagacagccttggagcagtgcttctactgcctgtacagcttccccagcaagaagagtaaggccaggtacctggaggaacactcggcccagcaggtggatcttatatgggaggatgcactgttcatgtttgagtattttaagcccaagacccttcctgaatttgacagctataagaccagcaccgtgtctgctgacttggccaacctactgaagagaattgccaccattgtgcctcgcacagagaggccagcccttagcctggacaaagtctctgcctacattgagggaacttcaactgaggtaccctgcctcccagagggggctgacccctcccctccagtggtgaacgagctttactacctcctggctgattatcatttcaaaaacaaggagcagtccaaggccatcaagttctacatgcatgacatctgcatctgccccaataggtttgattcctgggcaggcatggctctggcccgggccagccgcattcaggacaagctgaactccaatgagctgaagagtgatgggcccatttggaagcatgccacgcccgtcttgaactgcttccgtcgggccctggagattgacagctccaacttgtccctatggattgagtatggcaccatgtcctatgccttgcactcattcgcctcacgtcaattgaagcagtggagaggcgagctgccccctgagctcgtgcagcagatggagggccggcgcgacagcatgctagagacagccaagcactgtttcacatcagcagcccgctgcgagggtgatggtgacgaggaggagtggctcatccactacatgctgggcaaggtggctgagaagcagcagcagccacccaccgtttacttgctgcactacaggcaggctggccactacctgcacgaggaggctgcccgctaccccaagaagatccactaccacaacccacctgagctggccatggaggccctggaggtgtactttcggctccatgcttccatcctgaagctcctggggaagcccgattctggggttggtgcagaggtcctggtcaactttatgaaggaggctgcagaaggaccctttgccaggggcgaggagaagaacacacccaaagcttcagaaaaggagaaggcctgcctggtggacgaggactcccactcttcagctgggacactgccgggccccggagcctccctcccctcctcctctggcccaggtctgacatccccaccttacacagccactccgattgaccacgattacgtcaaatgtaaaaaaccccaccagcaggcaacgccggacgaccgaagccaggacagcacagccgtagcactctcagactctagctcaacgcaggacttctttaatgagcccaccagcttactggaaggctccaggaaatcctacacagagaagaggctgcccattctcagttcccaagcaggagcgacgggtaaagatcttcagggggccacagaagaaagaggaaaaaacgaggagtcattggagagtacagaaggcttccgggctgcagagcaaggtgtccagaagcctgctgcagaaaccccagcctctgcttgcatccctggcaagccctcagcatccacacccaccctgtgggatgggaagaagagaggggacctcccaggggagccagtggccttcccccaggggctgccggctggtgctgaggagcagcggcagtttctcacagagcagtgcatcgcctccttccgcctgtgcctgagccgcttcccccagcactataagagtctctaccgtctggccttcctctacacctacagcaagacccaccggaacctccagtgggcccgcgacgtgttgctaggcagcagtatcccgtggcaacaactgcagcacatgccggcacaggggctcttctgcgagaggaacaagaccaatttcttcaacggcatctggcggatccccgtggacgagattgaccggccgggcagctttgcctggcacatgaaccgctccatcgtgctgctgctcaaggtgctggcccagctgcgggaccacagcaccctgctgaaggtgtcctccatgcttcagcggaccccagaccagggcaagaagtatctgcgagatgctgaccgccaggtcctggcgcagcgggccttcatcctcactgtgaaggtgctcgaagacacgctgagcgagctcgcagaggggtcagaacgcccagggcccaaggtctgtggcctccccggagccaggatgaccaccgatgtctcacacaaggccagtcctgaggatggccaggagggcctcccccagccgaagaagccccctctggctgatggctcagggccagggcccgagccaggaggcaaagtgggcctcctcaaccaccggcctgtggccatggatgcaggagacagtgcagaccaaagcggggagcggaaggataaagagagcccacgggcagggcccactgagcccatggacacgagtgaggccactgtttgccactcagacttggagcggacaccacccctgctgccaggtcgccccgcaagggaccggggccccgagagccggcccactgagctgtccctggaggagctgagcatcagtgcccggcagcagcccaccccgctcaccccagcccagccagcccccgcccccgcccccgccaccaccacagggaccagggcagggggccacccggaggagccgctctcccggctcagccgcaagaggaagctcctggaggacacagagtcaggcaagacacttctgttggatgcctaccgtgtgtggcagcagggccagaagggtgtggcctatgacctgggccgtgtggagaggatcatgtcggagacctacatgctcatcaagcaggtggatgaggaggctgcgctggagcaggctgtgaagttctgccaggtccatcttggggctgccgcccagagacaggcctcgggggacacccccaccactccaaagcaccccaaagacagccgagagaacttctttcctgtgacagtggtgcccacagcccctgaccctgtgccagctgactctgtccagcggcccagtgatgctcacaccaagcctcgccctgcactagctgccgccacaactattatcacctgccctccgtcagcatcagcttccaccctggaccagtccaaggaccctgggcctccccggccacacaggcctgaagctacccccagcatggcctctctgggcccagagggagaagagctggcgagagtggcagagggcaccagcttcccgcctcaggagccacggcacagtccgcaggtgaagatggcccccacaagttccccggcagagccacactgctggccggcagaggctgccctgggcacaggcgctgagcccacctgcagccaggaggggaaactgaggcctgagccgagaagggatggggaggctcaggaggctgcgagtgagactcagcccctgagctctcccccaacagctgccagctccaaggcccccagcagtgggagtgcccagccaccagagggtcacccaggcaagcctgagcccagccgggctaagtcccgccccctgcccaacatgccaaagctggtcatcccctccgccgccaccaagttcccccctgagatcaccgtcacgccacccaccccaaccctgctctcccccaaaggcagcatctcggaggagaccaagcagaagctgaagtcagccatcctttctgcccagtctgctgccaacgtgaggaaggagagcctatgccagccagccctggaggtcctggagacatccagccaggagtcctcgctggagagcgagacagacgaggacgacgactacatggacatttgaggggccactgcagccccaccgccacgccccaggggaccagccaggcctggaatgccccctgggcaggaccctgggcaggaccagaggcccacatggatgccactccccacacagcccccaggcctgcccagcccacctcctcatggcatcctccctgtacccaggtcaggctgtccacaccacatgggagcccagaggaggaggggcccgccttagccatgtgaaggtggattggtcgccatctgcacgccaggcggcatccttttctatgaagtgttgactttgtaaatctgcccacacccagctggccatatccacccctcgacgccgggatgagccggctctgcctgtgtcacagtggaggggtcctttagggccaggctcacccctcaccctttttttggttgcttttctaataaagatggaacagtt

SEQ ID NO: 427246 - DNA, 7260 bp, Homo sapiens
gggtgaggctcagcagagcccggggcacaggccggaggggctgcaggcgcgaggctgggttacgtgaggaagctgggggtttcgcgggcagctttagagccccagtcagggaaaccgaggccgggcttcctggctgcctcgcgagcctcttcatggctctcgccgccgccctgaggtgcctagaatgggttccggcctccggggaggttcccagtaaccgcaggagccaccattgatttggcgtctgctgggtgcaaagcccagcgcgctaaccctttactcgcgacctttcgcttcaccttcacagcagccctgcgaggagagttgtggactggggcaacctttgccagtgatgagaagtgatgctcgtggcagtgctgaatctctctgaatatgattcgaattgcagccttaaatgccagctccaccattgaggatgatcatgaaggaagctttaaaagtcacaaaacccagacaaaggaggctcaggaagcagaggcttttgcattgtaccacaaggcccttgatctgcagaaacatgaccggtttgaggagtctgccaaagcctaccatgagctcttggaggcgagcctgctgcgggaggcagtgatgctggactccacagatgtcaacctctggtataagattggacatgtggccctgaggctcatccggatccccctggctcgccatgcttttgaggaagggctgcggtgcaatcctgaccactggccctgtttggataacctaatcactgtcctgtacaccctcagtgattacacaacatgtctgtacttcatctgcaaagctttggagaaggattgccggtacagcaaagggctggtcctcaaggagaagatttttgaggagcagccttgtctccggaaggactctctcagaatgttcctcaaatgtgacatgtcgattcacgatgtttcggtgagtgcagctgagacacaggcgattgtagatgaggccttggggctgcgaaaaaagaggcaagcgctgattgtgcgggagaaggagccggacctgaaacttgtgcagcccattcctttcttcacctggaagtgcctcggagagagcttgctggccatgtacaatcatctcaccacctgtgagcccccacgtcccagccttggcaaaaggattgatttgtcggactaccaggaccccagccagcctcttgagtcctccatggtggtgacgccagttaacgtgatccagccaagcactgtcagcaccaacccagctgtggctgtcgccgagcctgtggtctcctacacctctgtggctacaaccagcttcccactgcacagtcctggtctgttggagacaggcgctcctgtgggtgatatttctgggggagataaatccaagaaaggggtaaaacggaagaagatttcagaagagagtggagaaacagcaaagcggcggtctgcccgtgtccgaaacaccaagtgcaaaaaagaagagaaagtagacttccaggagcttctgatgaagttcttgccgtccaggttaagaaagctggaccctgaggaggaagatgattcctttaataactatgaagtccagtcagaagccaaactggaaagcttcccaagcattgggcctcaaaggctgtcatttgactcagccacattcatggaatctgaaaagcaggacgtgcatgagttcctgctggagaacctaaccaacgggggcatcctggagctgatgatgcgctacctgaaagccatgggccacaagttcttggtaaggtggcctccaggcttggcggaggtcgtgctcagcgtctaccacagctggaggaggcacagcaccagcctgcccaacccgctgctgagggactgcagcaacaagcacatcaaggacatgatgctgatgtctctctcctgcatggaactccagctggaccagtggctgctgaccaaaggcagaagctctgcagtgtctcctcggaactgccctgctggtatggtgaatggcagatttggacctgacttcccagggacccactgcctgggtgacctcctacagctgtcatttgcctcgtcccagcgcgacctgttcgaggatggttggctggagtttgtggtccgtgtttactggctgaaggctcgcttcctggcgctgcagggagacatggagcaggccctggagaactatgacatctgcacagaaatgctccagagttccaccgccatccaggtggaggcaggggctgaacgaagagacattgtcatccggctgcccaacctccataatgactctgtggtttccctggaggagattgataagaacctgaagtcgctggagcggtgccagtccctggaggagattcagcggctgtatgaagcaggcgactacaaggctgttgtgcatctgctccgccccactttgtgcaccagtgggtttgaccgggccaaacacctggagtttatgacttccattcctgagaggccagcccagctgcttcttctgcaggactccttgctccggctgaaggactatcggcagtgttttgagtgttccgatgtggctctgaacgaggctgtccagcagatggtgaactcaggtgaggctgccgccaaggaggagtgggtggccacagtgacccaactgctgatgggcatcgagcaggccctctctgcggacagcagtggtagcatcctgaaggtatcatcctccaccactggccttgtgcggctcaccaacaacctcatccaggtcattgactgcagcatggctgtgcaggaggaggccaaggagccccacgtctcttcagtgctaccctggatcattctacaccggatcatctggcaggaggaagacaccttccattctctgtgccaccagcagcagctccaaaacccagcggaggaagggatgtcagagacgcccatgctcccatcctccctcatgctgctgaacacagcccacgagtatttgggcagaaggtcctggtgctgcaattcagatggggctctgctgcgattctatgtgcgagtactccagaaggaactggctgcatccacctctgaagacacgcacccttacaaggaggagctggagacagccttggagcagtgcttctactgcctgtacagcttccccagcaagaagagtaaggccaggtacctggaggaacactcggcccagcaggtggatcttatatgggaggatgcactgttcatgtttgagtattttaagcccaagacccttcctgaatttgacagctataagaccagcaccgtgtctgctgacttggccaacctactgaagagaattgccaccattgtgcctcgcacagagaggccagcccttagcctggacaaagtctctgcctacattgagggaacttcaactgaggtaccctgcctcccagagggggctgacccctcccctccagtggtgaacgagctttactacctcctggctgattatcatttcaaaaacaaggagcagtccaaggccatcaagttctacatgcatgacatctgcatctgccccaataggtttgattcctgggcaggcatggctctggcccgggccagccgcattcaggacaagctgaactccaatgagctgaagagtgatgggcccatttggaagcatgccacgcccgtcttgaactgcttccgtcgggccctggagattgacagctccaacttgtccctatggattgagtatggcaccatgtcctatgccttgcactcattcgcctcacgtcaattgaagcagtggagaggcgagctgccccctgagctcgtgcagcagatggagggccggcgcgacagcatgctagagacagccaagcactgtttcacatcagcagcccgctgcgagggtgatggtgacgaggaggagtggctcatccactacatgctgggcaaggtggctgagaagcagcagcagccacccaccgtttacttgctgcactacaggcaggctggccactacctgcacgaggaggctgcccgctaccccaagaagatccactaccacaacccacctgagctggccatggaggccctggaggtgtactttcggctccatgcttccatcctgaagctcctggggaagcccgattctggggttggtgcagaggtcctggtcaactttatgaaggaggctgcagaaggaccctttgccaggggcgaggagaagaacacacccaaagcttcagaaaaggagaaggcctgcctggtggacgaggactcccactcttcagctgggacactgccgggccccggagcctccctcccctcctcctctgaccgaagccaggacagcacagccgtagcactctcagactctagctcaacgcaggacttctttaatgagcccaccagcttactggaaggctccaggaaatcctacacagagaagaggctgcccattctcagttcccaagcaggagcgacgggtaaagatcttcagggggccacagaagaaagaggaaaaaacgaggagtcattggagagtacagaaggcttccgggctgcagagcaaggtgtccagaagcctgctgcagaaaccccagcctctgcttgcatccctggcaagccctcagcatccacacccaccctgtgggatgggaagaagagaggggacctcccaggggagccagtggccttcccccaggggctgccggctggtgctgaggagcagcggcagtttctcacagagcagtgcatcgcctccttccgcctgtgcctgagccgcttcccccagcactataagagtctctaccgtctggccttcctctacacctacagcaagacccaccggaacctccagtgggcccgcgacgtgttgctaggcagcagtatcccgtggcaacaactgcagcacatgccggcacaggggctcttctgcgagaggaacaagaccaatttcttcaacggcatctggcggatccccgtggacgagattgaccggccgggcagctttgcctggcacatgaaccgctccatcgtgctgctgctcaaggtgctggcccagctgcgggaccacagcaccctgctgaaggtgtcctccatgcttcagcggaccccagaccagggcaagaagtatctgcgagatgctgaccgccaggtcctggcgcagcgggccttcatcctcactgtgaaggtgctcgaagacacgctgagcgagctcgcagaggggtcagaacgcccagggcccaaggtctgtggcctccccggagccaggatgaccaccgatgtctcacacaaggccagtcctgaggatggccaggagggcctcccccagccgaagaagccccctctggctgatggctcagggccagggcccgagccaggaggcaaagtgggcctcctcaaccaccggcctgtggccatggatgcaggagacagtgcagaccaaagcggggagcggaaggataaagagagcccacgggcagggcccactgagcccatggacacgagtgaggccactgtttgccactcagacttggagcggacaccacccctgctgccaggtcgccccgcaagggaccggggccccgagagccggcccactgagctgtccctggaggagctgagcatcagtgcccggcagcagcccaccccgctcaccccagcccagccagcccccgcccccgcccccgccaccaccacagggaccagggcagggggccacccggaggagccgctctcccggctcagccgcaagaggaagctcctggaggacacagagtcaggcaagacacttctgttggatgcctaccgtgtgtggcagcagggccagaagggtgtggcctatgacctgggccgtgtggagaggatcatgtcggagacctacatgctcatcaagcaggtggatgaggaggctgcgctggagcaggctgtgaagttctgccaggtccatcttggggctgccgcccagagacaggcctcgggggacacccccaccactccaaagcaccccaaagacagccgagagaacttctttcctgtgacagtggtgcccacagcccctgaccctgtgccagctgactctgtccagcggcccagtgatgctcacaccaagcctcgccctgcactagctgccgccacaactattatcacctgccctccgtcagcatcagcttccaccctggaccagtccaaggaccctgggcctccccggccacacaggcctgaagctacccccagcatggcctctctgggcccagagggagaagagctggcgagagtggcagagggcaccagcttcccgcctcaggagccacggcacagtccgcaggtgaagatggcccccacaagttccccggcagagccacactgctggccggcagaggctgccctgggcacaggcgctgagcccacctgcagccaggaggggaaactgaggcctgagccgagaagggatggggaggctcaggaggctgcgagtgagactcagcccctgagctctcccccaacagctgccagctccaaggcccccagcagtgggagtgcccagccaccagagggtcacccaggcaagcctgagcccagccgggctaagtcccgccccctgcccaacatgccaaagctggtcatcccctccgccgccaccaagttcccccctgagatcaccgtcacgccacccaccccaaccctgctctcccccaaaggcagcatctcggaggagaccaagcagaagctgaagtcagccatcctttctgcccagtctgctgccaacgtgaggaaggagagcctatgccagccagccctggaggtcctggagacatccagccaggagtcctcgctggagagcgagacagacgaggacgacgactacatggacatttgaggggccactgcagccccaccgccacgccccaggggaccagccaggcctggaatgccccctgggcaggaccctgggcaggaccagaggcccacatggatgccactccccacacagcccccaggcctgcccagcccacctcctcatggcatcctccctgtacccaggtcaggctgtccacaccacatgggagcccagaggaggaggggcccgccttagccatgtgaaggtggattggtcgccatctgcacgccaggcggcatccttttctatgaagtgttgactttgtaaatctgcccacacccagctggccatatccacccctcgacgccgggatgagccggctctgcctgtgtcacagtggaggggtcctttagggccaggctcacccctcaccctttttttggttgcttttctaataaagatggaacagtt

SEQ ID NO: 427247 - DNA, 3610 bp, Homo sapiens
agtgcccagtgaacggagctgaagggttatcataatgagtggttattactctcatctcactaccatgtgcctgagttactgcgtgaacgtttaagctggaatgctgacagtatacattttaattttcacagcttgttttaaattagttgtaggatggttggtttaaaagctaacaaaaacaagcagtgtgtggcagcctgttgccctggtcatgggcccatttccagtgtggctgactggcctgtggaacaaatcttagcaactgggaaggctgctcacactagaggtgtcgttctcctaggtgtactttcggctccatgcttccatcctgaagctcctggggaagcccgattctggggttggtgcagaggtcctggtcaactttatgaaggaggctgcagaaggaccctttgccaggggcgaggagaagaacacacccaaagcttcagaaaaggagaaggcctgcctggtggacgaggactcccactcttcagctgggacactgccgggccccggagcctccctcccctcctcctctggcccaggtctgacatccccaccttacacagccactccgattgaccacgattacgtcaaatgtaaaaaaccccaccagcaggcaacgccggacgaccgaagccaggacagcacagccgtagcactctcagactctagctcaacgcaggacttctttaatgagcccaccagcttactggaaggctccaggaaatcctacacagagaagaggctgcccattctcagttcccaagcaggagcgacgggtaaagatcttcagggggccacagaagaaagaggaaaaaacgaggagtcattggagagtacagaaggcttccgggctgcagagcaaggtgtccagaagcctgctgcagaaaccccagcctctgcttgcatccctggcaagccctcagcatccacacccaccctgtgggatgggaagaagagaggggacctcccaggggagccagtggccttcccccaggggctgccggctggtgctgaggagcagcggcagtttctcacagagcagtgcatcgcctccttccgcctgtgcctgagccgcttcccccagcactataagagtctctaccgtctggccttcctctacacctacagcaagacccaccggaacctccagtgggcccgcgacgtgttgctaggcagcagtatcccgtggcaacaactgcagcacatgccggcacaggggctcttctgcgagaggaacaagaccaatttcttcaacggcatctggcggatccccgtggacgagattgaccggccgggcagctttgcctggcacatgaaccgctccatcgtgctgctgctcaaggtgctggcccagctgcgggaccacagcaccctgctgaaggtgtcctccatgcttcagcggaccccagaccagggcaagaagtatctgcgagatgctgaccgccaggtcctggcgcagcgggccttcatcctcactgtgaaggtgctcgaagacacgctgagcgagctcgcagaggggtcagaacgcccagggcccaaggtctgtggcctccccggagccaggatgaccaccgatgtctcacacaaggccagtcctgaggatggccaggagggcctcccccagccgaagaagccccctctggctgatggctcagggccagggcccgagccaggaggcaaagtgggcctcctcaaccaccggcctgtggccatggatgcaggagacagtgcagaccaaagcggggagcggaaggataaagagagcccacgggcagggcccactgagcccatggacacgagtgaggccactgtttgccactcagacttggagcggacaccacccctgctgccaggtcgccccgcaagggaccggggccccgagagccggcccactgagctgtccctggaggagctgagcatcagtgcccggcagcagcccaccccgctcaccccagcccagccagcccccgcccccgcccccgccaccaccacagggaccagggcagggggccacccggaggagccgctctcccggctcagccgcaagaggaagctcctggaggacacagagtcaggcaagacacttctgttggatgcctaccgtgtgtggcagcagggccagaagggtgtggcctatgacctgggccgtgtggagaggatcatgtcggagacctacatgctcatcaagcaggtggatgaggaggctgcgctggagcaggctgtgaagttctgccaggtccatcttggggctgccgcccagagacaggcctcgggggacacccccaccactccaaagcaccccaaagacagccgagagaacttctttcctgtgacagtggtgcccacagcccctgaccctgtgccagctgactctgtccagcggcccagtgatgctcacaccaagcctcgccctgcactagctgccgccacaactattatcacctgccctccgtcagcatcagcttccaccctggaccagtccaaggaccctgggcctccccggccacacaggcctgaagctacccccagcatggcctctctgggcccagagggagaagagctggcgagagtggcagagggcaccagcttcccgcctcaggagccacggcacagtccgcaggtgaagatggcccccacaagttccccggcagagccacactgctggccggcagaggctgccctgggcacaggcgctgagcccacctgcagccaggaggggaaactgaggcctgagccgagaagggatggggaggctcaggaggctgcgagtgagactcagcccctgagctctcccccaacagctgccagctccaaggcccccagcagtgggagtgcccagccaccagagggtcacccaggcaagcctgagcccagccgggctaagtcccgccccctgcccaacatgccaaagctggtcatcccctccgccgccaccaagttcccccctgagatcaccgtcacgccacccaccccaaccctgctctcccccaaaggcagcatctcggaggagaccaagcagaagctgaagtcagccatcctttctgcccagtctgctgccaacgtgaggaaggagagcctatgccagccagccctggaggtcctggagacatccagccaggagtcctcgctggagagcgagacagacgaggacgacgactacatggacatttgaggggccactgcagccccaccgccacgccccaggggaccagccaggcctggaatgccccctgggcaggaccctgggcaggaccagaggcccacatggatgccactccccacacagcccccaggcctgcccagcccacctcctcatggcatcctccctgtacccaggtcaggctgtccacaccacatgggagcccagaggaggaggggcccgccttagccatgtgaaggtggattggtcgccatctgcacgccaggcggcatccttttctatgaagtgttgactttgtaaatctgcccacacccagctggccatatccacccctcgacgccgggatgagccggctctgcctgtgtcacagtggaggggtcctttagggccaggctcacccctcaccctttttttggttgcttttctaataaagatggaacagtt

SEQ ID NO: 427248 - DNA, 2697 bp, Homo sapiens
gccccgggctgggagctggctcgtgggggcgtgcgctgcgcgaaagcgaaagccgcccgccagagcaactttgcggcggaaggcgccgacgaggagctgtgccgtgccgctcttggggatggggcacttgatttcctgaagagcctttgcctgtgccctagaagtggaggaagctctagaaggagtcatgactgaaagaagcccagctccacctggtgtaggcagaaagccagttggcttgctaccaccctgctggctcgtgactctgcctggtggcttcactcttcagaccagctttctctggaggccagcctcatggccataggaagtcccctcaccgttcgggagggcatctggcggatccccgtggacgagattgaccggccgggcagctttgcctggcacatgaaccgctccatcgtgctgctgctcaaggtgctggcccagctgcgggaccacagcaccctgctgaaggtgtcctccatgcttcagcggaccccagaccagggcaagaagtatctgcgagatgctgaccgccaggtcctggcgcagcgggccttcatcctcactgtgaaggtgctcgaagacacgctgagcgagctcgcagaggggtcagaacgcccagggcccaaggtctgtggcctccccggagccaggatgaccaccgatgtctcacacaaggccagtcctgaggatggccaggagggcctcccccagccgaagaagccccctctggctgatggctcagggccagggcccgagccaggaggcaaagtgggcctcctcaaccaccggcctgtggccatggatgcaggagacagtgcagaccaaagcggggagcggaaggataaagagagcccacgggcagggcccactgagcccatggacacgagtgaggccactgtttgccactcagacttggagcggacaccacccctgctgccaggtcgccccgcaagggaccggggccccgagagccggcccactgagctgtccctggaggagctgagcatcagtgcccggcagcagcccaccccgctcaccccagcccagccagcccccgcccccgcccccgccaccaccacagggaccagggcagggggccacccggaggagccgctctcccggctcagccgcaagaggaagctcctggaggacacagagtcaggcaagacacttctgttggatgcctaccgtgtgtggcagcagggccagaagggtgtggcctatgacctgggccgtgtggagaggatcatgtcggagacctacatgctcatcaagcaggtggatgaggaggctgcgctggagcaggctgtgaagttctgccaggtccatcttggggctgccgcccagagacaggcctcgggggacacccccaccactccaaagcaccccaaagacagccgagagaacttctttcctgtgacagtggtgcccacagcccctgaccctgtgccagctgactctgtccagcggcccagtgatgctcacaccaagcctcgccctgcactagctgccgccacaactattatcacctgccctccgtcagcatcagcttccaccctggaccagtccaaggaccctgggcctccccggccacacaggcctgaagctacccccagcatggcctctctgggcccagagggagaagagctggcgagagtggcagagggcaccagcttcccgcctcaggagccacggcacagtccgcaggtgaagatggcccccacaagttccccggcagagccacactgctggccggcagaggctgccctgggcacaggcgctgagcccacctgcagccaggaggggaaactgaggcctgagccgagaagggatggggaggctcaggaggctgcgagtgagactcagcccctgagctctcccccaacagctgccagctccaaggcccccagcagtgggagtgcccagccaccagagggtcacccaggcaagcctgagcccagccgggctaagtcccgccccctgcccaacatgccaaagctggtcatcccctccgccgccaccaagttcccccctgagatcaccgtcacgccacccaccccaaccctgctctcccccaaaggcagcatctcggaggagaccaagcagaagctgaagtcagccatcctttctgcccagtctgctgccaacgtgaggaaggagagcctatgccagccagccctggaggtcctggagacatccagccaggagtcctcgctggagagcgagacagacgaggacgacgactacatggacatttgaggggccactgcagccccaccgccacgccccaggggaccagccaggcctggaatgccccctgggcaggaccctgggcaggaccagaggcccacatggatgccactccccacacagcccccaggcctgcccagcccacctcctcatggcatcctccctgtacccaggtcaggctgtccacaccacatgggagcccagaggaggaggggcccgccttagccatgtgaaggtggattggtcgccatctgcacgccaggcggcatccttttctatgaagtgttgactttgtaaatctgcccacacccagctggccatatccacccctcgacgccgggatgagccggctctgcctgtgtcacagtggaggggtcctttagggccaggctcacccctcaccctttttttggttgcttttctaataaagatggaacagtt

SEQ ID NO: 427249 - DNA, 6975 bp, Homo sapiens
gggtgaggctcagcagagcccggggcacaggccggaggggctgcaggcgcgaggctgggttacgtgaggaagctgggggtttcgcgggcagctttagagccccagtcagggaaaccgaggccgggcttcctggctgcctcgcgagcctcttcatggctctcgccgccgccctgaggtgcctagaatgggttccggcctccggggaggttcccagtaaccgcaggagccaccattgatttggcgtctgctgggtgcaaagcccagcgcgctaaccctttactcgcgacctttcgcttcaccttcacagcagccctgcgaggagagttgtggactggggcaacctttgccagtgatgagaagtgatgctcgtggcagtgctgaatctctctgaatatgattcgaattgcagccttaaatgccagctccaccattgaggatgatcatgaaggaagctttaaaagtcacaaaacccagacaaaggaggctcaggaagcagaggcttttgcattgtaccacaaggcccttgatctgcagaaacatgaccggtttgaggagtctgccaaagcctaccatgagctcttggaggcgagcctgctgcgggaggcagtgatgctggactccacagatgtcaacctctggtataagattggacatgtggccctgaggctcatccggatccccctggctcgccatgcttttgaggaagggctgcggtgcaatcctgaccactggccctgtttggataacctaatcactgtcctgtacaccctcagtgattacacaacatgtctgtacttcatctgcaaagctttggagaaggattgccggtacagcaaagggctggtcctcaaggagaagatttttgaggagcagccttgtctccggaaggactctctcagaatgttcctcaaatgtgacatgtcgattcacgatgtttcggtgagtgcagctgagacacaggcgattgtagatgaggccttggggctgcgaaaaaagaggcaagcgctgattgtgcgggagaaggagccggacctgaaacttgtgcagcccattcctttcttcacctggaagtgcctcggagagagcttgctggccatgtacaatcatctcaccacctgtgagcccccacgtcccagccttggcaaaaggattgatttgtcggactaccaggaccccagccagcctcttgagtcctccatggtggtgacgccagttaacgtgatccagccaagcactgtcagcaccaacccagctgtggctgtcgccgagcctgtggtctcctacacctctgtggctacaaccagcttcccactgcacagtcctggtctgttggagacaggcgctcctgtgggtgatatttctgggggagataaatccaagaaaggggtaaaacggaagaagatttcagaagagagtggagaaacagcaaagcggcggtctgcccgtgtccgaaacaccaagtgcaaaaaagaagagaaagtagacttccaggagcttctgatgaagttcttgccgtccaggttaagaaagctggaccctgaggaggaagatgattcctttaataactatgaagtccagtcagaagccaaactggaaagcttcccaagcattgggcctcaaaggctgtcatttgactcagccacattcatggaatctgaaaagcaggacgtgcatgagttcctgctggagaacctaaccaacgggggcatcctggagctgatgatgcgctacctgaaagccatgggccacaagttcttggtaaggtggcctccaggcttggcggaggtcgtgctcagcgtctaccacagctggaggaggcacagcaccagcctgcccaacccgctgctgagggactgcagcaacaagcacatcaaggacatgatgctgatgtctctctcctgcatggaactccagctggaccagtggctgctgaccaaaggcagaagctctgcagtgtctcctcggaactgccctgctggtatggtgaatggcagatttggacctgacttcccagggacccactgcctgggtgacctcctacagctgtcatttgcctcgtcccagcgcgacctgttcgaggatggttggctggagtttgtggtccgtgtttactggctgaaggctcgcttcctggcgctgcagggagacatggagcaggccctggagaactatgacatctgcacagaaatgctccagagttccaccgccatccaggtggaggcaggggctgaacgaagagacattgtcatccggctgcccaacctccataatgactctgtggtttccctggaggagattgataagaacctgaagtcgctggagcggtgccagtccctggaggagattcagcggctgtatgaagcaggcgactacaaggctgttgtgcatctgctccgccccactttgtgcaccagtgggtttgaccgggccaaacacctggagtttatgacttccattcctgagaggccagcccagctgcttcttctgcaggactccttgctccggctgaaggactatcggcagtgttttgagtgttccgatgtggctctgaacgaggctgtccagcagatggtgaactcaggtgaggctgccgccaaggaggagtgggtggccacagtgacccaactgctgatgggcatcgagcaggccctctctgcggacagcagtggtagcatcctgaaggtatcatcctccaccactggccttgtgcggctcaccaacaacctcatccaggtcattgactgcagcatggctgtgcaggaggaggccaaggagccccacgtctcttcagtgctaccctggatcattctacaccggatcatctggcaggaggaagacaccttccattctctgtgccaccagcagcagctccaaaacccagcggaggaagggatgtcagagacgcccatgctcccatcctccctcatgctgctgaacacagcccacgagtatttgggcagaaggtcctggtgctgcaattcagatggggctctgctgcgattctatgtgcgagtactccagaaggaactggctgcatccacctctgaagacacgcacccttacaaggaggagctggagacagccttggagcagtgcttctactgcctgtacagcttccccagcaagaagagtaaggccaggtacctggaggaacactcggcccagcaggtggatcttatatgggaggatgcactgttcatgtttgagtattttaagcccaagacccttcctgaatttgacagctataagaccagcaccgtgtctgctgacttggccaacctactgaagagaattgccaccattgtgcctcgcacagagaggccagcccttagcctggacaaagtctctgcctacattgagggaacttcaactgaggtaccctgcctcccagagggggctgacccctcccctccagtggtgaacgagctttactacctcctggctgattatcatttcaaaaacaaggagcagtccaaggccatcaagttctacatgcatgacatctgcatctgccccaataggtttgattcctgggcaggcatggctctggcccgggccagccgcattcaggacaagctgaactccaatgagctgaagagtgatgggcccatttggaagcatgccacgcccgtcttgaactgcttccgtcgggccctggagattgacagctccaacttgtccctatggattgagtatggcaccatgtcctatgccttgcactcattcgcctcacgtcaattgaagcagtggagaggcgagctgccccctgagctcgtgcagcagatggagggccggcgcgacagcatgctagagacagccaagcactgtttcacatcagcagcccgctgcgagggtgatggtgacgaggaggagtggctcatccactacatgctgggcaaggtggctgagaagcagcagcagccacccaccgtttacttgctgcactacaggcaggctggccactacctgcacgaggaggctgcccgctaccccaagaagatccactaccacaacccacctgagctggccatggaggccctggaggtgtactttcggctccatgcttccatcctgaagctcctggggaagcccgattctggggttggtgcagaggtcctggtcaactttatgaaggaggctgcagaaggaccctttgccaggggcgaggagaagaacacacccaaagcttcagaaaaggagaaggcctgcctggtggacgaggactcccactcttcagctgggacactgccgggccccggagcctccctcccctcctcctctggcccaggtctgacatccccaccttacacagccactccgattgaccacgattacgtcaaatgtaaaaaaccccaccagcaggcaacgccggacgaccgaagccaggacagcacagccgtagcactctcagactctagctcaacgcaggacttctttaatgagcccaccagcttactggaaggctccaggaaatcctacacagagaagaggctgcccattctcagttcccaagcaggagcgacgggtaaagatcttcagggggccacagaagaaagaggaaaaaacgaggagtcattggagagtacagaaggcttccgggctgcagagcaaggtgtccagaagcctgctgcagaaaccccagcctctgcttgcatccctggcaagccctcagcatccacacccaccctgtgggatgggaagaagagaggggacctcccaggggagccagtggccttcccccaggggctgccggctggtgctgaggagcagcggcagtttctcacagagcagtgcatcgcctccttccgcctgtgcctgagccgcttcccccagcactataagagtctctaccgtctggccttcctctacacctacagcaagacccaccggaacctccagtgggcccgcgacgtgttgctaggcagcagtatcccgtggcaacaactgcagcacatgccggcacaggggctcttctgcgagaggaacaagaccaatttcttcaacggcatctggcggatccccgtggacgagattgaccggccgggcagctttgcctggcacatgaaccgctccatcgtgctgctgctcaaggtgctggcccagctgcgggaccacagcaccctgctgaaggtgtcctccatgcttcagcggaccccagaccagggcaagaagtatctgcgagatgctgaccgccaggtcctggcgcagcgggccttcatcctcactgtgaaggtgctcgaagacacgctgagcgagctcgcagaggggtcagaacgcccagggcccaaggtctgtggcctccccggagccaggatgaccaccgatgtctcacacaaggccagtcctgaggatggccaggagggcctcccccagccgaagaagccccctctggctgatggctcagggccagggcccgagccaggaggcaaagtgggcctcctcaaccaccggcctgtggccatggatgcaggagacagtgcagaccaaagcggggagcggaaggataaagagagcccacgggcagggcccactgagcccatggacacgagtgaggccactgtttgccactcagacttggagcggacaccacccctgctgccaggtcgccccgcaagggaccggggccccgagagccggcccactgagctgtccctggaggagctgagcatcagtgcccggcagcagcccaccccgctcaccccagcccagccagcccccgcccccgcccccgccaccaccacagggaccagggcagggggccacccggaggagccgctctcccggctcagccgcaagaggaagctcctggaggacacagagtcaggcaagacacttctgttggatgcctaccgtgtgtggcagcagggccagaagggtgtggcctatgacctgggccgtgtggagaggatcatgtcggagacctacatgctcatcaagcaggtggatgaggaggctgcgctggagcaggctgtgaagttctgccaggtccatcttggggctgccgcccagagacaggcctcgggggacacccccaccactccaaagcaccccaaagacagccgagagaacttctttcctgtgacagtggtgcccacagcccctgaccctgtgccagctgactctgtccagcggcccagtgatgctcacaccaagcctcgccctgcactagctgccgccacaactattatcacctgccctccgtcagcatcagcttccaccctggaccagtccaaggaccctgggcctccccggccacacaggcctgaagctacccccagcatggcctctctgggcccagagggagaagagctggcgagagtggcagagggcaccagcttcccgcctcaggagccacggcacagtccgcaggtgaagatggcccccacaagttccccggcagagccacactgctggccggcagaggctgccctgggcacaggcgctgagcccacctgcagccaggaggggaaactgaggcctgagccgagaagggatggggaggctcaggaggctgcgagtgagactcagcccctgagctctcccccaacagctgccagctccaaggcccccagcagtgggagtgcccagccaccagagggtcacccaggcaagcctgagcccagccgggctaagtcccgccccctgggctacgtgcccagaacgctgggtcgtcccccgcgcgcgacacttggtttggcccatgttgattaccgttcaagactgccggtattccggcctctgtccccacgtggtggtgccttgtggccacatgtcagggctctccaagatgcaacgggtggctggcccccacggtcactggtggactgctctccccaagctttactacaggagaactggagctggtgaaaacgcttcagttattgaagaaacaattgaaatgcggaatgttggattcagtgtatggcctatgctcacgacggtcagaggctgatggacctgaagcgcttcaaaacg

SEQ ID NO: 427250 - DNA, 6648 bp, Homo sapiens
gggtgaggctcagcagagcccggggcacaggccggaggggctgcaggcgcgaggctgggttacgtgaggaagctgggggtttcgcgggcagctttagagccccagtcagggaaaccgaggccgggcttcctggctgcctcgcgagcctcttcatggctctcgccgccgccctgaggtgcctagaatgggttccggcctccggggaggttcccagtaaccgcaggagccaccattgatttggcgtctgctgggtgcaaagcccagcgcgctaaccctttactcgcgacctttcgcttcaccttcacagcagccctgcgaggagagttgtggactggggcaacctttgccagtgatgagaagtgatgctcgtggcagtgctgaatctctctgaatatgattcgaattgcagccttaaatgccagctccaccattgaggatgatcatgaaggaagctttaaaagtcacaaaacccagacaaaggaggctcaggaagcagaggcttttgcattgtaccacaaggcccttgatctgcagaaacatgaccggtttgaggagtctgccaaagcctaccatgagctcttggaggcgagcctgctgcgggaggcagtgatgctggactccacagatgtcaacctctggtataagattggacatgtggccctgaggctcatccggatccccctggctcgccatgcttttgaggaagggctgcggtgcaatcctgaccactggccctgtttggataacctaatcactgtcctgtacaccctcagtgattacacaacatgtctgtacttcatctgcaaagctttggagaaggattgccggtacagcaaagggctggtcctcaaggagaagatttttgaggagcagccttgtctccggaaggactctctcagaatgttcctcaaatgtgacatgtcgattcacgatgtttcggtgagtgcagctgagacacaggcgattgtagatgaggccttggggctgcgaaaaaagaggcaagcgctgattgtgcgggagaaggagccggacctgaaacttgtgcagcccattcctttcttcacctggaagtgcctcggagagagcttgctggccatgtacaatcatctcaccacctgtgagcccccacgtcccagccttggcaaaaggattgatttgtcggactaccaggaccccagccagcctcttgagtcctccatggtggtgacgccagttaacgtgatccagccaagcactgtcagcaccaacccagctgtggctgtcgccgagcctgtggtctcctacacctctgtggctacaaccagcttcccactgcacagtcctggtctgttggagacaggcgctcctgtgggtgatatttctgggggagataaatccaagaaaggggtaaaacggaagaagatttcagaagagagtggagaaacagcaaagcggcggtctgcccgtgtccgaaacaccaagtgcaaaaaagaagagaaagtagacttccaggagcttctgatgaagttcttgccgtccaggttaagaaagctggaccctgaggaggaagatgattcctttaataactatgaagtccagtcagaagccaaactggaaagcttcccaagcattgggcctcaaaggctgtcatttgactcagccacattcatggaatctgaaaagcaggacgtgcatgagttcctgctggagaacctaaccaacgggggcatcctggagctgatgatgcgctacctgaaagccatgggccacaagttcttggtaaggtggcctccaggcttggcggaggtcgtgctcagcgtctaccacagctggaggaggcacagcaccagcctgcccaacccgctgctgagggactgcagcaacaagcacatcaaggacatgatgctgatgtctctctcctgcatggaactccagctggaccagtggctgctgaccaaaggcagaagctctgcagtgtctcctcggaactgccctgctggtatggtgaatggcagatttggacctgacttcccagggacccactgcctgggtgacctcctacagctgtcatttgcctcgtcccagcgcgacctgttcgaggatggttggctggagtttgtggtccgtgtttactggctgaaggctcgcttcctggcgctgcagggagacatggagcaggccctggagaactatgacatctgcacagaaatgctccagagttccaccgccatccaggtggaggcaggggctgaacgaagagacattgtcatccggctgcccaacctccataatgactctgtggtttccctggaggagattgataagaacctgaagtcgctggagcggtgccagtccctggaggagattcagcggctgtatgaagcaggcgactacaaggctgttgtgcatctgctccgccccactttgtgcaccagtgggtttgaccgggccaaacacctggagtttatgacttccattcctgagaggccagcccagctgcttcttctgcaggactccttgctccggctgaaggactatcggcagtgttttgagtgttccgatgtggctctgaacgaggctgtccagcagatggtgaactcaggtgaggctgccgccaaggaggagtgggtggccacagtgacccaactgctgatgggcatcgagcaggccctctctgcggacagcagtggtagcatcctgaaggtatcatcctccaccactggccttgtgcggctcaccaacaacctcatccaggtcattgactgcagcatggctgtgcaggaggaggccaaggagccccacgtctcttcagtgctaccctggatcattctacaccggatcatctggcaggaggaagacaccttccattctctgtgccaccagcagcagctccaaaacccagcggaggaagggatgtcagagacgcccatgctcccatcctccctcatgctgctgaacacagcccacgagtatttgggcagaaggtcctggtgctgcaattcagatggggctctgctgcgattctatgtgcgagtactccagaaggaactggctgcatccacctctgaagacacgcacccttacaaggaggagctggagacagccttggagcagtgcttctactgcctgtacagcttccccagcaagaagagtaaggccaggtacctggaggaacactcggcccagcaggtggatcttatatgggaggatgcactgttcatgtttgagtattttaagcccaagacccttcctgaatttgacagctataagaccagcaccgtgtctgctgacttggccaacctactgaagagaattgccaccattgtgcctcgcacagagaggccagcccttagcctggacaaagtctctgcctacattgagggaacttcaactgaggtaccctgcctcccagagggggctgacccctcccctccagtggtgaacgagctttactacctcctggctgattatcatttcaaaaacaaggagcagtccaaggccatcaagttctacatgcatgacatctgcatctgccccaataggtttgattcctgggcaggcatggctctggcccgggccagccgcattcaggacaagctgaactccaatgagctgaagagtgatgggcccatttggaagcatgccacgcccgtcttgaactgcttccgtcgggccctggagattgacagctccaacttgtccctatggattgagtatggcaccatgtcctatgccttgcactcattcgcctcacgtcaattgaagcagtggagaggcgagctgccccctgagctcgtgcagcagatggagggccggcgcgacagcatgctagagacagccaagcactgtttcacatcagcagcccgctgcgagggtgatggtgacgaggaggagtggctcatccactacatgctgggcaaggtggctgagaagcagcagcagccacccaccgtttacttgctgcactacaggcaggctggccactacctgcacgaggaggctgcccgctaccccaagaagatccactaccacaacccacctgagctggccatggaggccctggaggtgtactttcggctccatgcttccatcctgaagctcctggggaagcccgattctggggttggtgcagaggtcctggtcaactttatgaaggaggctgcagaaggaccctttgccaggggcgaggagaagaacacacccaaagcttcagaaaaggagaaggcctgcctggtggacgaggactcccactcttcagctgggacactgccgggccccggagcctccctcccctcctcctctggcccaggtctgacatccccaccttacacagccactccgattgaccacgattacgtcaaatgtaaaaaaccccaccagcaggcaacgccggacgaccgaagccaggacagcacagccgtagcactctcagactctagctcaacgcaggacttctttaatgagcccaccagcttactggaaggctccaggaaatcctacacagagaagaggctgcccattctcagttcccaagcaggagcgacgggtaaagatcttcagggggccacagaagaaagaggaaaaaacgaggagtcattggagagtacagaaggcttccgggctgcagagcaaggtgtccagaagcctgctgcagaaaccccagcctctgcttgcatccctggcaagccctcagcatccacacccaccctgtgggatgggaagaagagaggggacctcccaggggagccagtggccttcccccaggggctgccggctggtgctgaggagcagcggcagtttctcacagagcagtgcatcgcctccttccgcctgtgcctgagccgcttcccccagcactataagagtctctaccgtctggccttcctctacacctacagcaagacccaccggaacctccagtgggcccgcgacgtgttgctaggcagcagtatcccgtggcaacaactgcagcacatgccggcacaggggctcttctgcgagaggaacaagaccaatttcttcaacggcatctggcggatccccgtggacgagattgaccggccgggcagctttgcctggcacatgaaccgctccatcgtgctgctgctcaaggtgctggcccagctgcgggaccacagcaccctgctgaaggtgtcctccatgcttcagcggaccccagaccagggcaagaagtatctgcgagatgctgaccgccaggtcctggcgcagcgggccttcatcctcactgtgaaggtgctcgaagacacgctgagcgagctcgcagaggggtcagaacgcccagggcccaaggtctgtggcctccccggagccaggatgaccaccgatgtctcacacaaggccagtcctgaggatggccaggagggcctcccccagccgaagaagccccctctggctgatggctcagggccagggcccgagccaggaggcaaagtgggcctcctcaaccaccggcctgtggccatggatgcaggagacagtgcagaccaaagcggggagcggaaggataaagagagcccacgggcagggcccactgagcccatggacacgagtgaggccactgtttgccactcagacttggagcggacaccacccctgctgccaggtcgccccgcaagggaccggggccccgagagccggcccactgagctgtccctggaggagctgagcatcagtgcccggcagcagcccaccccgctcaccccagcccagccagcccccgcccccgcccccgccaccaccacagggaccagggcagggggccacccggaggagccgctctcccggctcagccgcaagaggaagctcctggaggacacagagtcaggcaagacacttctgttggatgcctaccgtgtgtggcagcagggccagaagggtgtggcctatgacctgggccgtgtggagaggatcatgtcggagacctacatgctcatcaagcaggtggatgaggaggctgcgctggagcaggctgtgaagttctgccaggtccatcttggggctgccgcccagagacaggcctcgggggacacccccaccactccaaagcaccccaaagacagccgagagaacttctttcctgtgacagtggtgcccacagcccctgaccctgtgccagctgactctgtccagcggcccagtgatgctcacaccaagcctcgccctgcactagctgccgccacaactattatcacctgccctccgtcagcatcagcttccaccctggaccagtccaaggaccctgggcctccccggccacacaggcctgaagctacccccagcatggcctctctgggcccagagggagaagagctggcgagagtggcagagggcaccagcttcccgcctcaggagccacggcacagtccgcaggtgaagatggcccccacaagttccccggcagagccacactgctggccggcagaggctgccctgggcacaggcgctgagcccacctgcagccaggaggggaaactgaggcctgagccgagaagggatggggatgagatacctattaccatctttaatgtcctctcttatttattctgttttctatgtctttcctttttatatactatacttttgttgtgtacatacatcttaataattccgttccaagcttgtcccatgtctctcgtgtgtatatataaa

SEQ ID NO: 427251 - DNA, 5758 bp, Homo sapiens
gggtgaggctcagcagagcccggggcacaggccggaggggctgcaggcgcgaggctgggttacgtgaggaagctgggggtttcgcgggcagctttagagccccagtcagggaaaccgaggccgggcttcctggctgcctcgcgagcctcttcatggctctcgccgccgccctgaggtgcctagaatgggttccggcctccggggaggttcccagtaaccgcaggagccaccattgatttggcgtctgctgggtgcaaagcccagcgcgctaaccctttactcgcgacctttcgcttcaccttcacagcagccctgcgaggagagttgtggactggggcaacctttgccagtgatgagaagtgatgctcgtggcagtgctgaatctctctgaatatgattcgaattgcagccttaaatgccagctccaccattgaggatgatcatgaaggaagctttaaaagtcacaaaacccagacaaaggaggctcaggaagcagaggcttttgcattgtaccacaaggcccttgatctgcagaaacatgaccggtttgaggagtctgccaaagcctaccatgagctcttggaggcgagcctgctgcgggaggcagtgatgctggactccacagatgtcaacctctggtataagattggacatgtggccctgaggctcatccggatccccctggctcgccatgcttttgaggaagggctgcggtgcaatcctgaccactggccctgtttggataacctaatcactgtcctgtacaccctcagtgattacacaacatgtctgtacttcatctgcaaagctttggagaaggattgccggtacagcaaagggctggtcctcaaggagaagatttttgaggagcagccttgtctccggaaggactctctcagaatgttcctcaaatgtgacatgtcgattcacgatgtttcggtgagtgcagctgagacacaggcgattgtagatgaggccttggggctgcgaaaaaagaggcaagcgctgattgtgcgggagaaggagccggacctgaaacttgtgcagcccattcctttcttcacctggaagtgcctcggagagagcttgctggccatgtacaatcatctcaccacctgtgagcccccacgtcccagccttggcaaaaggattgatttgtcggactaccaggaccccagccagcctcttgagtcctccatggtggtgacgccagttaacgtgatccagccaagcactgtcagcaccaacccagctgtggctgtcgccgagcctgtggtctcctacacctctgtggctacaaccagcttcccactgcacagtcctggtctgttggagacaggcgctcctgtgggtgatatttctgggggagataaatccaagaaaggggtaaaacggaagaagatttcagaagagagtggagaaacagcaaagcggcggtctgcccgtgtccgaaacaccaagtgcaaaaaagaagagaaagtagacttccaggagcttctgatgaagttcttgccgtccaggttaagaaagctggaccctgaggaggaagatgattcctttaataactatgaagtccagtcagaagccaaactggaaagcttcccaagcattgggcctcaaaggctgtcatttgactcagccacattcatggaatctgaaaagcaggacgtgcatgagttcctgctggagaacctaaccaacgggggcatcctggagctgatgatgcgctacctgaaagccatgggccacaagttcttggtaaggtggcctccaggcttggcggaggtcgtgctcagcgtctaccacagctggaggaggcacagcaccagcctgcccaacccgctgctgagggactgcagcaacaagcacatcaaggacatgatgctgatgtctctctcctgcatggaactccagctggaccagtggctgctgaccaaaggcagaagctctgcagtgtctcctcggaactgccctgctggtatggtgaatggcagatttggacctgacttcccagggacccactgcctgggtgacctcctacagctgtcatttgcctcgtcccagcgcgacctgttcgaggatggttggctggagtttgtggtccgtgtttactggctgaaggctcgcttcctggcgctgcagggagacatggagcaggccctggagaactatgacatctgcacagaaatgctccagagttccaccgccatccaggtggaggcaggggctgaacgaagagacattgtcatccggctgcccaacctccataatgactctgtggtttccctggaggagattgataagaacctgaagtcgctggagcggtgccagtccctggaggagattcagcggctgtatgaagcaggcgactacaaggctgttgtgcatctgctccgccccactttgtgcaccagtgggtttgaccgggccaaacacctggagtttatgacttccattcctgagaggccagcccagctgcttcttctgcaggactccttgctccggctgaaggactatcggcagtgttttgagtgttccgatgtggctctgaacgaggctgtccagcagatggtgaactcaggtgaggctgccgccaaggaggagtgggtggccacagtgacccaactgctgatgggcatcgagcaggccctctctgcggacagcagtggtagcatcctgaaggtatcatcctccaccactggccttgtgcggctcaccaacaacctcatccaggtcattgactgcagcatggctgtgcaggaggaggccaaggagccccacgtctcttcagtgctaccctggatcattctacaccggatcatctggcaggaggaagacaccttccattctctgtgccaccagcagcagctccaaaacccagcggaggaagggatgtcagagacgcccatgctcccatcctccctcatgctgctgaacacagcccacgagtatttgggcagaaggtcctggtgctgcaattcagatggggctctgctgcgattctatgtgcgagtactccagaaggaactggctgcatccacctctgaagacacgcacccttacaaggaggagctggagacagccttggagcagtgcttctactgcctgtacagcttccccagcaagaagagtaaggccaggtacctggaggaacactcggcccagcaggtggatcttatatgggaggatgcactgttcatgtttgagtattttaagcccaagacccttcctgaatttgacagctataagaccagcaccgtgtctgctgacttggccaacctactgaagagaattgccaccattgtgcctcgcacagagaggccagcccttagcctggacaaagtctctgcctacattgagggaacttcaactgaggtaccctgcctcccagagggggctgacccctcccctccagtggtgaacgagctttactacctcctggctgattatcatttcaaaaacaaggagcagtccaaggccatcaagttctacatgcatgacatctgcatctgccccaataggtttgattcctgggcaggcatggctctggcccgggccagccgcattcaggacaagctgaactccaatgagctgaagagtgatgggcccatttggaagcatgccacgcccgtcttgaactgcttccgtcgggccctggagattgacagctccaacttgtccctatggattgagtatggcaccatgtcctatgccttgcactcattcgcctcacgtcaattgaagcagtggagaggcgagctgccccctgagctcgtgcagcagatggagggccggcgcgacagcatgctagagacagccaagcactgtttcacatcagcagcccgctgcgagggtgatggtgacgaggaggagtggctcatccactacatgctgggcaaggtggctgagaagcagcagcagccacccaccgtttacttgctgcactacaggcaggctggccactacctgcacgaggaggctgcccgctaccccaagaagatccactaccacaacccacctgagctggccatggaggccctggaggtgtactttcggctccatgcttccatcctgaagctcctggggaagcccgattctggggttggtgcagaggtcctggtcaactttatgaaggaggctgcagaaggaccctttgccaggggcgaggagaagaacacacccaaagcttcagaaaaggagaaggcctgcctggtggacgaggactcccactcttcagctgggacactgccgggccccggagcctccctcccctcctcctctggcccaggtctgacatccccaccttacacagccactccgattgaccacgattacgtcaaatgtaaaaaaccccaccagcaggcaacgccggacgaccgaagccaggacagcacagccgtagcactctcagactctagctcaacgcaggacttctttaatgagcccaccagcttactggaaggctccaggaaatcctacacagagaagaggctgcccattctcagttcccaagcaggagcgacgggtaaagatcttcagggggccacagaagaaagaggaaaaaacgaggagtcattggagagtacagaaggcttccgggctgcagagcaaggtgtccagaagcctgctgcagaaaccccagcctctgcttgcatccctggcaagccctcagcatccacacccaccctgtgggatgggaagaagagaggggacctcccaggggagccagtggccttcccccaggggctgccggctggtgctgaggagcagcggcagtttctcacagagcagtgcatcgcctccttccgcctgtgcctgagccgcttcccccagcactataagagtctctaccgtctggccttcctctacacctacagcaagacccaccggaacctccagtgggcccgcgacgtgttgctaggcagcagtatcccgtggcaacaactgcagcacatgccggcacaggggctcttctgcgagaggaacaagaccaatttcttcaacggcatctggcggatccccgtggacgagattgaccggccgggcagctttgcctggcacatgaaccgctccatcgtgctgctgctcaaggtgctggcccagctgcgggaccacagcaccctgctgaaggtgtcctccatgcttcagcggaccccagaccagggcaagaagtatctgcgagatgctgaccgccaggtcctggcgcagcgggccttcatcctcactgtgaaggtgctcgaagacacgctgagcgagctcgcagaggggtcagaacgcccagggcccaaggtctgtggcctccccggagccaggatgaccaccgatgtctcacacaaggccagtcctgaggatggccaggagggcctcccccagccgaagaagccccctctggctgatggctcagggccagggcccgagccaggaggcaaagtgggcctcctcaaccaccggcctgtggccatggatgcaggagacagtgcagaccaaagcggggagcggaaggataaagagagcccacgggcagggcccactgagcccatggacacgagtgaggccactgtttgccactcagacttggagcggacaccacccctgctgccaggtcgccccgcaagggaccggggccccgagagccggcccactgagctgtccctggaggagctgagcatcagtgcccggcagcagcccaccccgctcaccccagcccagcacccctcaccctttttttggttgcttttctaataaagatggaacagtt

SEQ ID NO: 427252 - DNA, 2397 bp, Homo sapiens
gggtgaggctcagcagagcccggggcacaggccggaggggctgcaggcgcgaggctgggttacgtgaggaagctgggggtttcgcgggcagctttagagccccagtcagggaaaccgaggccgggcttcctggctgcctcgcgagcctcttcatggctctcgccgccgccctgaggtgcctagaatgggttccggcctccggggaggttcccagtaaccgcaggagccaccattgatttggcgtctgctgggtgcaaagcccagcgcgctaaccctttactcgcgacctttcgcttcaccttcacagcagccctgcgaggagagttgtggactggggcaacctttgccagtgatgagaagtgatgctcgtggcagtgctgaatctctctgaatatgattcgaattgcagccttaaatgccagctccaccattgaggatgatcatgaaggaagctttaaaagtcacaaaacccagacaaaggaggctcaggaagcagaggcttttgcattgtaccacaaggcccttgatctgcagaaacatgaccggtttgaggagtctgccaaagcctaccatgagctcttggaggcgagcctgctgcgggaggcagtgatgctggactccacagatgtcaacctctggtataagattggacatgtggccctgaggctcatccggatccccctggctcgccatgcttttgaggaagggctgcggtgcaatcctgaccactggccctgtttggataacctaatcactgtcctgtacaccctcagtgattacacaacatgtctgtacttcatctgcaaagctttggagaaggattgccggtacagcaaagggctggtcctcaaggagaagatttttgaggagcagccttgtctccggaaggactctctcagaatgttcctcaaatgtgacatgtcgattcacgatgtttcggtgagtgcagctgagacacaggcgattgtagatgaggccttggggctgcgaaaaaagaggcaagcgctgattgtgcgggagaaggagccggacctgaaacttgtgcagcccattcctttcttcacctggaagtgcctcggagagagcttgctggccatgtacaatcatctcaccacctgtgagcccccacgtcccagccttggcaaaaggattgatttgtcggactaccaggaccccagccagcctcttgagtcctccatggtggtgacgccagttaacgtgatccagccaagcactgtcagcaccaacccagctgtggctgtcgccgagcctgtggtctcctacacctctgtggctacaaccagcttcccactgcacagtcctggtctgttggagacaggcgctcctgtgggtgatatttctgggggagataaatccaagaaaggggtaaaacggaagaagatttcagaagagagtggagaaacagcaaagcggcggtctgcccgtgtccgaaacaccaagtgcaaaaaagaagagaaagtagacttccaggagcttctgatgaagttcttgccgtccaggttaagaaagctggaccctgaggaggaagatgattcctttaataactatgaagtccagtcagaagccaaactggaaagcttcccaagcattgggcctcaaaggctgtcatttgactcagccacattcatggaatctgaaaagcaggacgtgcatgagttcctgctggagaacctaaccaacgggggcatcctggagctgatgatgcgctacctgaaagccatgggccacaagttcttggtaaggtggcctccaggcttggcggaggtcgtgctcagcgtctaccacagctggaggaggcacagcaccagcctgcccaacccgctgctgagggactgcagcaacaagcacatcaaggacatgatgctgatgtctctctcctgcatggaactccagctggaccagtggctgctgaccaaaggcagaagctctgcagtgtctcctcggaactgccctgctggtatggtgaatggcagatttggaccagccaggcctggaatgccccctgggcaggaccctgggcaggaccagaggcccacatggatgccactccccacacagcccccaggcctgcccagcccacctcctcatggcatcctccctgtacccaggtcaggctgtccacaccacatgggagcccagaggaggaggggcccgccttagccatgtgaaggtggattggtcgccatctgcacgccaggcggcatccttttctatgaagtgttgactttgtaaatctgcccacacccagctggccatatccacccctcgacgccgggatgagccggctctgcctgtgtcacagtggaggggtcctttagggccaggctcacccctcaccctttttttggttgcttttctaataaagatggaacagtt

SEQ ID NO: 427253 - DNA, 4629 bp, Homo sapiens
gggtgaggctcagcagagcccggggcacaggccggaggggctgcaggcgcgaggctgggttacgtgaggaagctgggggtttcgcgggcagctttagagccccagtcagggaaaccgaggccgggcttcctggctgcctcgcgagcctcttcatggctctcgccgccgccctgaggtgcctagaatgggttccggcctccggggaggttcccagtaaccgcaggagccaccattgatttggcgtctgctgggtgcaaagcccagcgcgctaaccctttactcgcgacctttcgcttcaccttcacagcagccctgcgaggagagttgtggactggggcaacctttgccagtgatgagaagtgatgctcgtggcagtgctgaatctctctgaatatgattcgaattgcagccttaaatgccagctccaccattgaggatgatcatgaaggaagctttaaaagtcacaaaacccagacaaaggaggctcaggaagcagaggcttttgcattgtaccacaaggcccttgatctgcagaaacatgaccggtttgaggagtctgccaaagcctaccatgagctcttggaggcgagcctgctgcgggaggcagtgatgctggactccacagatgtcaacctctggtataagattggacatgtggccctgaggctcatccggatccccctggctcgccatgcttttgaggaagggctgcggtgcaatcctgaccactggccctgtttggataacctaatcactgtcctgtacaccctcagtgattacacaacatgtctgtacttcatctgcaaagctttggagaaggattgccggtacagcaaagggctggtcctcaaggagaagatttttgaggagcagccttgtctccggaaggactctctcagaatgttcctcaaatgtgacatgtcgattcacgatgtttcggtgagtgcagctgagacacaggcgattgtagatgaggccttggggctgcgaaaaaagaggcaagcgctgattgtgcgggagaaggagccggacctgaaacttgtgcagcccattcctttcttcacctggaagtgcctcggagagagcttgctggccatgtacaatcatctcaccacctgtgagcccccacgtcccagccttggcaaaaggattgatttgtcggactaccaggaccccagccagcctcttgagtcctccatggtggtgacgccagttaacgtgatccagccaagcactgtcagcaccaacccagctgtggctgtcgccgagcctgtggtctcctacacctctgtggctacaaccagcttcccactgcacagtcctggtctgttggagacaggcgctcctgtgggtgatatttctgggggagataaatccaagaaaggggtaaaacggaagaagatttcagaagagagtggagaaacagcaaagcggcggtctgcccgtgtccgaaacaccaagtgcaaaaaagaagagaaagtagacttccaggagcttctgatgaagttcttgccgtccaggttaagaaagctggaccctgaggaggaagatgattcctttaataactatgaagtccagtcagaagccaaactggaaagcttcccaagcattgggcctcaaaggctgtcatttgactcagccacattcatggaatctgaaaagcaggacgtgcatgagttcctgctggagaacctaaccaacgggggcatcctggagctgatgatgcgctacctgaaagccatgggccacaagttcttggtaaggtggcctccaggcttggcggaggtcgtgctcagcgtctaccacagctggaggaggcacagcaccagcctgcccaacccgctgctgagggactgcagcaacaagcacatcaaggacatgatgctgatgtctctctcctgcatggaactccagctggaccagtggctgctgaccaaaggcagaagctctgcagtgtctcctcggaactgccctgctggtatggtgaatggcagatttggacctgacttcccagggacccactgcctgggtgacctcctacagctgtcatttgcctcgtcccagcgcgacctgttcgaggatggttggctggagtttgtggtccgtgtttactggctgaaggctcgcttcctggcgctgcagggagacatggagcaggccctggagaactatgacatctgcacagaaatgctccagagttccaccgccatccaggtggaggcaggggctgaacgaagagacattgtcatccggctgcccaacctccataatgactctgtggtttccctggaggagattgataagaacctgaagtcgctggagcggtgccagtccctggaggagattcagcggctgtatgaagcaggcgactacaaggctgttgtgcatctgctccgccccactttgtgcaccagtgggtttgaccgggccaaacacctggagtttatgacttccattcctgagaggccagcccagctgcttcttctgcaggactccttgctccggctgaaggactatcggcagtgttttgagtgttccgatgtggctctgaacgaggctgtccagcagatggtgaactcaggtgaggctgccgccaaggaggagtgggtggccacagtgacccaactgctgatgggcatcgagcaggccctctctgcggacagcagtggtagcatcctgaaggtatcatcctccaccactggccttgtgcggctcaccaacaacctcatccaggtcattgactgcagcatggctgtgcaggaggaggccaaggagccccacgtctcttcagtgctaccctggatcattctacaccggatcatctggcaggaggaagacaccttccattctctgtgccaccagcagcagctccaaaacccagcggaggaagggatgtcagagacgcccatgctcccatcctccctcatgctgctgaacacagcccacgagtatttgggcagaaggtcctggtgctgcaattcagatggggctctgctgcgattctatgtgcgagtactccagaaggaactggctgcatccacctctgaagacacgcacccttacaaggaggagctggagacagccttggagcagtgcttctactgcctgtacagcttccccagcaagaagagtaaggccaggtacctggaggaacactcggcccagcaggtggatcttatatgggaggatgcactgttcatgtttgagtattttaagcccaagacccttcctgaatttgacagctataagaccagcaccgtgtctgctgacttggccaacctactgaagagaattgccaccattgtgcctcgcacagagaggccagcccttagcctggacaaagtctctgcctacattgagggaacttcaactgaggtaccctgcctcccagagggggctgacccctcccctccagtggtgaacgagctttactacctcctggctgattatcatttcaaaaacaaggagcagtccaaggccatcaagttctacatgcatgacatctgcatctgccccaataggtttgattcctgggcaggcatggctctggcccgggccagccgcattcaggacaagctgaactccaatgagctgaagagtgatgggcccatttggaagcatgccacgcccgtcttgaactgcttccgtcgggccctggagattgacagctccaacttgtccctatggattgagtatggcaccatgtcctatgccttgcactcattcgcctcacgtcaattgaagcagtggagaggcgagctgccccctgagctcgtgcagcagatggagggccggcgcgacagcatgctagagacagccaagcactgtttcacatcagcagcccgctgcgagggtgatggtgacgaggaggagtggctcatccactacatgctgggcaaggtggctgagaagcagcagcagccacccaccgtttacttgctgcactacaggcaggctggccactacctgcacgaggaggctgcccgctaccccaagaagatccactaccacaacccacctgagctggccatggaggccctggaggtgacaccatgctggcccagggcggggaagcagggcaggggcaggctggtttctttatctccctgggcatgtggctcaaggttccagtgaccgtccttcaacctgccgcaaacttatctgtgttgagcagcttcatgtgcaattgaattaaaacatcatttcctctcttttcccaaggggtgtttatcatcctttctgggagagtgaccattttgttcttatctctcagaagaaaattgtctttcctcactaacacaggttctaagaacctgaccttggtgatgacagtcagtgctacatagcatctcccaggcccaggacattcacaccctgtagcctggcaggagggagggcaggcaccattgcctccagggtgcaaatgagacatccaaagcccagcctgtgcccaggctacccaggttggcaggggctgagctagggtgagcagcctgctctcttgacccccagtttggagtcttctgattgttgttcaagaaaagagcagttctttactccctggattttctctcatggtttccagagtgtttctgatgaatgctgtcactgttgcttatagcagtcttg

SEQ ID NO: 427254 - DNA, 3706 bp, Homo sapiens
gggtgaggctcagcagagcccggggcacaggccggaggggctgcaggcgcgaggctgggttacgtgaggaagctgggggtttcgcgggcagctttagagccccagtcagggaaaccgaggccgggcttcctggctgcctcgcgagcctcttcatggctctcgccgccgccctgaggtgcctagaatgggttccggcctccggggaggttcccagtaaccgcaggagccaccattgatttggcgtctgctgggtgcaaagcccagcgcgctaaccctttactcgcgacctttcgcttcaccttcacagcagccctgcgaggagagttgtggactggggcaacctttgccagtgatgagaagtgatgctcgtggcagtgctgaatctctctgaatatgattcgaattgcagccttaaatgccagctccaccattgaggatgatcatgaaggaagctttaaaagtcacaaaacccagacaaaggaggctcaggaagcagaggcttttgcattgtaccacaaggcccttgatctgcagaaacatgaccggtttgaggagtctgccaaagcctaccatgagctcttggaggcgagcctgctgcgggaggcagtgatgctggactccacagatgtcaacctctggtataagattggacatgtggccctgaggctcatccggatccccctggctcgccatgcttttgaggaagggctgcggtgcaatcctgaccactggccctgtttggataacctaatcactgtcctgtacaccctcagtgattacacaacatgtctgtacttcatctgcaaagctttggagaaggattgccggtacagcaaagggctggtcctcaaggagaagatttttgaggagcagccttgtctccggaaggactctctcagaatgttcctcaaatgtgacatgtcgattcacgatgtttcggtgagtgcagctgagacacaggcgattgtagatgaggccttggggctgcgaaaaaagaggcaagcgctgattgtgcgggagaaggagccggacctgaaacttgtgcagcccattcctttcttcacctggaagtgcctcggagagagcttgctggccatgtacaatcatctcaccacctgtgagcccccacgtcccagccttggcaaaaggattgatttgtcggactaccaggaccccagccagcctcttgagtcctccatggtggtgacgccagttaacgtgatccagccaagcactgtcagcaccaacccagctgtggctgtcgccgagcctgtggtctcctacacctctgtggctacaaccagcttcccactgcacagtcctggtctgttggagacaggcgctcctgtgggtgatatttctgggggagataaatccaagaaaggggtaaaacggaagaagatttcagaagagagtggagaaacagcaaagcggcggtctgcccgtgtccgaaacaccaagtgcaaaaaagaagagaaagtagacttccaggagcttctgatgaagttcttgccgtccaggttaagaaagctggaccctgaggaggaagatgattcctttaataactatgaagtccagtcagaagccaaactggaaagcttcccaagcattgggcctcaaaggctgtcatttgactcagccacattcatggaatctgaaaagcaggacgtgcatgagttcctgctggagaacctaaccaacgggggcatcctggagctgatgatgcgctacctgaaagccatgggccacaagttcttggtaaggtggcctccaggcttggcggaggtcgtgctcagcgtctaccacagctggaggaggcacagcaccagcctgcccaacccgctgctgagggactgcagcaacaagcacatcaaggacatgatgctgatgtctctctcctgcatggaactccagctggaccagtggctgctgaccaaaggcagaagctctgcagtgtctcctcggaactgccctgctggtatggtgaatggcagatttggacctgacttcccagggacccactgcctgggtgacctcctacagctgtcatttgcctcgtcccagcgcgacctgttcgaggatggttggctggagtttgtggtccgtgtttactggctgaaggctcgcttcctggcgctgcagggagacatggagcaggccctggagaactatgacatctgcacagaaatgctccagagttccaccgccatccaggtggaggcaggggctgaacgaagagacattgtcatccggctgcccaacctccataatgactctgtggtttccctggaggagattgataagaacctgaagtcgctggagcggtgccagtccctggaggagattcagcggctgtatgaagcaggcgactacaaggctgttgtgcatctgctccgccccactttgtgcaccagtgggtttgaccgggccaaacacctggagtttatgacttccattcctgagaggccagcccagctgcttcttctgcaggactccttgctccggctgaaggactatcggcagtgttttgagtgttccgatgtggctctgaacgaggctgtccagcagatggtgaactcaggtgaggctgccgccaaggaggagtgggtggccacagtgacccaactgctgatgggcatcgagcaggccctctctgcggacagcagtggtagcatcctgaaggtatcatcctccaccactggccttgtgcggctcaccaacaacctcatccaggtcattgactgcagcatggctgtgcaggaggaggccaaggagccccacgtctcttcagtgctaccctggatcattctacaccggatcatctggcaggaggaagacaccttccattctctgtgccaccagcagcagctccaaaacccagcggaggaagggatgtcagagacgcccatgctcccatcctccctcatgctgctgaacacagcccacgagtatttgggcagaaggtcctggtgctgcaattcagatggggctctgctgcgattctatgtgcgagtactccagaaggaactggctgcatccacctctgaagacacgcacccttacaaggaggagctggagacagccttggagcagtgcttctactgcctgtacagcttccccagcaagaagagtaaggccaggtacctggaggaacactcggcccagcaggtggatcttatatgggaggatgcactgttcatgtttgagtattttaagcccaagacccttcctgaatttgacagctataagaccagcaccgtgtctgctgacttggccaacctactgaagagaattgccaccattgtgcctcgcacagagaggccagcccttagcctggacaaagtctctgcctacattgagggaacttcaactgaggtaccctgcctcccagagggggctgacccctcccctccagtggtgaacgagctttactacctcctggctgattatcatttcaaaaacaaggagcagtccaaggccatcaagttctacatgcatgacatctgcatctgccccaataggtcagatatgcacagatggatgctgtgactgaggttcaccagatgtcagcattggttctctctgggctggtattttgatggataaagtgtgctcctttatattttcctatatggcttgaattgtgttttgataagcgtgtattgctttagtaaagccagtcaagtcactacttatttaaaaaggc

SEQ ID NO: 427255 - DNA, 1855 bp, Homo sapiens
gggtgaggctcagcagagcccggggcacaggccggaggggctgcaggcgcgaggctgggttacgtgaggaagctgggggtttcgcgggcagctttagagccccagtcagggaaaccgaggccgggcttcctggctgcctcgcgagcctcttcatggctctcgccgccgccctgaggtgcctagaatgggttccggcctccggggaggttcccagtaaccgcaggagccaccattgatttggcgtctgctgggtgcaaagcccagcgcgctaaccctttactcgcgacctttcgcttcaccttcacagcagccctgcgaggagagttgtggactggggcaacctttgccagtgatgagaagtgatgctcgtggcagtgctgaatctctctgaatatgattcgaattgcagccttaaatgccagctccaccattgaggatgatcatgaaggaagctttaaaagtcacaaaacccagacaaaggaggctcaggaagcagaggcttttgcattgtaccacaaggcccttgatctgcagaaacatgaccggtttgaggagtctgccaaagcctaccatgagctcttggaggcgagcctgctgcgggaggcagtgatgctggactccacagatgtcaacctctggtataagattggacatgtggccctgaggctcatccggatccccctggctcgccatgcttttgaggaagggctgcggtgcaatcctgaccactggccctgtttggataacctaatcactgtcctgtacaccctcagtgattacacaacatgtctgtacttcatctgcaaagctttggagaaggattgccggtacagcaaagggctggtcctcaaggagaagatttttgaggagcagccttgtctccggaaggactctctcagaatgttcctcaaatgtgacatgtcgattcacgatgtttcggtgagtgcagctgagacacaggcgattgtagatgaggccttggggctgcgaaaaaagaggcaagcgctgattgtgcgggagaaggagccggacctgaaacttgtgcagcccattcctttcttcacctggaagtgcctcggagagagcttgctggccatgtacaatcatctcaccacctgtgagcccccacgtcccagccttggcaaaaggattgatttgtcggactaccaggaccccagccagcctcttgagtcctccatggtggtgacgccagttaacgtgatccagccaagcactgtcagcaccaacccagctgtggctgtcgccgagcctgtggtctcctacacctctgtggctacaaccagcttcccactgcacagtcctggtctgttggagacaggcgctcctgtgggtgatatttctgggggagataaatccaagaaaggggtaaaacggaagaagatttcagaagagagtggagaaacagcaaagcggcggtctgcccgtgtccgaaacaccaagtgcaaaaaagaagagaaagtagacttccaggagcttctgatgaagttcttgccgtccaggttaagaaagctggaccctgaggaggaagatgattcctttaataactatgaagtccagtcagaagccaaactggaaagcttcccaagcattgggcctcaaaggctgtcatttgactcagccacattcatggaatctgaaaagcaggacgtgcatgagttcctgctggagaacctaaccaacgggggcatcctggagctgatgatgcgctctgctggggctcagtgggctgagctgatcatggttcttgggattttctccctaatctcccaccaatgatggcaaatgagatttggcagagtgggagttttccaggaaataaatagggtgagaagtc

SEQ ID NO: 427256 - DNA, 448 bp, Homo sapiens
ctgcagggtcgacgtcgtagagagtccccccccgacgtagcccgacaggggaccagccaggcctggaatgccccctgggcaggaccctgggcaggaccagaggcccacatggatgccactccccacacagcccccaggcctgcccagcccacctcctcatggcatcctccctgtacccaggtcaggctgtccacaccacatgggagcccagaggaggaggggcccgccttagccatgtgaaggtggattggtcgccatctgcacgccaggcggcatccttttctatgaagtgttgactttgtaaatctgcccacacccagctggccatatccacccctcgacgccgggatgagccggctctgcctgtgtcacagtggaggggtcctttagggccaggctcacccctcaccctttttttggttgcttttctaataaagatggaacagtt

SEQ ID NO: 427257 - DNA, 478 bp, Homo sapiens
agtggatgccctggggccagctcagtgaccatgcctggctgagcgaccagctctgggcttcagtgtcctccctggggcatagacaccaataggacatgcatcctaggatggttgtggaaatacgacagttcatgcaagcatgatgcctggaggtcttacagaacccagcaaggctcagggagtctcaggtcctgggctttgagttcatggtgttactgggtaaggttcacagtcccagcaccccacagctcagagccagagttgggtccctgcaggcctgagccaagtatttgcccagggtagaagccttggagcctgccagccagcacaaactacacagcataaaggcccaggacctggggggagcgggtgggggcgagataaagtgctcactgtgtgatgcggcaggcaggaagtgctcttggtacctttgtcttccagaggggaaactgaggcctgagccgagaagggatgggga

SEQ ID NO: 427258 - DNA, 2257 bp, Homo sapiens
gaacgagcctccgcggccatggcccggcgctcgccctagctccactgcacagatgccacggcggagccggcggggcatctggcggatccccgtggacgagattgaccggccgggcagctttgcctggcacatgaaccgctccatcgtgctgctgctcaaggtgctggcccagctgcgggaccacagcaccctgctgaaggtgtcctccatgcttcagcggaccccagaccagggcaagaagtatctgcgagatgctgaccgccaggtcctggcgcagcgggccttcatcctcactgtgaaggtgctcgaagacacgctgagcgagctcgcagaggggtcagaacgcccagggcccaaggtctgtggcctccccggagccaggatgaccaccgatgtctcacacaaggccagtcctgaggatggccaggagggcctcccccagccgaagaagccccctctggctgatggctcagggccagggcccgagccaggaggcaaagtgggcctcctcaaccaccggcctgtggccatggatgcaggagacagtgcagaccaaagcggggagcggaaggataaagagagcccacgggcagggcccactgagcccatggacacgagtgaggccactgtttgccactcagacttggagcggacaccacccctgctgccaggtcgccccgcaagggaccggggccccgagagccggcccactgagctgtccctggaggagctgagcatcagtgcccggcagcagcccaccccgctcaccccagcccagccagcccccgcccccgcccccgccaccaccacagggaccagggcagggggccacccggaggagccgctctcccggctcagccgcaagaggaagctcctggaggacacagagtcaggcaagacacttctgttggatgcctaccgtgtgtggcagcagggccagaagggtgtggcctatgacctgggccgtgtggagaggatcatgtcggagacctacatgctcatcaagcaggtggatgaggaggctgcgctggagcaggctgtgaagttctgccaggtccatcttggggctgccgcccagagacaggcctcgggggacacccccaccactccaaagcaccccaaagacagccgagagaacttctttcctgtgacagtggtgcccacagcccctgaccctgtgccagctgactctgtccagcggcccagtgatgctcacaccaagcctcgccctgcactagctgccgccacaactattatcacctgccctccgtcagcatcagcttccaccctggaccagtccaaggaccctgggcctccccggccacacaggcctgaagctacccccagcatggcctctctgggcccagaggggaaactgaggcctgagccgagaagggatggggaggctcaggaggctgcgagtgagactcagcccctgagctctcccccaacagctgccagctccaaggcccccagcagtgggagtgcccagccaccagagggtcacccaggcaagcctgagcccagccgggctaagtcccgccccctgcccaacatgccaaagctggtcatcccctccgccgccaccaagttcccccctgagatcaccgtcacgccacccaccccaaccctgctctcccccaaaggcagcatctcggaggagaccaagcagaagctgaagtcagccatcctttctgcccagtctgctgccaacgtgaggaaggagagcctatgccagccagccctggaggtcctggagacatccagccaggagtcctcgctggagagcgagacagacgaggacgacgactacatggacatttgaggggccactgcagccccaccgccacgccccaggggaccagccaggcctggaatgccccctgggcaggaccctgggcaggaccagaggcccacatggatgccactccccacacagcccccaggcctgcccagcccacctcctcatggcatcctccctgtacccaggtcaggctgtccacaccacatgggagcccagaggaggaggggcccgccttagccatgtgaaggtggattggtcgccatctgcacgccaggcggcatccttttctatgaagtgttgactttgtaaatctgcccacacccagctggccatatccacccctcgacgccgggatgagccggctctgcctgtgtcacagtggaggggtcctttagggccaggctcacccctcaccctttttttggttgcttttctaataaagatggaacagtt

SEQ ID NO: 427259 - DNA, 7087 bp, Homo sapiens
tgctgccggcggttctagaggatcccatcgcgtgatgagcagtgtaaggaactttaaaagtcacaaagaccagacaaaggaggctcaggaagcagaggcttttgcattgtaccacaaggcccttgatctgcagaaacatgaccggtttgaggagtctgccaaagcctaccatgagctcttggaggcgagcctgctgcgggaggcagtttcatccggtgatgagaaagaggggttgaaacaccctgggctgatactgaaatattccacttataagaacttggcccagctggcagcccagcgggaggatctggagacagccatggagttctacttagaggcagtgatgctggactccacagatgtcaacctctggtataagattggacatgtggccctgaggctcatccggatccccctggctcgccatgcttttgaggaagggctgcggtgcaatcctgaccactggccctgtttggataacctaatcactgtcctgtacaccctcagtgattacacaacatgtctgtacttcatctgcaaagctttggagaaggattgccggtacagcaaagggctggtcctcaaggagaagatttttgaggagcagccttgtctccggaaggactctctcagaatgttcctcaaatgtgacatgtcgattcacgatgtttcggtgagtgcagctgagacacaggcgattgtagatgaggccttggggctgcgaaaaaagaggcaagcgctgattgtgcgggagaaggagccggacctgaaacttgtgcagcccattcctttcttcacctggaagtgcctcggagagagcttgctggccatgtacaatcatctcaccacctgtgagcccccacgtcccagccttggcaaaaggattgatttgtcggactaccaggaccccagccagcctcttgagtcctccatggtggtgacgccagttaacgtgatccagccaagcactgtcagcaccaacccagctgtggctgtcgccgagcctgtggtctcctacacctctgtggctacaaccagcttcccactgcacagtcctggtctgttggagacaggcgctcctgtgggtgatatttctgggggagataaatccaagaaaggggtaaaacggaagaagatttcagaagagagtggagaaacagcaaagcggcggtctgcccgtgtccgaaacaccaagtgcaaaaaagaagagaaagtagacttccaggagcttctgatgaagttcttgccgtccaggttaagaaagctggaccctgaggaggaagatgattcctttaataactatgaagtccagtcagaagccaaactggaaagcttcccaagcattgggcctcaaaggctgtcatttgactcagccacattcatggaatctgaaaagcaggacgtgcatgagttcctgctggagaacctaaccaacgggggcatcctggagctgatgatgcgctacctgaaagccatgggccacaagttcttggtaaggtggcctccaggcttggcggaggtcgtgctcagcgtctaccacagctggaggaggcacagcaccagcctgcccaacccgctgctgagggactgcagcaacaagcacatcaaggacatgatgctgatgtctctctcctgcatggaactccagctggaccagtggctgctgaccaaaggcagaagctctgcagtgtctcctcggaactgccctgctggtatggtgaatggcagatttggacctgacttcccagggacccactgcctgggtgacctcctacagctgtcatttgcctcgtcccagcgcgacctgttcgaggatggttggctggagtttgtggtccgtgtttactggctgaaggctcgcttcctggcgctgcagggagacatggagcaggccctggagaactatgacatctgcacagaaatgctccagagttccaccgccatccaggtggaggcaggggctgaacgaagagacattgtcatccggctgcccaacctccataatgactctgtggtttccctggaggagattgataagaacctgaagtcgctggagcggtgccagtccctggaggagattcagcggctgtatgaagcaggcgactacaaggctgttgtgcatctgctccgccccactttgtgcaccagtgggtttgaccgggccaaacacctggagtttatgacttccattcctgagaggccagcccagctgcttcttctgcaggactccttgctccggctgaaggactatcggcagtgttttgagtgttccgatgtggctctgaacgaggctgtccagcagatggtgaactcaggtgaggctgccgccaaggaggagtgggtggccacagtgacccaactgctgatgggcatcgagcaggccctctctgcggacagcagtggtagcatcctgaaggtatcatcctccaccactggccttgtgcggctcaccaacaacctcatccaggtcattgactgcagcatggctgtgcaggaggaggccaaggagccccacgtctcttcagtgctaccctggatcattctacaccggatcatctggcaggaggaagacaccttccattctctgtgccaccagcagcagctccaaaacccagcggaggaagggatgtcagagacgcccatgctcccatcctccctcatgctgctgaacacagcccacgagtatttgggcagaaggtcctggtgctgcaattcagatggggctctgctgcgattctatgtgcgagtactccagaaggaactggctgcatccacctctgaagacacgcacccttacaaggaggagctggagacagccttggagcagtgcttctactgcctgtacagcttccccagcaagaagagtaaggccaggtacctggaggaacactcggcccagcaggtggatcttatatgggaggatgcactgttcatgtttgagtattttaagcccaagacccttcctgaatttgacagctataagaccagcaccgtgtctgctgacttggccaacctactgaagagaattgccaccattgtgcctcgcacagagaggccagcccttagcctggacaaagtctctgcctacattgagggaacttcaactgaggtaccctgcctcccagagggggctgacccctcccctccagtggtgaacgagctttactacctcctggctgattatcatttcaaaaacaaggagcagtccaaggccatcaagttctacatgcatgacatctgcatctgccccaataggtttgattcctgggcaggcatggctctggcccgggccagccgcattcaggacaagctgaactccaatgagctgaagagtgatgggcccatttggaagcatgccacgcccgtcttgaactgcttccgtcgggccctggagattgacagctccaacttgtccctatggattgagtatggcaccatgtcctatgccttgcactcattcgcctcacgtcaattgaagcagtggagaggcgagctgccccctgagctcgtgcagcagatggagggccggcgcgacagcatgctagagacagccaagcactgtttcacatcagcagcccgctgcgagggtgatggtgacgaggaggagtggctcatccactacatgctgggcaaggtggctgagaagcagcagcagccacccaccgtttacttgctgcactacaggcaggctggccactacctgcacgaggaggctgcccgctaccccaagaagatccactaccacaacccacctgagctggccatggaggccctggaggtgtactttcggctccatgcttccatcctgaagctcctggggaagcccgattctggggttggtgcagaggtcctggtcaactttatgaaggaggctgcagaaggaccctttgccaggggcgaggagaagaacacacccaaagcttcagaaaaggagaaggcctgcctggtggacgaggactcccactcttcagctgggacactgccgggccccggagcctccctcccctcctcctctggcccaggtctgacatccccaccttacacagccactccgattgaccacgattacgtcaaatgtaaaaaaccccaccagcaggcaacgccggacgaccgaagccaggacagcacagccgtagcactctcagactctagctcaacgcaggacttctttaatgagcccaccagcttactggaaggctccaggaaatcctacacagagaagaggctgcccattctcagttcccaagcaggagcgacgggtaaagatcttcagggggccacagaagaaagaggaaaaaacgaggagtcattggagagtacagaaggcttccgggctgcagagcaaggtgtccagaagcctgctgcagaaaccccagcctctgcttgcatccctggcaagccctcagcatccacacccaccctgtgggatgggaagaagagaggggacctcccaggggagccagtggccttcccccaggggctgccggctggtgctgaggagcagcggcagtttctcacagagcagtgcatcgcctccttccgcctgtgcctgagccgcttcccccagcactataagagtctctaccgtctggccttcctctacacctacagcaagacccaccggaacctccagtgggcccgcgacgtgttgctaggcagcagtatcccgtggcaacaactgcagcacatgccggcacaggggctcttctgcgagaggaacaagaccaatttcttcaacggcatctggcggatccccgtggacgagattgaccggccgggcagctttgcctggcacatgaaccgctccatcgtgctgctgctcaaggtgctggcccagctgcgggaccacagcaccctgctgaaggtgtcctccatgcttcagcggaccccagaccagggcaagaagtatctgcgagatgctgaccgccaggtcctggcgcagcgggccttcatcctcactgtgaaggtgctcgaagacacgctgagcgagctcgcagaggggtcagaacgcccagggcccaaggtctgtggcctccccggagccaggatgaccaccgatgtctcacacaaggccagtcctgaggatggccaggagggcctcccccagccgaagaagccccctctggctgatggctcagggccagggcccgagccaggaggcaaagtgggcctcctcaaccaccggcctgtggccatggatgcaggagacagtgcagaccaaagcggggagcggaaggataaagagagcccacgggcagggcccactgagcccatggacacgagtgaggccactgtttgccactcagacttggagcggacaccacccctgctgccaggtcgccccgcaagggaccggggccccgagagccggcccactgagctgtccctggaggagctgagcatcagtgcccggcagcagcccaccccgctcaccccagcccagccagcccccgcccccgcccccgccaccaccacagggaccagggcagggggccacccggaggagccgctctcccggctcagccgcaagaggaagctcctggaggacacagagtcaggcaagacacttctgttggatgcctaccgtgtgtggcagcagggccagaagggtgtggcctatgacctgggccgtgtggagaggatcatgtcggagacctacatgctcatcaagcaggtggatgaggaggctgcgctggagcaggctgtgaagttctgccaggtccatcttggggctgccgcccagagacaggcctcgggggacacccccaccactccaaagcaccccaaagacagccgagagaacttctttcctgtgacagtggtgcccacagcccctgaccctgtgccagctgactctgtccagcggcccagtgatgctcacaccaagcctcgccctgcactagctgccgccacaactattatcacctgccctccgtcagcatcagcttccaccctggaccagtccaaggaccctgggcctccccggccacacaggcctgaagctacccccagcatggcctctctgggcccagagggagaagagctggcgagagtggcagagggcaccagcttcccgcctcaggagccacggcacagtccgcaggtgaagatggcccccacaagttccccggcagagccacactgctggccggcagaggctgccctgggcacaggcgctgagcccacctgcagccaggaggggaaactgaggcctgagccgagaagggatggggaggctcaggaggctgcgagtgagactcagcccctgagctctcccccaacagctgccagctccaaggcccccagcagtgggagtgcccagccaccagagggtcacccaggcaagcctgagcccagccgggctaagtcccgccccctgcccaacatgccaaagctggtcatcccctccgccgccaccaagttcccccctgagatcaccgtcacgccacccaccccaaccctgctctcccccaaaggcagcatctcggaggagaccaagcagaagctgaagtcagccatcctttctgcccagtctgctgccaacgtgaggaaggagagcctatgccagccagccctggaggtcctggagacatccagccaggagtcctcgctggagagcgagacagacgaggacgacgactacatggacatttgaggggccactgcagccccaccgccacgccccaggggaccagccaggcctggaatgccccctgggcaggaccctgggcaggaccagaggcccacatggatgccactccccacacagcccccaggcctgcccagcccacctcctcatggcatcctccctgtacccaggtcaggctgtccacaccacatgggagcccagaggaggaggggcccgccttagccatgtgaaggtggattggtcgccatctgcacgccaggcggcatccttttctatgaagtgttgactttgtaaatctgcccacacccagctggccatatccacccctcgacgccgggatgagccggctctgcctgtgtcacagtggaggggtcctttagggccaggctcacccctcaccctttttttggttgcttttctaataaagatggaacagtt

SEQ ID NO: 427260 - DNA, 7675 bp, Homo sapiens
gggtgaggctcagcagagcccggggcacaggccggaggggctgcaggcgcgaggctgggttacgtgaggaagctgggggtttcgcgggcagctttagagccccagtcagggaaaccgaggccgggcttcctggctgcctcgcgagcctcttcatggctctcgccgccgccctgaggtgcctagaatgggttccggcctccggggaggttcccagtaaccgcaggagccaccattgatttggcgtctgctgggtgcaaagcccagcgcgctaaccctttactcgcgacctttcgcttcaccttcacagcagccctgcgaggagagttgtggactggggcaacctttgccagtgatgagaagtgatgctcgtggcagtgctgaatctctctgaatatgattcgaattgcagccttaaatgccagctccaccattgaggatgatcatgaaggaagctttaaaagtcacaaaacccagacaaaggaggctcaggaagcagaggcttttgcattgtaccacaaggcccttgatctgcagaaacatgaccggtttgaggagtctgccaaagcctaccatgagctcttggaggcgagcctgctgcgggaggcagtgatgctggactccacagatgtcaacctctggtataagattggacatgtggccctgaggctcatccggatccccctggctcgccatgcttttgaggaagggctgcggtgcaatcctgaccactggccctgtttggataacctaatcactgtcctgtacaccctcagtgattacacaacatgtctgtacttcatctgcaaagctttggagaaggattgccggtacagcaaagggctggtcctcaaggagaagatttttgaggagcagccttgtctccggaaggactctctcagaatgttcctcaaatgtgacatgtcgattcacgatgtttcggtgagtgcagctgagacacaggcgattgtagatgaggccttggggctgcgaaaaaagaggcaagcgctgattgtgcgggagaaggagccggacctgaaacttgtgcagcccattcctttcttcacctggaagtgcctcggagagagcttgctggccatgtacaatcatctcaccacctgtgagcccccacgtcccagccttggcaaaaggattgatttgtcggactaccaggaccccagccagcctcttgagtcctccatggtggtgacgccagttaacgtgatccagccaagcactgtcagcaccaacccagctgtggctgtcgccgagcctgtggtctcctacacctctgtggctacaaccagcttcccactgcacagtcctggtctgttggagacaggcgctcctgtgggtgatatttctgggggagataaatccaagaaaggggtaaaacggaagaagatttcagaagagagtggagaaacagcaaagcggcggtctgcccgtgtccgaaacaccaagtgcaaaaaagaagagaaagtagacttccaggagcttctgatgaagttcttgccgtccaggttaagaaagctggaccctgaggaggaagatgattcctttaataactatgaagtccagtcagaagccaaactggaaagcttcccaagcattgggcctcaaaggctgtcatttgactcagccacattcatggaatctgaaaagcaggacgtgcatgagttcctgctggagaacctaaccaacgggggcatcctggagctgatgatgcgctacctgaaagccatgggccacaagttcttggtaaggtggcctccaggcttggcggaggtcgtgctcagcgtctaccacagctggaggaggcacagcaccagcctgcccaacccgctgctgagggactgcagcaacaagcacatcaaggacatgatgctgatgtctctctcctgcatggaactccagctggaccagtggctgctgaccaaaggcagaagctctgcagtgtctcctcggaactgccctgctggtatggtgaatggcagatttggacctgacttcccagggacccactgcctgggtgacctcctacagctgtcatttgcctcgtcccagcgcgacctgttcgaggatggttggctggagtttgtggtccgtgtttactggctgaaggctcgcttcctggcgctgcagggagacatggagcaggccctggagaactatgacatctgcacagaaatgctccagagttccaccgccatccaggtggaggcaggggctgaacgaagagacattgtcatccggctgcccaacctccataatgactctgtggtttccctggaggagattgataagaacctgaagtcgctggagcggtgccagtccctggaggagattcagcggctgtatgaagcaggcgactacaaggctgttgtgcatctgctccgccccactttgtgcaccagtgggtttgaccgggccaaacacctggagtttatgacttccattcctgagaggccagcccagctgcttcttctgcaggactccttgctccggctgaaggactatcggcagtgttttgagtgttccgatgtggctctgaacgaggctgtccagcagatggtgaactcaggtgaggctgccgccaaggaggagtgggtggccacagtgacccaactgctgatgggcatcgagcaggccctctctgcggacagcagtggtagcatcctgaaggtatcatcctccaccactggccttgtgcggctcaccaacaacctcatccaggtcattgactgcagcatggctgtgcaggaggaggccaaggagccccacgtctcttcagtgctaccctggatcattctacaccggatcatctggcaggaggaagacaccttccattctctgtgccaccagcagcagctccaaaacccagcggaggaagggatgtcagagacgcccatgctcccatcctccctcatgctgctgaacacagcccacgagtatttgggcagaaggtcctggtgctgcaattcagatggggctctgctgcgattctatgtgcgagtactccagaaggaactggctgcatccacctctgaagacacgcacccttacaaggaggagctggagacagccttggagcagtgcttctactgcctgtacagcttccccagcaagaagagtaaggccaggtacctggaggaacactcggcccagcaggtggatcttatatgggaggatgcactgttcatgtttgagtattttaagcccaagacccttcctgaatttgacagctataagaccagcaccgtgtctgctgacttggccaacctactgaagagaattgccaccattgtgcctcgcacagagaggccagcccttagcctggacaaagtctctgcctacattgagggaacttcaactgaggtaccctgcctcccagagggggctgacccctcccctccagtggtgaacgagctttactacctcctggctgattatcatttcaaaaacaaggagcagtccaaggccatcaagttctacatgcatgacatctgcatctgccccaataggtttgattcctgggcaggcatggctctggcccgggccagccgcattcaggacaagctgaactccaatgagctgaagagtgatgggcccatttggaagcatgccacgcccgtcttgaactgcttccgtcgggccctggagattgacagctccaacttgtccctatggattgagtatggcaccatgtcctatgccttgcactcattcgcctcacgtcaattgaagcagtggagaggcgagctgccccctgagctcgtgcagcagatggagggccggcgcgacagcatgctagagacagccaagcactgtttcacatcagcagcccgctgcgagggtgatggtgacgaggaggagtggctcatccactacatgctgggcaaggtggctgagaagcagcagcagccacccaccgtttacttgctgcactacaggcaggctggccactacctgcacgaggaggctgcccgctaccccaagaagatccactaccacaacccacctgagctggccatggaggccctggaggtgtactttcggctccatgcttccatcctgaagctcctggggaagcccgattctggggttggtgcagaggtcctggtcaactttatgaaggaggctgcagaaggaccctttgccaggggcgaggagaagaacacacccaaagcttcagaaaaggagaaggcctgcctggtggacgaggactcccactcttcagctgggacactgccgggccccggagcctccctcccctcctcctctggcccaggtctgacatccccaccttacacagccactccgattgaccacgattacgtcaaatgtaaaaaaccccaccagcaggcaacgccggacgaccgaagccaggacagcacagccgtagcactctcagactctagctcaacgcaggacttctttaatgagcccaccagcttactggaaggctccaggaaatcctacacagagaagaggctgcccattctcagttcccaagcaggagcgacgggtaaagatcttcagggggccacagaagaaagaggaaaaaacgaggagtcattggagagtacagaaggcttccgggctgcagagcaaggtgtccagaagcctgctgcagaaaccccagcctctgcttgcatccctggcaagccctcagcatccacacccaccctgtgggatgggaagaagagaggggacctcccaggggagccagtggccttcccccaggggctgccggctggtgctgaggagcagcggcagtttctcacagagcagtgcatcgcctccttccgcctgtgcctgagccgcttcccccagcactataagagtctctaccgtctggccttcctctacacctacagcaagacccaccggaacctccagtgggcccgcgacgtgttgctaggcagcagtatcccgtggcaacaactgcagcacatgccggcacaggggctcttctgcgagaggaacaagaccaatttcttcaacggcatctggcggatccccgtggacgagattgaccggccgggcagctttgcctggcacatgaaccgctccatcgtgctgctgctcaaggtgctggcccagctgcgggaccacagcaccctgctgaaggtgtcctccatgcttcagcggaccccagaccagggcaagaagtatctgcgagatgctgaccgccaggtcctggcgcagcgggccttcatcctcactgtgaaggtgctcgaagacacgctgagcgagctcgcagaggggtcagaacgcccagggcccaaggtctgtggcctccccggagccaggatgaccaccgatgtctcacacaaggccagtcctgaggatggccaggagggcctcccccagccgaagaagccccctctggctgatggctcagggccagggcccgagccaggaggcaaagtgggcctcctcaaccaccggcctgtggccatggatgcaggagacagtgcagaccaaagcggggagcggaaggataaagagagcccacgggcagggcccactgagcccatggacacgagtgaggccactgtttgccactcagacttggagcggacaccacccctgctgccaggtcgccccgcaagggaccggggccccgagagccggcccactgagctgtccctggaggagctgagcatcagtgcccggcagcagcccaccccgctcaccccagcccagccagcccccgcccccgcccccgccaccaccacagggaccagggcagggggccacccggaggagccgctctcccggctcagccgcaagaggaagctcctggaggacacagagtcaggcaagacacttctgttggatgcctaccgtgtgtggcagcagggccagaagggtgtggcctatgacctgggccgtgtggagaggatcatgtcggagacctacatgctcatcaagcaggtggatgaggaggctgcgctggagcaggctgtgaagttctgccaggtccatcttggggctgccgcccagagacaggcctcgggggacacccccaccactccaaagcaccccaaagacagccgagagaacttctttcctgtgacagtggtgcccacagcccctgaccctgtgccagctgactctgtccagcggcccagtgatgctcacaccaagcctcgccctgcactagctgccgccacaactattatcacctgccctccgtcagcatcagcttccaccctggaccagtccaaggaccctgggcctccccggccacacaggcctgaagctacccccagcatggcctctctgggcccaggccctcccctgcttctccctccctgcctcaaggacccagcctgtttccttgccgcagaccctgcactggcccacagcctgtgtcacccctggaggctcacctgtcttcccagttgaatttcctacccatctgaaaaacgagacagccactctgcagaagtgcccagcagaaggcaggcctaagagcccccacagactgtgcgcctgagtggaggttgagttgagaagtcttcctcagctctttcccacggtggctcaagcagcaagcaggtgctgatgttttcacctgatgccatccacactgctttgaggattgtgaacatagggagaagagctggcgagagtggcagagggcaccagcttcccgcctcaggagccacggcacagtccgcaggtgaagatggcccccacaagttccccggcagagccacactgctggccggcagaggctgccctgggcacaggcgctgagcccacctgcagccaggaggggaaactgaggcctgagccgagaagggatggggaggctcaggaggctgcgagtgagactcagcccctgagctctcccccaacagctgccagctccaaggcccccagcagtgggagtgcccagccaccagagggtcacccaggcaagcctgagcccagccgggctaagtcccgccccctgcccaacatgccaaagctggtcatcccctccgccgccaccaagttcccccctgagatcaccgtcacgccacccaccccaaccctgctctcccccaaaggcagcatctcggaggagaccaagcagaagctgaagtcagccatcctttctgcccagtctgctgccaacgtgaggaaggagagcctatgccagccagccctggaggtcctggagacatccagccaggagtcctcgctggagagcgagacagacgaggacgacgactacatggacatttgaggggccactgcagccccaccgccacgccccaggggaccagccaggcctggaatgccccctgggcaggaccctgggcaggaccagaggcccacatggatgccactccccacacagcccccaggcctgcccagcccacctcctcatggcatcctccctgtacccaggtcaggctgtccacaccacatgggagcccagaggaggaggggcccgccttagccatgtgaaggtggattggtcgccatctgcacgccaggcggcatccttttctatgaagtgttgactttgtaaatctgcccacacccagctggccatatccacccctcgacgccgggatgagccggctctgcctgtgtcacagtggaggggtcctttagggccaggctcacccctcaccctttttttggttgcttttctaataaagatggaacagtt

SEQ ID NO: 427261 - DNA, 2470 bp, Homo sapiens
gccccgggctgggagctggctcgtgggggcgtgcgctgcgcgaaagcgaaagccgcccgccagagcaactttgcggcggaaggcgccgacgaggagctgtgccgtgccgctcttggggatgggcatctggcggatccccgtggacgagattgaccggccgggcagctttgcctggcacatgaaccgctccatcgtgctgctgctcaaggtgctggcccagctgcgggaccacagcaccctgctgaaggtgtcctccatgcttcagcggaccccagaccagggcaagaagtatctgcgagatgctgaccgccaggtcctggcgcagcgggccttcatcctcactgtgaaggtgctcgaagacacgctgagcgagctcgcagaggggtcagaacgcccagggcccaaggtctgtggcctccccggagccaggatgaccaccgatgtctcacacaaggccagtcctgaggatggccaggagggcctcccccagccgaagaagccccctctggctgatggctcagggccagggcccgagccaggaggcaaagtgggcctcctcaaccaccggcctgtggccatggatgcaggagacagtgcagaccaaagcggggagcggaaggataaagagagcccacgggcagggcccactgagcccatggacacgagtgaggccactgtttgccactcagacttggagcggacaccacccctgctgccaggtcgccccgcaagggaccggggccccgagagccggcccactgagctgtccctggaggagctgagcatcagtgcccggcagcagcccaccccgctcaccccagcccagccagcccccgcccccgcccccgccaccaccacagggaccagggcagggggccacccggaggagccgctctcccggctcagccgcaagaggaagctcctggaggacacagagtcaggcaagacacttctgttggatgcctaccgtgtgtggcagcagggccagaagggtgtggcctatgacctgggccgtgtggagaggatcatgtcggagacctacatgctcatcaagcaggtggatgaggaggctgcgctggagcaggctgtgaagttctgccaggtccatcttggggctgccgcccagagacaggcctcgggggacacccccaccactccaaagcaccccaaagacagccgagagaacttctttcctgtgacagtggtgcccacagcccctgaccctgtgccagctgactctgtccagcggcccagtgatgctcacaccaagcctcgccctgcactagctgccgccacaactattatcacctgccctccgtcagcatcagcttccaccctggaccagtccaaggaccctgggcctccccggccacacaggcctgaagctacccccagcatggcctctctgggcccagagggagaagagctggcgagagtggcagagggcaccagcttcccgcctcaggagccacggcacagtccgcaggtgaagatggcccccacaagttccccggcagagccacactgctggccggcagaggctgccctgggcacaggcgctgagcccacctgcagccaggaggggaaactgaggcctgagccgagaagggatggggaggctcaggaggctgcgagtgagactcagcccctgagctctcccccaacagctgccagctccaaggcccccagcagtgggagtgcccagccaccagagggtcacccaggcaagcctgagcccagccgggctaagtcccgccccctgcccaacatgccaaagctggtcatcccctccgccgccaccaagttcccccctgagatcaccgtcacgccacccaccccaaccctgctctcccccaaaggcagcatctcggaggagaccaagcagaagctgaagtcagccatcctttctgcccagtctgctgccaacgtgaggaaggagagcctatgccagccagccctggaggtcctggagacatccagccaggagtcctcgctggagagcgagacagacgaggacgacgactacatggacatttgaggggccactgcagccccaccgccacgccccaggggaccagccaggcctggaatgccccctgggcaggaccctgggcaggaccagaggcccacatggatgccactccccacacagcccccaggcctgcccagcccacctcctcatggcatcctccctgtacccaggtcaggctgtccacaccacatgggagcccagaggaggaggggcccgccttagccatgtgaaggtggattggtcgccatctgcacgccaggcggcatccttttctatgaagtgttgactttgtaaatctgcccacacccagctggccatatccacccctcgacgccgggatgagccggctctgcctgtgtcacagtggaggggtcctttagggccaggctcacccctcaccctttttttggttgcttttctaataaagatggaacagtt

SEQ ID NO: 427262 - DNA, 7281 bp, Homo sapiens
gggtgaggctcagcagagcccggggcacaggccggaggggctgcaggcgcgaggctgggttacgtgaggaagctgggggtttcgcgggcagctttagagccccagtcagggaaaccgaggccgggcttcctggctgcctcgcgagcctcttcatggctctcgccgccgccctgaggtgcctagaatgggttccggcctccggggaggttcccagtaaccgcaggagccaccattgatttggcgtctgctgggtgcaaagcccagcgcgctaaccctttactcgcgacctttcgcttcaccttcacagcagccctgcgaggagagttgtggactggggcaacctttgccagtgatgagaagtgatgctcgtggcagtgctgaatctctctgaatatgattcgaattgcagccttaaatgccagctccaccattgaggatgatcatgaaggaagctttaaaagtcacaaaacccagacaaaggaggctcaggaagcagaggcttttgcattgtaccacaaggcccttgatctgcagaaacatgaccggtttgaggagtctgccaaagcctaccatgagctcttggaggcgagcctgctgcgggaggcagtgatgctggactccacagatgtcaacctctggtataagattggacatgtggccctgaggctcatccggatccccctggctcgccatgcttttgaggaagggctgcggtgcaatcctgaccactggccctgtttggataacctaatcactgtcctgtacaccctcagtgattacacaacatgtctgtacttcatctgcaaagctttggagaaggattgccggtacagcaaagggctggtcctcaaggagaagatttttgaggagcagccttgtctccggaaggactctctcagaatgttcctcaaatgtgacatgtcgattcacgatgtttcggtgagtgcagctgagacacaggcgattgtagatgaggccttggggctgcgaaaaaagaggcaagcgctgattgtgcgggagaaggagccggacctgaaacttgtgcagcccattcctttcttcacctggaagtgcctcggagagagcttgctggccatgtacaatcatctcaccacctgtgagcccccacgtcccagccttggcaaaaggattgatttgtcggactaccaggaccccagccagcctcttgagtcctccatggtggtgacgccagttaacgtgatccagccaagcactgtcagcaccaacccagctgtggctgtcgccgagcctgtggtctcctacacctctgtggctacaaccagcttcccactgcacagtcctggtctgttggagacaggcgctcctgtgggtgatatttctgggggagataaatccaagaaaggggtaaaacggaagaagatttcagaagagagtggagaaacagcaaagcggcggtctgcccgtgtccgaaacaccaagtgcaaaaaagaagagaaagtagacttccaggagcttctgatgaagttcttgccgtccaggttaagaaagctggaccctgaggaggaagatgattcctttaataactatgaagtccagtcagaagccaaactggaaagcttcccaagcattgggcctcaaaggctgtcatttgactcagccacattcatggaatctgaaaagcaggacgtgcatgagttcctgctggagaacctaaccaacgggggcatcctggagctgatgatgcgctacctgaaagccatgggccacaagttcttggtaaggtggcctccaggcttggcggaggtcgtgctcagcgtctaccacagctggaggaggcacagcaccagcctgcccaacccgctgctgagggactgcagcaacaagcacatcaaggacatgatgctgatgtctctctcctgcatggaactccagctggaccagtggctgctgaccaaaggcagaagctctgcagtgtctcctcggaactgccctgctggtatggtgaatggcagatttggacctgacttcccagggacccactgcctgggtgacctcctacagctgtcatttgcctcgtcccagcgcgacctgttcgaggatggttggctggagtttgtggtccgtgtttactggctgaaggctcgcttcctggcgctgcagggagacatggagcaggccctggagaactatgacatctgcacagaaatgctccagagttccaccgccatccaggtggaggcaggggctgaacgaagagacattgtcatccggctgcccaacctccataatgactctgtggtttccctggaggagattgataagaacctgaagtcgctggagcggtgccagtccctggaggagattcagcggctgtatgaagcaggcgactacaaggctgttgtgcatctgctccgccccactttgtgcaccagtgggtttgaccgggccaaacacctggagtttatgacttccattcctgagaggccagcccagctgcttcttctgcaggactccttgctccggctgaaggactatcggcagtgttttgagtgttccgatgtggctctgaacgaggctgtccagcagatggtgaactcaggtgaggctgccgccaaggaggagtgggtggccacagtgacccaactgctgatgggcatcgagcaggccctctctgcggacagcagtggtagcatcctgaaggtatcatcctccaccactggccttgtgcggctcaccaacaacctcatccaggtcattgactgcagcatggctgtgcaggaggaggccaaggagccccacgtctcttcagtgctaccctggatcattctacaccggatcatctggcaggaggaagacaccttccattctctgtgccaccagcagcagctccaaaacccagcggaggaagggatgtcagagacgcccatgctcccatcctccctcatgctgctgaacacagcccacgagtatttgggcagaaggtcctggtgctgcaattcagatggggctctgctgcgattctatgtgcgagtactccagaaggaactggctgcatccacctctgaagacacgcacccttacaaggaggagctggagacagccttggagcagtgcttctactgcctgtacagcttccccagcaagaagagtaaggccaggtacctggaggaacactcggcccagcaggtggatcttatatgggaggatgcactgttcatgtttgagtattttaagcccaagacccttcctgaatttgacagctataagaccagcaccgtgtctgctgacttggccaacctactgaagagaattgccaccattgtgcctcgcacagagaggccagcccttagcctggacaaagtctctgcctacattgagggaacttcaactgaggtaccctgcctcccagagggggctgacccctcccctccagtggtgaacgagctttactacctcctggctgattatcatttcaaaaacaaggagcagtccaaggccatcaagttctacatgcatgacatctgcatctgccccaataggtttgattcctgggcaggcatggctctggcccgggccagccgcattcaggacaagctgaactccaatgagctgaagagtgatgggcccatttggaagcatgccacgcccgtcttgaactgcttccgtcgggccctggagattgacagctccaacttgtccctatggattgagtatggcaccatgtcctatgccttgcactcattcgcctcacgtcaattgaagcagtggagaggcgagctgccccctgagctcgtgcagcagatggagggccggcgcgacagcatgctagagacagccaagcactgtttcacatcagcagcccgctgcgagggtgatggtgacgaggaggagtggctcatccactacatgctgggcaaggtggctgagaagcagcagcagccacccaccgtttacttgctgcactacaggcaggctggccactacctgcacgaggaggctgcccgctaccccaagaagatccactaccacaacccacctgagctggccatggaggccctggaggtgtactttcggctccatgcttccatcctgaagctcctggggaagcccgattctggggttggtgcagaggtcctggtcaactttatgaaggaggctgcagaaggaccctttgccaggggcgaggagaagaacacacccaaagcttcagaaaaggagaaggcctgcctggtggacgaggactcccactcttcagctgggacactgccgggccccggagcctccctcccctcctcctctggcccaggtctgacatccccaccttacacagccactccgattgaccacgattacgtcaaatgtaaaaaaccccaccagcaggcaacgccggacgaccgaagccaggacagcacagccgtagcactctcagactctagctcaacgcaggacttctttaatgagcccaccagcttactggaaggctccaggaaatcctacacagagaagaggctgcccattctcagttcccaagcaggagcgacgggtaaagatcttcagggggccacagaagaaagaggaaaaaacgaggagtcattggagagtacagaaggcttccgggctgcagagcaaggtgtccagaagcctgctgcagaaaccccagcctctgcttgcatccctggcaagccctcagcatccacacccaccctgtgggatgggaagaagagaggggacctcccaggggagccagtggccttcccccaggggctgccggctggtgctgaggagcagcggcagtttctcacagagcagtgcatcgcctccttccgcctgtgcctgagccgcttcccccagcactataagagtctctaccgtctggccttcctctacacctacagcaagacccaccggaacctccagtgggcccgcgacgtgttgctaggcagcagtatcccgtggcaacaactgcagcacatgccggcacaggggctcttctgcgagaggaacaagaccaatttcttcaacggcatctggcggatccccgtggacgagattgaccggccgggcagctttgcctggcacatgaaccgctccatcgtgctgctgctcaaggtgctggcccagctgcgggaccacagcaccctgctgaaggtgtcctccatgcttcagcggaccccagaccagggcaagaagtatctgcgagatgctgaccgccaggtcctggcgcagcgggccttcatcctcactgtgaaggtgctcgaagacacgctgagcgagctcgcagaggggtcagaacgcccagggcccaaggtctgtggcctccccggagccaggatgaccaccgatgtctcacacaaggccagtcctgaggatggccaggagggcctcccccagccgaagaagccccctctggctgatggctcagggccagggcccgagccaggaggcaaagtgggcctcctcaaccaccggcctgtggccatggatgcaggagacagtgcagaccaaagcggggagcggaaggataaagagagcccacgggcagggcccactgagcccatggacacgagtgaggccactgtttgccactcagacttggagcggacaccacccctgctgccaggtcgccccgcaagggaccggggccccgagagccggcccactgagctgtccctggaggagctgagcatcagtgcccggcagcagcccaccccgctcaccccagcccagccagcccccgcccccgcccccgccaccaccacagggaccagggcagggggccacccggaggagccgctctcccggctcagccgcaagaggaagctcctggaggacacagagtcaggcaagacacttctgttggatgcctaccgtgtgtggcagcagggccagaagggtgtggcctatgacctgggccgtgtggagaggatcatgtcggagacctacatgctcatcaagcaggtggatgaggaggctgcgctggagcaggctgtgaagttctgccaggtccatcttggggctgccgcccagagacaggcctcgggggacacccccaccactccaaagcaccccaaagacagccgagagaacttctttcctgtgacagtggtgcccacagcccctgaccctgtgccagctgactctgtccagcggcccagtgatgctcacaccaagcctcgccctgcactagctgccgccacaactattatcacctgccctccgtcagcatcagcttccaccctggaccagtccaaggaccctgggcctccccggccacacaggcctgaagctacccccagcatggcctctctgggcccagagggagaagagctggcgagagtggcagagggcaccagcttcccgcctcaggagccacggcacagtccgcaggtgaagatggcccccacaagttccccggcagagccacactgctggccggcagaggctgccctgggcacaggcgctgagcccacctgcagccaggaggggaaactgaggcctgagccgagaagggatggggaggctcaggaggctgcgagtgagactcagcccctgagctctcccccaacagctgccagctccaaggcccccagcagtgggagtgcccagccaccagagggtcacccaggcaagcctgagcccagccgggctaagtcccgccccctgcccaacatgccaaagctggtcatcccctccgccgccaccaagttcccccctgagatcaccgtcacgccacccaccccaaccctgctctcccccaaaggcagcatctcggaggagaccaagcagaagctgaagtcagccatcctttctgcccagtctgctgccaacgtgaggaaggagagcctatgccagccagccctggaggtcctggagacatccagccaggagtcctcgctggagagcgagacagacgaggacgacgactacatggacatttgaggggccactgcagccccaccgccacgccccaggggaccagccaggcctggaatgccccctgggcaggaccctgggcaggaccagaggcccacatggatgccactccccacacagcccccaggcctgcccagcccacctcctcatggcatcctccctgtacccaggtcaggctgtccacaccacatgggagcccagaggaggaggggcccgccttagccatgtgaaggtggattggtcgccatctgcacgccaggcggcatccttttctatgaagtgttgactttgtaaatctgcccacacccagctggccacacccctcaccctttttttggttgcttttctaataaagatggaacagtt

SEQ ID NO: 427263 - DNA, 5976 bp, Homo sapiens
gggtgaggctcagcagagcccggggcacaggccggaggggctgcaggcgcgaggctgggttacgtgaggaagctgggggtttcgcgggcagctttagagccccagtcagggaaaccgaggccgggcttcctggctgcctcgcgagcctcttcatggctctcgccgccgccctgaggtgcctagaatgggttccggcctccggggaggttcccagtaaccgcaggagccaccattgatttggcgtctgctgggtgcaaagcccagcgcgctaaccctttactcgcgacctttcgcttcaccttcacagcagccctgcgaggagagttgtggactggggcaacctttgccagtgatgagaagtgatgctcgtggcagtgctgaatctctctgaatatgattcgaattgcagccttaaatgccagctccaccattgaggatgatcatgaaggaagctttaaaagtcacaaaacccagacaaaggaggctcaggaagcagaggcttttgcattgtaccacaaggcccttgatctgcagaaacatgaccggtttgaggagtctgccaaagcctaccatgagctcttggaggcgagcctgctgcgggaggcagtgatgctggactccacagatgtcaacctctggtataagattggacatgtggccctgaggctcatccggatccccctggctcgccatgcttttgaggaagggctgcggtgcaatcctgaccactggccctgtttggataacctaatcactgtcctgtacaccctcagtgattacacaacatgtctgtacttcatctgcaaagctttggagaaggattgccggtacagcaaagggctggtcctcaaggagaagatttttgaggagcagccttgtctccggaaggactctctcagaatgttcctcaaatgtgacatgtcgattcacgatgtttcggtgagtgcagctgagacacaggcgattgtagatgaggccttggggctgcgaaaaaagaggcaagcgctgattgtgcgggagaaggagccggacctgaaacttgtgcagcccattcctttcttcacctggaagtgcctcggagagagcttgctggccatgtacaatcatctcaccacctgtgagcccccacgtcccagccttggcaaaaggattgatttgtcggactaccaggaccccagccagcctcttgagtcctccatggtggtgacgccagttaacgtgatccagccaagcactgtcagcaccaacccagctgtggctgtcgccgagcctgtggtctcctacacctctgtggctacaaccagcttcccactgcacagtcctggtctgttggagacaggcgctcctgtgggtgatatttctgggggagataaatccaagaaaggggtaaaacggaagaagatttcagaagagagtggagaaacagcaaagcggcggtctgcccgtgtccgaaacaccaagtgcaaaaaagaagagaaagtagacttccaggagcttctgatgaagttcttgccgtccaggttaagaaagctggaccctgaggaggaagatgattcctttaataactatgaagtccagtcagaagccaaactggaaagcttcccaagcattgggcctcaaaggctgtcatttgactcagccacattcatggaatctgaaaagcaggacgtgcatgagttcctgctggagaacctaaccaacgggggcatcctggagctgatgatgcgctacctgaaagccatgggccacaagttcttggtaaggtggcctccaggcttggcggaggtcgtgctcagcgtctaccacagctggaggaggcacagcaccagcctgcccaacccgctgctgagggactgcagcaacaagcacatcaaggacatgatgctgatgtctctctcctgcatggaactccagctggaccagtggctgctgaccaaaggcagaagctctgcagtgtctcctcggaactgccctgctggtatggtgaatggcagatttggacctgacttcccagggacccactgcctgggtgacctcctacagctgtcatttgcctcgtcccagcgcgacctgttcgaggatggttggctggagtttgtggtccgtgtttactggctgaaggctcgcttcctggcgctgcagggagacatggagcaggccctggagaactatgacatctgcacagaaatgctccagagttccaccgccatccaggtggaggcaggggctgaacgaagagacattgtcatccggctgcccaacctccataatgactctgtggtttccctggaggagattgataagaacctgaagtcgctggagcggtgccagtccctggaggagattcagcggctgtatgaagcaggcgactacaaggctgttgtgcatctgctccgccccactttgtgcaccagtgggtttgaccgggccaaacacctggagtttatgacttccattcctgagaggccagcccagctgcttcttctgcaggactccttgctccggctgaaggactatcggcagtgttttgagtgttccgatgtggctctgaacgaggctgtccagcagatggtgaactcaggtgaggctgccgccaaggaggagtgggtggccacagtgacccaactgctgatgggcatcgagcaggccctctctgcggacagcagtggtagcatcctgaaggtatcatcctccaccactggccttgtgcggctcaccaacaacctcatccaggtcattgactgcagcatggctgtgcaggaggaggccaaggagccccacgtctcttcagtgctaccctggatcattctacaccggatcatctggcaggaggaagacaccttccattctctgtgccaccagcagcagctccaaaacccagcggaggaagggatgtcagagacgcccatgctcccatcctccctcatgctgctgaacacagcccacgagtatttgggcagaaggtcctggtgctgcaattcagatggggctctgctgcgattctatgtgcgagtactccagaaggaactggctgcatccacctctgaagacacgcacccttacaaggaggagctggagacagccttggagcagtgcttctactgcctgtacagcttccccagcaagaagagtaaggccaggtacctggaggaacactcggcccagcaggtggatcttatatgggaggatgcactgttcatgtttgagtattttaagcccaagacccttcctgaatttgacagctataagaccagcaccgtgtctgctgacttggccaacctactgaagagaattgccaccattgtgcctcgcacagagaggccagcccttagcctggacaaagtctctgcctacattgagggaacttcaactgaggtaccctgcctcccagagggggctgacccctcccctccagtggtgaacgagctttactacctcctggctgattatcatttcaaaaacaaggagcagtccaaggccatcaagttctacatgcatgacatctgcatctgccccaataggtttgattcctgggcaggcatggctctggcccgggccagccgcattcaggacaagctgaactccaatgagctgaagagtgatgggcccatttggaagcatgccacgcccgtcttgaactgcttccgtcgggccctggagattgacagctccaacttgtccctatggattgagtatggcaccatgtcctatgccttgcactcattcgcctcacgtcaattgaagcagtggagaggcgagctgccccctgagctcgtgcagcagatggagggccggcgcgacagcatgctagagacagccaagcactgtttcacatcagcagcccgctgcgagggtgatggtgacgaggaggagtggctcatccactacatgctgggcaaggtggctgagaagcagcagcagccacccaccgtttacttgctgcactacaggcaggctggccactacctgcacgaggaggctgcccgctaccccaagaagatccactaccacaacccacctgagctggccatggaggccctggaggtgtactttcggctccatgcttccatcctgaagctcctggggaagcccgattctggggttggtgcagaggtcctggtcaactttatgaaggaggctgcagaaggaccctttgccaggggcgaggagaagaacacacccaaagcttcagaaaaggagaaggcctgcctggtggacgaggactcccactcttcagctgggacactgccgggccccggagcctccctcccctcctcctctggcccaggtctgacatccccaccttacacagccactccgattgaccacgattacgtcaaatgtaaaaaaccccaccagcaggcaacgccggacgaccgaagccaggacagcacagccgtagcactctcagactctagctcaacgcaggacttctttaatgagcccaccagcttactggaaggctccaggaaatcctacacagagaagaggctgcccattctcagttcccaagcaggagcgacgggtaaagatcttcagggggccacagaagaaagaggaaaaaacgaggagtcattggagagtacagaaggcttccgggctgcagagcaaggtgtccagaagcctgctgcagaaaccccagcctctgcttgcatccctggcaagccctcagcatccacacccaccctgtgggatgggaagaagagaggggacctcccaggggagccagtggccttcccccaggggctgccggctggtgctgaggagcagcggcagtttctcacagagcagtgcatcgcctccttccgcctgtgcctgagccgcttcccccagcactataagagtctctaccgtctggccttcctctacacctacagcaagacccaccggaacctccagtgggcccgcgacgtgttgctaggcagcagtatcccgtggcaacaactgcagcacatgccggcacaggggctcttctgcgagaggaacaagaccaatttcttcaacggcatctggcggatccccgtggacgagattgaccggccgggcagctttgcctggcacatgaaccgctccatcgtgctgctgctcaaggtgctggcccagctgcgggaccacagcaccctgctgaaggtgtcctccatgcttcagcggaccccagaccagggcaagaagtatctgcgagatgctgaccgccaggtcctggcgcagcgggccttcatcctcactgtgaaggtgctcgaagacacgctgagcgagctcgcagaggggtcagaacgcccagggcccaaggtctgtggcctccccggagccaggatgaccaccgatgtctcacacaaggccagtcctgaggatggccaggagggcctcccccagccgaagaagccccctctggctgatggctcagggccagggcccgagccaggaggcaaagtgggcctcctcaaccaccggcctgtggccatggatgcaggagacagtgcagaccaaagcggggagcggaaggataaagagagcccacgggcagggcccactgagcccatggacacgagtgaggccactgtttgccactcagacttggagcggacaccacccctgctgccaggtcgccccgcaagggaccggggccccgagagccggcccactgagctgtccctggaggagctgagcatcagtgcccggcagcagcccaccccgctcaccccagcccagccagcccccgcccccgcccccgccaccaccacagggaccagggcagggggccacccggaggagccgctctcccggctcagccgcaagaggaagctcctggaggacacagagtcaggcaagacacttctgttggatgcctaccgtgttatccacccctcgacgccgggatgagccggctctgcctgtgtcacagtggaggggtcctttagggccaggctcacccctcaccctttttttggttgcttttctaataaagatggaacagtt

SEQ ID NO: 427264 - DNA, 5580 bp, Homo sapiens
gggtgaggctcagcagagcccggggcacaggccggaggggctgcaggcgcgaggctgggttacgtgaggaagctgggggtttcgcgggcagctttagagccccagtcagggaaaccgaggccgggcttcctggctgcctcgcgagcctcttcatggctctcgccgccgccctgaggtgcctagaatgggttccggcctccggggaggttcccagtaaccgcaggagccaccattgatttggcgtctgctgggtgcaaagcccagcgcgctaaccctttactcgcgacctttcgcttcaccttcacagcagccctgcgaggagagttgtggactggggcaacctttgccagtgatgagaagtgatgctcgtggcagtgctgaatctctctgaatatgattcgaattgcagccttaaatgccagctccaccattgaggatgatcatgaaggaagctttaaaagtcacaaaacccagacaaaggaggctcaggaagcagaggcttttgcattgtaccacaaggcccttgatctgcagaaacatgaccggtttgaggagtctgccaaagcctaccatgagctcttggaggcgagcctgctgcgggaggcagtgatgctggactccacagatgtcaacctctggtataagattggacatgtggccctgaggctcatccggatccccctggctcgccatgcttttgaggaagggctgcggtgcaatcctgaccactggccctgtttggataacctaatcactgtcctgtacaccctcagtgattacacaacatgtctgtacttcatctgcaaagctttggagaaggattgccggtacagcaaagggctggtcctcaaggagaagatttttgaggagcagccttgtctccggaaggactctctcagaatgttcctcaaatgtgacatgtcgattcacgatgtttcggtgagtgcagctgagacacaggcgattgtagatgaggccttggggctgcgaaaaaagaggcaagcgctgattgtgcgggagaaggagccggacctgaaacttgtgcagcccattcctttcttcacctggaagtgcctcggagagagcttgctggccatgtacaatcatctcaccacctgtgagcccccacgtcccagccttggcaaaaggattgatttgtcggactaccaggaccccagccagcctcttgagtcctccatggtggtgacgccagttaacgtgatccagccaagcactgtcagcaccaacccagctgtggctgtcgccgagcctgtggtctcctacacctctgtggctacaaccagcttcccactgcacagtcctggtctgttggagacaggcgctcctgtgggtgatatttctgggggagataaatccaagaaaggggtaaaacggaagaagatttcagaagagagtggagaaacagcaaagcggcggtctgcccgtgtccgaaacaccaagtgcaaaaaagaagagaaagtagacttccaggagcttctgatgaagttcttgccgtccaggttaagaaagctggaccctgaggaggaagatgattcctttaataactatgaagtccagtcagaagccaaactggaaagcttcccaagcattgggcctcaaaggctgtcatttgactcagccacattcatggaatctgaaaagcaggacgtgcatgagttcctgctggagaacctaaccaacgggggcatcctggagctgatgatgcgctacctgaaagccatgggccacaagttcttggtaaggtggcctccaggcttggcggaggtcgtgctcagcgtctaccacagctggaggaggcacagcaccagcctgcccaacccgctgctgagggactgcagcaacaagcacatcaaggacatgatgctgatgtctctctcctgcatggaactccagctggaccagtggctgctgaccaaaggcagaagctctgcagtgtctcctcggaactgccctgctggtatggtgaatggcagatttggacctgacttcccagggacccactgcctgggtgacctcctacagctgtcatttgcctcgtcccagcgcgacctgttcgaggatggttggctggagtttgtggtccgtgtttactggctgaaggctcgcttcctggcgctgcagggagacatggagcaggccctggagaactatgacatctgcacagaaatgctccagagttccaccgccatccaggtggaggcaggggctgaacgaagagacattgtcatccggctgcccaacctccataatgactctgtggtttccctggaggagattgataagaacctgaagtcgctggagcggtgccagtccctggaggagattcagcggctgtatgaagcaggcgactacaaggctgttgtgcatctgctccgccccactttgtgcaccagtgggtttgaccgggccaaacacctggagtttatgacttccattcctgagaggccagcccagctgcttcttctgcaggactccttgctccggctgaaggactatcggcagtgttttgagtgttccgatgtggctctgaacgaggctgtccagcagatggtgaactcaggtgaggctgccgccaaggaggagtgggtggccacagtgacccaactgctgatgggcatcgagcaggccctctctgcggacagcagtggtagcatcctgaaggtatcatcctccaccactggccttgtgcggctcaccaacaacctcatccaggtcattgactgcagcatggctgtgcaggaggaggccaaggagccccacgtctcttcagtgctaccctggatcattctacaccggatcatctggcaggaggaagacaccttccattctctgtgccaccagcagcagctccaaaacccagcggaggaagggatgtcagagacgcccatgctcccatcctccctcatgctgctgaacacagcccacgagtatttgggcagaaggtcctggtgctgcaattcagatggggctctgctgcgattctatgtgcgagtactccagaaggaactggctgcatccacctctgaagacacgcacccttacaaggaggagctggagacagccttggagcagtgcttctactgcctgtacagcttccccagcaagaagagtaaggccaggtacctggaggaacactcggcccagcaggtggatcttatatgggaggatgcactgttcatgtttgagtattttaagcccaagacccttcctgaatttgacagctataagaccagcaccgtgtctgctgacttggccaacctactgaagagaattgccaccattgtgcctcgcacagagaggccagcccttagcctggacaaagtctctgcctacattgagggaacttcaactgaggtaccctgcctcccagagggggctgacccctcccctccagtggtgaacgagctttactacctcctggctgattatcatttcaaaaacaaggagcagtccaaggccatcaagttctacatgcatgacatctgcatctgccccaataggtttgattcctgggcaggcatggctctggcccgggccagccgcattcaggacaagctgaactccaatgagctgaagagtgatgggcccatttggaagcatgccacgcccgtcttgaactgcttccgtcgggccctggagattgacagctccaacttgtccctatggattgagtatggcaccatgtcctatgccttgcactcattcgcctcacgtcaattgaagcagtggagaggcgagctgccccctgagctcgtgcagcagatggagggccggcgcgacagcatgctagagacagccaagcactgtttcacatcagcagcccgctgcgagggtgatggtgacgaggaggagtggctcatccactacatgctgggcaaggtggctgagaagcagcagcagccacccaccgtttacttgctgcactacaggcaggctggccactacctgcacgaggaggctgcccgctaccccaagaagatccactaccacaacccacctgagctggccatggaggccctggaggtgtactttcggctccatgcttccatcctgaagctcctggggaagcccgattctggggttggtgcagaggtcctggtcaactttatgaaggaggctgcagaaggaccctttgccaggggcgaggagaagaacacacccaaagcttcagaaaaggagaaggcctgcctggtggacgaggactcccactcttcagctgggacactgccgggccccggagcctccctcccctcctcctctggcccaggtctgacatccccaccttacacagccactccgattgaccacgattacgtcaaatgtaaaaaaccccaccagcaggcaacgccggacgaccgaagccaggacagcacagccgtagcactctcagactctagctcaacgcaggacttctttaatgagcccaccagcttactggaaggctccaggaaatcctacacagagaagaggctgcccattctcagttcccaagcaggagcgacgggtaaagatcttcagggggccacagaagaaagaggaaaaaacgaggagtcattggagagtacagaaggcttccgggctgcagagcaaggtgtccagaagcctgctgcagaaaccccagcctctgcttgcatccctggcaagccctcagcatccacacccaccctgtgggatgggaagaagagaggggacctcccaggggagccagtggccttcccccaggggctgccggctggtgctgaggagcagcggcagtttctcacagagcagtgcatcgcctccttccgcctgtgcctgagccgcttcccccagcactataagagtctctaccgtctggccttcctctacacctacagcaagacccaccggaacctccagtgggcccgcgacgtgttgctaggcagcagtatcccgtggcaacaactgcagcacatgccggcacaggggctcttctgcgagaggaacaagaccaatttcttcaacggcatctggcggatccccgtggacgagattgaccggccgggcagctttgcctggcacatgaaccgctccatcgtgctgctgctcaaggtgctggcccagctgcgggaccacagcaccctgctgaaggtgtcctccatgcttcagcggaccccagaccagggcaagaagtatctgcgagatgctgaccgccaggtcctggcgcagcgggccttcatcctcactgtgaaggtgctcgaagacacgctgagcgagctcgcagaggggtcagaacgcccagggcccaaggtctgtggcctccccggagccaggatgaccaccgatgtctcacacaaggccagtcctgaggatggcccgccttagccatgtgaaggtggattggtcgccatctgcacgccaggcggcatccttttctatgaagtgttgactttgtaaatctgcccacacccagctggccatatccacccctcgacgccgggatgagccggctctgcctgtgtcacagtggaggggtcctttagggccaggctcacccctcaccctttttttggttgcttttctaataaagatggaacagtt

SEQ ID NO: 427265 - DNA, 4013 bp, Homo sapiens
gggtgaggctcagcagagcccggggcacaggccggaggggctgcaggcgcgaggctgggttacgtgaggaagctgggggtttcgcgggcagctttagagccccagtcagggaaaccgaggccgggcttcctggctgcctcgcgagcctcttcatggctctcgccgccgccctgaggtgcctagaatgggttccggcctccggggaggttcccagtaaccgcaggagccaccattgatttggcgtctgctgggtgcaaagcccagcgcgctaaccctttactcgcgacctttcgcttcaccttcacagcagccctgcgaggagagttgtggactggggcaacctttgccagtgatgagaagtgatgctcgtggcagtgctgaatctctctgaatatgattcgaattgcagccttaaatgccagctccaccattgaggatgatcatgaaggaagctttaaaagtcacaaaacccagacaaaggaggctcaggaagcagaggcttttgcattgtaccacaaggcccttgatctgcagaaacatgaccggtttgaggagtctgccaaagcctaccatgagctcttggaggcgagcctgctgcgggaggcagtgatgctggactccacagatgtcaacctctggtataagattggacatgtggccctgaggctcatccggatccccctggctcgccatgcttttgaggaagggctgcggtgcaatcctgaccactggccctgtttggataacctaatcactgtcctgtacaccctcagtgattacacaacatgtctgtacttcatctgcaaagctttggagaaggattgccggtacagcaaagggctggtcctcaaggagaagatttttgaggagcagccttgtctccggaaggactctctcagaatgttcctcaaatgtgacatgtcgattcacgatgtttcggtgagtgcagctgagacacaggcgattgtagatgaggccttggggctgcgaaaaaagaggcaagcgctgattgtgcgggagaaggagccggacctgaaacttgtgcagcccattcctttcttcacctggaagtgcctcggagagagcttgctggccatgtacaatcatctcaccacctgtgagcccccacgtcccagccttggcaaaaggattgatttgtcggactaccaggaccccagccagcctcttgagtcctccatggtggtgacgccagttaacgtgatccagccaagcactgtcagcaccaacccagctgtggctgtcgccgagcctgtggtctcctacacctctgtggctacaaccagcttcccactgcacagtcctggtctgttggagacaggcgctcctgtgggtgatatttctgggggagataaatccaagaaaggggtaaaacggaagaagatttcagaagagagtggagaaacagcaaagcggcggtctgcccgtgtccgaaacaccaagtgcaaaaaagaagagaaagtagacttccaggagcttctgatgaagttcttgccgtccaggttaagaaagctggaccctgaggaggaagatgattcctttaataactatgaagtccagtcagaagccaaactggaaagcttcccaagcattgggcctcaaaggctgtcatttgactcagccacattcatggaatctgaaaagcaggacgtgcatgagttcctgctggagaacctaaccaacgggggcatcctggagctgatgatgcgctacctgaaagccatgggccacaagttcttggtaaggtggcctccaggcttggcggaggtcgtgctcagcgtctaccacagctggaggaggcacagcaccagcctgcccaacccgctgctgagggactgcagcaacaagcacatcaaggacatgatgctgatgtctctctcctgcatggaactccagctggaccagtggctgctgaccaaaggcagaagctctgcagtgtctcctcggaactgccctgctggtatggtgaatggcagatttggacctgacttcccagggacccactgcctgggtgacctcctacagctgtcatttgcctcgtcccagcgcgacctgttcgaggatggttggctggagtttgtggtccgtgtttactggctgaaggctcgcttcctggcgctgcagggagacatggagcaggccctggagaactatgacatctgcacagaaatgctccagagttccaccgccatccaggtggaggcaggggctgaacgaagagacattgtcatccggctgcccaacctccataatgactctgtggtttccctggaggagattgataagaacctgaagtcgctggagcggtgccagtccctggaggagattcagcggctgtatgaagcaggcgactacaaggctgttgtgcatctgctccgccccactttgtgcaccagtgggtttgaccgggccaaacacctggagtttatgacttccattcctgagaggccagcccagctgcttcttctgcaggactccttgctccggctgaaggactatcggcagtgttttgagtgttccgatgtggctctgaacgaggctgtccagcagatggtgaactcaggtgaggctgccgccaaggaggagtgggtggccacagtgacccaactgctgatgggcatcgagcaggccctctctgcggacagcagtggtagcatcctgaaggtatcatcctccaccactggccttgtgcggctcaccaacaacctcatccaggtcattgactgcagcatggctgtgcaggaggaggccaaggagccccacgtctcttcagtgctaccctggatcattctacaccggatcatctggcaggaggaagacaccttccattctctgtgccaccagcagcagctccaaaacccagcggaggaagggatgtcagagacgcccatgctcccatcctccctcatgctgctgaacacagcccacgagtatttgggcagaaggtcctggtgctgcaattcagatggggctctgctgcgattctatgtgcgagtactccagaaggaactggctgcatccacctctgaagacacgcacccttacaaggaggagctggagacagccttggagcagtgcttctactgcctgtacagcttccccagcaagaagagtaaggccaggtacctggaggaacactcggcccagcaggtggatcttatatgggaggatgcactgttcatgtttgagtattttaagcccaagacccttcctgaatttgacagctataagaccagcaccgtgtctgctgacttggccaacctactgaagagaattgccaccattgtgcctcgcacagagaggccagcccttagcctggacaaagtctctgcctacattgagggaacttcaactgaggtaccctgcctcccagagggggctgacccctcccctccagtggtgaacgagctttactacctcctggctgattatcatttcaaaaacaaggagcagtccaaggccatcaagttctacatgcatgacatctgcatctgccccaataggtttgattcctgggcaggcatggctctggcccgggccagccgcattcaggacaagctgaactccaatgagctgaagagtgatgggcccatttggaagcatgccacgcccgtcttgaactgcttccgtcgggccctggagattgacagctccaacttgtccctatggattgagtatggcaccatgtcctatgccttgcactcattcgcctcacgtcaattgaagcagtggagaggcgagctgccccctgagctcgtgcagcagtggccccagagttgggcaggctggggactgaagctgctgccctaggatgcagagcctgactccccaagaggccttccttgtaacagcaggagcaccattatcctctgctggggctcagtgggctgagctgatcatggttcttgggattttctccctaatctcccaccaatgatggcaaatgagatttggcagagtgggagttttccaggaaataaatagggtgagaagtc

SEQ ID NO: 427266 - DNA, 1691 bp, Homo sapiens
gggtgaggctcagcagagcccggggcacaggccggaggggctgcaggcgcgaggctgggttacgtgaggaagctgggggtttcgcgggcagctttagagccccagtcagggaaaccgaggccgggcttcctggctgcctcgcgagcctcttcatggctctcgccgccgccctgaggtgcctagaatgggttccggcctccggggaggttcccagtaaccgcaggagccaccattgatttggcgtctgctgggtgcaaagcccagcgcgctaaccctttactcgcgacctttcgcttcaccttcacagcagccctgcgaggagagttgtggactggggcaacctttgccagtgatgagaagtgatgctcgtggcagtgctgaatctctctgaatatgattcgaattgcagccttaaatgccagctccaccattgaggatgatcatgaaggaagctttaaaagtcacaaaacccagacaaaggaggctcaggaagcagaggcttttgcattgtaccacaaggcccttgatctgcagaaacatgaccggtttgaggagtctgccaaagcctaccatgagctcttggaggcgagcctgctgcgggaggcagtgatgctggactccacagatgtcaacctctggtataagattggacatgtggccctgaggctcatccggatccccctggctcgccatgcttttgaggaagggctgcggtgcaatcctgaccactggccctgtttggataacctaatcactgtcctgtacaccctcagtgattacacaacatgtctgtacttcatctgcaaagctttggagaaggattgccggtacagcaaagggctggtcctcaaggagaagatttttgaggagcagccttgtctccggaaggactctctcagaatgttcctcaaatgtgacatgtcgattcacgatgtttcggtgagtgcagctgagacacaggcgattgtagatgaggccttggggctgcgaaaaaagaggcaagcgctgattgtgcgggagaaggagccggacctgaaacttgtgcagcccattcctttcttcacctggaagtgcctcggagagagcttgctggccatgtacaatcatctcaccacctgtgagcccccacgtcccagccttggcaaaaggattgatttgtcggactaccaggaccccagccagcctcttgagtcctccatggtggtgacgccagttaacgtgatccagccaagcactgtcagcaccaacccagctgtggctgtcgccgagcctgtggtctcctacacctctgtggctacaaccagcttcccactgcacagtcctggtctgttggagacaggcgctcctgtgggtgatatttctgggggagataaatccaagaaaggggtaaaacggaagaagatttcagaagagagtggagaaacagcaaagcggcggtctgcccgtgtccgaaacaccaagtgcaaaaaagaagagaaagtagacttccaggagcttctgatgaagttcttgccgtccaggtactgtgtattttttctgattgtcagaaacaaacccacaaagctccagcatacaccatcaataacatttctcattccattgccaccctcttctctggtctcctcctctgtgttcccataacatctgtgcagatgtctgaagcacaaatctcactggagtaggatcttgga

SEQ ID NO: 427267 - DNA, 981 bp, Homo sapiens
  misc_feature (365)..(365): n is a, c, g, or t
acactggagacggaccttataaatgtagggactgtgggaaggtgttcatttttcctagtgcgttacgaacacatgaaagaactcacactggagagaaaccctatgaatgtaaacaatgtggaaaagcctttagttgttctagttacattcggatacataaaagaactcacactggggagaaaaccttatgaatgtaaggaatgcgggaaggcctttatttatcccacaagctttcaaggacacatgagaatgcatactggagagaaaccctataaatgtaaagaatgtgggaaggcctttagtcttcacagttcctttcgagagacatacaagaattcacaattatgagaaacctcttgaatgtnagcagatgtggaaaagccttcagtgtgtccacatccttaaaaaaacctatgaggaatgcgcaatccgataggaaactctataatgtgagaaataggagaaagttttcaattctaacagatgctttcaaagttgtgaaaattcccactgaagagagaaatcctgtcaatgtaagtaatatagaaagcgagatacaagatgattcatgtatagtcaggtaccacataatcatgtttcagtcaacatgatgaaaccctgtctccattagaaatacgaaaattagctgggcgttctggtgtgcctgtagtcccagctacttgggaggctgaagcaggagaatcatttgaacctgggaggtggaggctgcagtgagctgagattgtgccactacactccagcctgggcaacagagcaagactccatcccacacaccaaaaaaaagttaaaaattttttatcactggctcattcttcaagtacatctctggactatgaattgtaacttaactacttttccaagaagtcttggaagtgagataattctgtaagtactctttaagcagtggtcaaaagtttaaaaggttgtgttttctcattaaatcagttagtaaaacttttc

SEQ ID NO: 427268 - DNA, 370 bp, Homo sapiens
ccttagcaatatcaaccactaaccttccctctacacttatcatcttcacaattctatgtctactgactatcctagaaatcactgtcgccttaatccaagcctacgttttcacacttctagttaaggtcaccctgggttaggtctacctggccaggtagacctaacccaggcaggtccttaaggagatattcccggaaaaactttgttatgataggcgatgacggctccatgtgcaggactgcccctgaacgtattctggcgggacaaaacatggaggcagaagacaatgatattgatgatcctcaccccgtgtagtcctacactaatgtgtgtttgtgtcttagttagtctttaacaaaaatagtttaaa

SEQ ID NO: 427269 - DNA, 1908 bp, Homo sapiens
  misc_feature (365)..(365): n is a, c, g, or t
acactggagacggaccttataaatgtagggactgtgggaaggtgttcatttttcctagtgcgttacgaacacatgaaagaactcacactggagagaaaccctatgaatgtaaacaatgtggaaaagcctttagttgttctagttacattcggatacataaaagaactcacactggggagaaaaccttatgaatgtaaggaatgcgggaaggcctttatttatcccacaagctttcaaggacacatgagaatgcatactggagagaaaccctataaatgtaaagaatgtgggaaggcctttagtcttcacagttcctttcgagagacatacaagaattcacaattatgagaaacctcttgaatgtnagcagatgtggaaaagccttcagtgtgtccacatccttaaaaaaacctatgaggaatgcgcaatccgataggaaactctataatgtgagaaataggagaaagttttcaattctaacagatgctttcaaagttgtgaaaattcccactgaagagagaaatcctgtcaatgtaagtaatatagaaagcgagatacaagatgattcatgtatagtcaggtaccacataatcatgtttcagtcagcaatggaccatataggttggtagccccataagattatataacacctaaatcatttctatcaaccgcaatttagtagcagtagtaacaccatagtgcagcacattatttaagtgtttatggtgctggtgtaaacgtgctgcactttcagttgtataaaagtacaagacagcggccggggacggtggctcacgcctgtaatcccagcactttgggaggccaaggcgggcggatcacgaggccaggagatcaagaccatcctggctaacacggtaaaaccccatctctactaaaaatacaaaaaattagccgggcgtggtggtgggcgcagctgacagtgagctgagatccggccaacagagcgagactctgtctcaaaaaaaaaaaaaaaaaaaaaagtacaacacagctgggcatggtcacacctgtgatcccaacactgggagactaaggcagtaggattgcttgatgccaggactactctggtcaacctagtgagaccctgtctctacaaaaaataaaaacattttctaagtgtggtagcacaccctgtagtcccatctacatgggaggctgaggcaggaggattgcctgagcccaggagttcaaggctacagtgaaccaagatcacgtgatggcagtccagcatgggtgacagtgagactgtatcaaaaaaaaaaaaaaaaaaaaaattggctgggcacagtggctcatacctgtaatcccagcactttgggaggctgaggtgggagaatcagttgaggtcaggagttcaagaccagcctggtcaacatgatgaaaccctgtctccattagaaatacgaaaattagctgggcgttctggtgtgcctgtagtcccagctacttgggaggccaaagcaggagaatcgcttgaacccgggaggtggagattgcagtgagctgagatctaccactacactccagcctgggtgacagagcgagactccgtctcgaaaaaaaaaaaattacagcacagatgtgcaatatatacttgataataaatggctaagttactggtttatatatttacaatcctgttttagaatgtattcctgtgtttttttaacagtaagacagtctcaggcaggtccttaaggagatattcccggaaaaactttgttatgataggcgatgacggctccatgtgcaggactgcccctgaacgtattctggcgggacaaaacatggaggcagaagacaatgatattgatgatcctcaccccgtgtagtcctacactaatgtgtgtttgtgtcttagttagtctttaacaaaaatagtttaaa

SEQ ID NO: 427270 - DNA, 1828 bp, Homo sapiens
  misc_feature (365)..(365): n is a, c, g, or t
acactggagacggaccttataaatgtagggactgtgggaaggtgttcatttttcctagtgcgttacgaacacatgaaagaactcacactggagagaaaccctatgaatgtaaacaatgtggaaaagcctttagttgttctagttacattcggatacataaaagaactcacactggggagaaaaccttatgaatgtaaggaatgcgggaaggcctttatttatcccacaagctttcaaggacacatgagaatgcatactggagagaaaccctataaatgtaaagaatgtgggaaggcctttagtcttcacagttcctttcgagagacatacaagaattcacaattatgagaaacctcttgaatgtnagcagatgtggaaaagccttcagtgtgtccacatccttaaaaaaacctatgaggaatgcgcaatccgataggaaactctataatgtgagaaataggagaaagttttcaattctaacagatgctttcaaagttgtgaaaattcccactgaagagagaaatcctgtcaatgtaagtaatatagaaagcgagatacaagatgattcatgtatagtcaggtaccacataatcatgtttcagtcagcaatggaccatataggttggtagccccataagattatataacacctaaatcatttctatcaaccgcaatttagtagcagtagtaacaccatagtgcagcacattatttaagtgtttatggtgctggtgtaaacgtgctgcactttcagttgtataaaagtacaagacagcggccggggacggtggctcacgcctgtaatcccagcactttgggaggccaaggcgggcggatcacgaggccaggagatcaagaccatcctggctaacacggtaaaaccccatctctactaaaaatacaaaaaattagccgggcgtggtggtgggcgcctgtagtcccagctacttgggaggctgaggcaggagaatggcataaacccaggaggccgagctgacagtgagctgagatccggccaacagagcgagactctgtctcaaaaaaaaaaaaaaaaaaaaaagtacaacacagctgggcatggtcacacctgtgatcccaacactgggagactaaggcagtaggattgcttgatgccaggactactctggtcaacctagtgagaccctgtctctacaaaaaataaaaacattttctaagtgtggtagcacaccctgtagtcccatctacatgggaggctgaggcaggaggattgcctgagcccaggagttcaaggctacagtgaaccaagatcacgtgatggcagtccagcatgggtgacagtgagactgtatcaaaaaaaaaaaaaaaaaaaaaattggctgggcacagtggctcatacctgtaatcccagcactttgggaggctgaggtgggagaatcagttgaggtcaggagttcaagaccagcctggtcaacatgatgaaaccctgtctccattagaaatacgaaaattagctgggcgttctggtgtgcctgtagtcccagctacttgggaggctgaagcaggagaatcatttgaacctgggaggtggaggctgcagtgagctgagattgtgccactacactccagcctgggcaacagagcaagactccatcccacacaccaaaaaaaagttaaaaattttttatcactggctcattcttcaagtacatctctggactatgaattgtaacttaactacttttccaagaagtcttggaagtgagataattctgtaagtactctttaagcagtggtcaaaagtttaaaaggttgtgttttctcattaaatcagttagtaaaacttttc

SEQ ID NO: 427271 - DNA, 1967 bp, Homo sapiens
  misc_feature (365)..(365): n is a, c, g, or t
acactggagacggaccttataaatgtagggactgtgggaaggtgttcatttttcctagtgcgttacgaacacatgaaagaactcacactggagagaaaccctatgaatgtaaacaatgtggaaaagcctttagttgttctagttacattcggatacataaaagaactcacactggggagaaaaccttatgaatgtaaggaatgcgggaaggcctttatttatcccacaagctttcaaggacacatgagaatgcatactggagagaaaccctataaatgtaaagaatgtgggaaggcctttagtcttcacagttcctttcgagagacatacaagaattcacaattatgagaaacctcttgaatgtnagcagatgtggaaaagccttcagtgtgtccacatccttaaaaaaacctatgaggaatgcgcaatccgataggaaactctataatgtgagaaataggagaaagttttcaattctaacagatgctttcaaagttgtgaaaattcccactgaagagagaaatcctgtcaatgtaagtaatatagaaagcgagatacaagatgattcatgtatagtcaggtaccacataatcatgtttcagtcagcaatggaccatataggttggtagccccataagattatataacacctaaatcatttctatcaaccgcaatttagtagcagtagtaacaccatagtgcagcacattatttaagtgtttatggtgctggtgtaaacgtgctgcactttcagttgtataaaagtacaagacagcggccggggacggtggctcacgcctgtaatcccagcactttgggaggccaaggcgggcggatcacgaggccaggagatcaagaccatcctggctaacacggtaaaaccccatctctactaaaaatacaaaaaattagccgggcgtggtggtgggcgcctgtagtcccagctacttgggaggctgaggcaggagaatggcataaacccaggaggccgagctgacagtgagctgagatccggccaacagagcgagactctgtctcaaaaaaaaaaaaaaaaaaaaaagtacaacacagctgggcatggtcacacctgtgatcccaacactgggagactaaggcagtaggattgcttgatgccaggactactctggtcaacctagtgagaccctgtctctacaaaaaataaaaacattttctaagtgtggtagcacaccctgtagtcccatctacatgggaggctgaggcaggaggattgcctgagcccaggagttcaaggctacagtgaaccaagatcacgtgatggcagtccagcatgggtgacagtgagactgtatcaaaaaaaaaaaaaaaaaaaaaattggctgggcacagtggctcatacctgtaatcccagcactttgggaggctgaggtgggagaatcagttgaggtcaggagttcaagaccagcctggtcaacatgatgaaaccctgtctccattagaaatacgaaaattagctgggcgttctggtgtgcctgtagtcccagctacttgggaggccaaagcaggagaatcgcttgaacccgggaggtggagattgcagtgagctgagatctaccactacactccagcctgggtgacagagcgagactccgtctcgaaaaaaaaaaaattacagcacagatgtgcaatatatacttgataataaatggctaagttactggtttatatatttacaatcctgttttagaatgtattcctgtgtttttttaacagtaagacagtctcaggcaggtccttaaggagatattcccggaaaaactttgttatgataggcgatgacggctccatgtgcaggactgcccctgaacgtattctggcgggacaaaacatggaggcagaagacaatgatattgatgatcctcaccccgtgtagtcctacactaatgtgtgtttgtgtcttagttagtctttaacaaaaatagtttaaa

SEQ ID NO: 427272 - DNA, 1313 bp, Homo sapiens
cgaaacccttcccggcgcgagtccgagcgtctgagaagcagaagccacacgtcccggcgacctaagttctggatcagccggccggaggacccgtgttagcatttacaatccgaggtgagctgaagcctccggttgtcccggttcgacgctctagccctgcgagcagccgacgccggaagtctctactgctccccgctggcgcgcaggaccgcgggcatttacccgtgctttcccaagcctggaagaactcgtcatgctctttgtagcgtggtgcttctgttgctcacaggatgtttgccacacgagtcactcgagagaatctctgagtcctggcgagggctttctgaggcttcgtgtattagcagctgttgtcttccaactcagcggcaggtttgcctttccccacggacactctggaccttgtagctcctcaagcttccctgtctattgagcagataggaagccgtgtcaaatatgtggcaccttgaggaaatgcctagtgaatgacagacaacttgcctttgatgattttcaagagagttgtgctatgatgtggcaaaagtatgcaggaagcaggcggtcaatgcctctgggagcaaggatccttttccacggtgtgttctatgccgggggctttgccattgtgtattacctcattcaaaagtttcattccagggctttatattacaagttggcagtggagcagctgcagagccatcccgaggcacaggaagctctgggccctcctctcaacatccattatctcaagctcatcgacagggaaaacttcgtggacattgttgatgccaagttgaagattcctgtctctggatccaaatcagagggccttctctacgtccactcatccagaggtggcccctttcagaggtggcaccttgacgaggtctttttagagctcaaggatggtcagcagattcctgtgttcaagctcagtggggaaaacggtgatgaagtgaaaaaggagtagagacgacccagaagacccagcttgcttctagtccatccttccctcatctctaccatatggccactggggtggtggcccatctcagtgacagacactcctgcaacccagttttccagccaccagtgggatgatggtatgtgccagcacatggtaattttggtgtaattctaacttgggcacaacgaatgctatttgtcatttttaaactgaatccgaaagaaactcctattataaatttaagataatgtaatgtatttgaaagtgctttgtataaaaaagcacatgataaaaggaatcagaattaataaaatgtttgttgatcttt

SEQ ID NO: 427273 - DNA, 2867 bp, Homo sapiens
cgaaacccttcccggcgcgagtccgagcgtctgagaagcagaagccacacgtcccggcgacctaagttctggatcagccggccggaggacccgtgttagcatttacaatccgaggtgagctgaagcctccggttgtcccggttcgacgctctagccctgcgagcagccgacgccggaagtctctactgctccccgctggcgcgcaggaccgcgggcatttacccgtgctttcccaagcctggaagaactcgtcatgctctttgtagcgtggtgcttctgttgctcacagaggtgcctgcttccccttctgccatgattggaagtttcctgaggcctccccagccatgtggaactgacaacttgcctttgatgattttcaagagagttgtgctatgatgtggcaaaagtatgcaggaagcaggcggtcaatgcctctgggagcaaggatccttttccacggtgtgttctatgccgggggctttgccattgtgtattacctcattcaaaagtttcattccagggctttatattacaagttggcagtggagcagctgcagagccatcccgaggcacaggaagctctgggccctcctctcaacatccattatctcaagctcatcgacagggaaaacttcgtggacattgttgatgccaagttgaagattcctgtctctggatccaaatcagagggccttctctacgtccactcatccagaggtggcccctttcagaggtggcaccttgacgaggtctttttagagctcaaggatggtcagcagattcctgtgttcaagctcagtggggaaaacggtgatgaagtgaaaaaggagtagagacgacccagaagacccagcttgcttctagtccatccttccctcatctctaccatatggccactggggtggtggcccatctcagtgacagacactcctgcaacccagttttccagccaccagtgggatgatggcctccctattccctgagacacaacagtattgaaattgggccaattaataaccccacagtggcctctcactaaatgtgagaggtgaggaagctgcaggagaaaatttgaagctagcagtgttcatgagatgtaagtaaagaagccatctccataaaagtacaacgtgacgcagcaagtgctgatggagaagctgtagaagttacacagaagatctagcttggaccatcgatgaaagtggctacactaaacaacagattttaaatgtagataaaacagcattttattgaaaaaaagatgccatctaggactttcatagttagaaaaactcaatgcctggcttcaaaggacaagctgactcttgtcaggggctagtgcagctgtgactttcagttaaagccaatgctcattgactattctgaaaatcccagggcccttaagatatgctgtataaacgcaacaacaaagcctggatgacgttgggtctgtttacagcctggtctactgagtaagcccactgttgagacctagtgctcagaaaaaatagatttctttcaaaatatggctgggtgcagtggctcacaccggtaatcccagcactttgggaggctggggcgggtggattgcttgatgccaggagttcaagaccagcctgggcaacatggtgaaaccctgtctcaaaaaacaaatccaaaaaaccaaaatattgctactcattaacaatgcacctggttacccaagagctctgatggagatgtacaaggagatgaatactgttttcatgcctgctaacacagtatccattctgctgctgatagatcaagaagtacttttgactttcaaaacttgttatttaagaaatacattttgtggtttctctgatggttctgggcagtcagttcaaaaccttctggaaaggattcaccattctagatgccatcaagagcattcaattcacgggaggaggtcaaaatatcaacattaattggaatttggaagaaatagattccaatcctcatggaggacttggagggtttcaagacttcagaggaggaaggaactgtagatgggctgaaaatagcaagagaactagaagtggaggggcctagagatgtgaccgaattgctgtaacctcaggatcaaacttgtatggatgagaagttccttctcatggacgagcaaagaagtggtctggaactgaaagtgatgcgtatttctgagttatgcctgtatttaagaagctgagtgaaacccaaagaagtccatgataggacagacttctgaaaactaaagacagaaaaaagcttgaaagcatcaagaaagaagtgaaatcttaactagagggaaaagtaactcagatgacagtggatttctctctggaaaccatggaggccagaaggaagtgagacaagttcttttagtgccagaagaactatcaacttgtggctgggcacggtggctcacacctgtaatcccagcactttgggagaccaaggtgggcagatcacttgaagtcaggagtttgagaccagcctggccaacatggcaaaaccctgtctctactaaaaatacaaaaattagccaggcatggtggcacatgcctgtaatctcagctacttgggaggctgaggcacgagaattacttgaacccgggaggtggaggttgcagtgagccaagatcctgccactgcactccagcctgggcaacagagcaagactgcctcaaaacaaaactctgtcaactccaaattcctatttggtgaaatgatccttcaggattgatggggtaataaaaacattctcggttgatagaaaactaaaagaatttgttgaatgagtctaccctatagaccttgaaaagaccaaccctaaaggaagttcttgaaccagaaaggaaacattt

SEQ ID NO: 427274 - DNA, 3054 bp, Homo sapiens
cgaaacccttcccggcgcgagtccgagcgtctgagaagcagaagccacacgtcccggcgacctaagttctggatcagccggccggaggacccgtgttagcatttacaatccgaggtgagctgaagcctccggttgtcccggttcgacgctctagccctgcgagcagccgacgccggaagtctctactgctccccgctggcgcgcaggaccgcgggcatttacccgtgctttcccaagcctggaagaactcgtcatgctctttgtagcgtggtgcttctgttgctcacaggacaacttgcctttgatgattttcaagagagttgtgctatgatgtggcaaaagtatgcaggaagcaggcggtcaatgcctctgggagcaaggatccttttccacggtgtgttctatgccgggggctttgccattgtgtattacctcattcaaaagtttcattccagggctttatattacaagttggcagtggagcagctgcagagccatcccgaggcacaggaagctctgggccctcctctcaacatccattatctcaagctcatcgacagggaaaacttcgtggacattgttgatgccaagttgaagattcctgtctctggatccaaatcagagggccttctctacgtccactcatccagaggtggcccctttcagaggtggcaccttgacgaggtctttttagagctcaaggatggtcagcagattcctgtgttcaagctcagtggggaaaacggtgatgaagtgaaaaaggagtagagacgacccagaagacccagcttgcttctagtccatccttccctcatctctaccatatggccactggggtggtggcccatctcagtgacagacactcctgcaacccagttttccagccaccagtgggatgatggtatgtgccagcacatggtaattttggtgtaattctaacttgggcacaacgaatgctatttgtcatttttaaactgaatccgaaagaaactcctattataaatttaagataatgtaatgtatttgaaagtgctttgtataaaaaagcacatgataaaaggaatcagaattaataaaatgtttgttgatctttaaaaaaaaaaaaaaaaaaactcgagactagttctgtctctccctcgtgccgaattcggcacgaggcagagcctcttctcgtctgtaggaacaccgccagggaggtcatggcagggcaggaccaaagggtcctgtggctctttttttttctcctgttctgcattcctgcccacacccccacccctccatttccttctgctctggaggcatcctccttcattggacaccacacagtttatttcacttctgacttcaaggttgtgaattcttcccatggcttaagtcctgggatacttctgcagtgaaaggaggtcttgtacctcttcctcagagtcagaagttctgagtacctttgccctattctgaaaagggctaggggctcctgctcccagctgccctcttcctttggcttccaattcagttccctctgccccgcatcctgcagacaggcgctcccgcagggggcccttgtggacctgcactggagtctgttgccttcactgagctgcctgtgctggccttgcatggtgcctgtagggggatttgctttgctgtgccattggggtacagctgctgctcttactctagaccaaaaagtcgggttgagtgactggtggcagggccacagatagagacagcggggagggtggctgaccctggcggccctggactgagcgtctggaggagtcgtggaggctctttcccttctttctcctctgagagctcgttcttcaggctcttccagcttgtcatgtcgagtgcctggccactgctcagggttggaggctcagtccctttgccctgtctgttccagctctggagctaactcagggatccctgatcagggttacataggtttggtaaaatgagtgctggaaattaactttctcccagtagtcttaggtcatgctcagtgaacttaaactttatccagatatggttttccttcagcctttctattccctttctagccagtgaaagacccgctgccctttgacctcagcccctccaagcccccaagtttaaaacgccaccccctgccggccctggactgagcgtctggaggagtcgtggaggctctttcccttctttctcctctgagagctcgttcttcaggctcttccagcttgtcatgtcgagtgcctggccactgctcagggttggaggctcagtccctttgccctgtctgttccagctctggagctaactcagggatccctgatcagggttacataggtttggtaaaatgagtgctggaaattaactttctcccagtagtcttaggtcatgctcagtgaacttaaactttatccagatatggttttccttcagcctttctattccctttctagccagtgaaagacccgctgccctttgacctcagcccctccaagcccccaagtttaaaacgccaccccctgccaccagaaaaaacagaaaaaaaaaaaaaaaaaaaactaaaacacccatctggtctgggcatcttcctttcctttttcactatgtatcctgttactgggcttaaacagctttcagagaagagatgtcatttctattaaatgctctttcagtagcgaactgagttcacacttgactaaggatattttccggactgtctgtcatcagcatccttagtgggtttccccatatttaaattggtagaggccagggatggtggctcacacctgtaatctcagtactttgggaggccaaggtaggtggattgcttgagctcagaagaccagcctgggcaacctggtgaaaccctgtctctactaaaaattcaagttagctagctgggcatggtgatgcacttctgtagtcccagctacttggagagggggtggtgctggggcagcaggatcgcttgaacccaggaggttgaggttgcagtgagccaagatggtaccagcctaggtgacaaagtgacaccctgtctcaaaaaagaaaccaaacaaacat

SEQ ID NO: 427275 - DNA, 1169 bp, Homo sapiens
gaggtaaaatttacattctgtgaaaggcacaaatccaagcgtcctatctgatgagttttaacaaatacacccagttgtgtcactcaagccgttatctagatgtagattgttcccagcacctgaattccctcgtgccctacccaatgggtcccttctcacatcttccagctccaccagaggcagtcacttttcttttttttaaaatgatgtttgaaaattactttgtaatccatcaaaataacaacaggtttccaggacagtttagcctgttctagaatttaacataaatacttgtatactcctcctgtgtaaagccctttggcttggtgtgtttttgatattcatcgatgttgctccgtgtatcaggagtttgctcctttttaacagtggacttttgagcgatcattggaagtacccagagcattgacataggagtcctccttgccaaatggaaagactgccattgaccttaccagccaaccaaagaggggcaggacatttggaaaatcaagtggattctccagctgggctgttagaaaagaactcacttctgtggagaatcactggattttataggcttagctctagaaagcatcattttgtcatcttctgaaatgacaataattatccaattacatctctcctttctgtcattttacacccacagttgaagattcctgtctctggatccaaatcagagggccttctctacgtccactcatccagaggtggcccctttcagaggtggcaccttgacgaggtctttttagagctcaaggatggtcagcagattcctgtgttcaagctcagtggggaaaacggtgatgaagtgaaaaaggagtagagacgacccagaagacccagcttgcttctagtccatccttccctcatctctaccatatggccactggggtggtggcccatctcagtgacagacactcctgcaacccagttttccagccaccagtgggatgatggtatgtgccagcacatggtaattttggtgtaattctaacttgggcacaacgaatgctatttgtcatttttaaactgaatccgaaagaaactcctattataaatttaagataatgtaatgtatttgaaagtgctttgtataaaaaagcacatgataaaaggaatcagaattaataaaatgtttgttgatcttt

SEQ ID NO: 427276 - DNA, 839 bp, Homo sapiens
acaggggcaggacatgagagggatgggtgcacttttgggtcagggttcggctttctggtgtgacagcctttctcccttaggaggctgctaagtcggtgagacctgggcactgcagccgactgcctgggttgaatggttgaatctcggctccagctcttgaccagctatgtggccttatgggggagtccgtcacctttctgggcattagttaccttattggtgtgatgtgtggtaatgttagtgcttgtgtatgaggtgagaattgaatctcacaacacaagagctgttgaacattgtgagatgtgtggaatattgagaacagtgcctagccatagaaatcactcaataaagattagctgtctggaccctgcttctgtcccttcttttcctatcatagctggcaccgtgttcatgcctgtggtattccctgtatccctattcctgggaagcagcccaggagggggattcccttggcctctccagggtcaggtcacctttcccttcattagtgtgatgggaccttcagaagagaagcactttctgcggccaaactgaacaccctgcttgggaagcctgcctctgctccctcctttgggcagctgattattagaacttacagcttcagggaggtgcttcccggagttcccaggtagcctgtgggctcagaaggattcctgagactgagagcagtttgagttgaaatgttggcttaaatcttgatgaatgaacattttcatatcctgtttctaggcctgagggttttgttgttaatgttgtggtctttctattttatgtctcaacttagtggaacaggcagtgttgagaagtcaggtatcatg

SEQ ID NO: 427277 - DNA, 560 bp, Homo sapiens
tggtggtgggggagtatgaatgtggctttcagagttggatgttataaaacatagtcatttggaagttgggaactttttatttttgttatcttgtttttaatacaggatgtttgccacacgagtcactcgagagaatctctgagtcctggcgagggctttctgaggcttcgtgtattagcagctgttgtcttccaactcagcggcaggtttgcctttccccacggacactctggaccttgtagctcctcaagcttccctgtctattgagcagataggaagccgtgtcaaatatgtggcaccttgaggaaatgcctagtgaatgacagtatgtcctattgtgctctaactttatttcagccttatttcttttctgaatattatttttcatttatcttcatttccttacctattttcttttcttctaaagtatgtatctttgttagctccatcatcctttttggaatgagcaagtataaaaataagtaaataaataagacccatcctaagtattttaagaaaccacccttttgcggcacacttgctaccttggtcttagctct

SEQ ID NO: 427278 - DNA, 626 bp, Homo sapiens
cgaaacccttcccggcgcgagtccgagcgtctgagaagcagaagccacacgtcccggcgacctaagttctggatcagccggccggaggacccgtgttagcatttacaatccgaggtgagctgaagcctccggttgtcccggttcgacgctctagccctgcgagcagccgacgccggaagtctctactgctccccgctggcgcgcaggaccgcgggcatttacccgtgctttcccaagcctggaagaactcgtcatgctctttgtagcgtggtgcttctgttgctcacaggacaacttgcctttgatgattttcaagagagttgtgctatgatgtggcaaaagtatgcaggaagcaggcggtcaatgcctctgggagcaaggatccttttccacggtgtgttctatgccgggggctttgccattgtgtattacctcattcaaagtaagtatcctgctagccgcctgcggcctgacctcctcctagcctgctcctgctcctccatcagaggaaatacttgagatgctttgtttagattagagaaaggaggagagggtgattttaaaggctagtccaccatttcgttggctatagcttcctctgtatcctgtaatctcagtttttccag

SEQ ID NO: 427279 - DNA, 1093 bp, Homo sapiens
cgaaacccttcccggcgcgagtccgagcgtctgagaagcagaagccacacgtcccggcgacctaagttctggatcagccggccggaggacccgtgttagcatttacaatccgaggtgagctgaagcctccggttgtcccggttcgacgctctagccctgcgagcagccgacgccggaagtctctactgctccccgctggcgcgcaggaccgcgggcatttacccgtgctttcccaagcctggaagaactcgtcatgctctttgtagcgtggtgcttctgttgctcacaggacaacttgcctttgatgattttcaagagagttgtgctatgatgtggcaaaagtatgcaggaagcaggcggtcaatgcctctgggagcaaggatccttttccacggtgtgttctatgccgggggctttgccattgtgtattacctcattcaaaagtttcattccagggctttatattacaagttggcagtggagcagctgcagagccatcccgaggcacaggaagctctgggccctcctctcaacatccattatctcaagctcatcgacagggaaaacttcgtggacattgttgatgccaagttgaagattcctgtctctggatccaaatcagagggccttctctacgtccactcatccagaggtggcccctttcagaggtggcaccttgacgaggtctttttagagctcaaggatggtcagcagattcctgtgttcaagctcagtggggaaaacggtgatgaagtgaaaaaggagtagagacgacccagaagacccagcttgcttctagtccatccttccctcatctctaccatatggccactggggtggtggcccatctcagtgacagacactcctgcaacccagttttccagccaccagtgggatgatggtatgtgccagcacatggtaattttggtgtaattctaacttgggcacaacgaatgctatttgtcatttttaaactgaatccgaaagaaactcctattataaatttaagataatgtaatgtatttgaaagtgctttgtataaaaaagcacatgataaaaggaatcagaattaataaaatgtttgttgatcttt

SEQ ID NO: 427280 - DNA, 1259 bp, Homo sapiens
cgaaacccttcccggcgcgagtccgagcgtctgagaagcagaagccacacgtcccggcgacctaagttctggatcagccggccggaggacccgtgttagcatttacaatccgaggtgagctgaagcctccggttgtcccggttcgacgctctagccctgcgagcagccgacgccggaagtctctactgctccccgctggcgcgcaggaccgcgggcatttacccgtgctttcccaagcctggaagaactcgtcatgctctttgtagcgtggtgcttctgttgctcacagaggtgcctgcttccccttctgccatgattggaagtttcctgaggcctccccagccatgtggaactgatgtttgccacacgagtcactcgagagaatctctgagtcctggcgagggctttctgaggcttcgtgtattagcagctgttgtcttccaactcagcggcaggacaacttgcctttgatgattttcaagagagttgtgctatgatgtggcaaaagtatgcaggaagcaggcggtcaatgcctctgggagcaaggatccttttccacggtgtgttctatgccgggggctttgccattgtgtattacctcattcaaaagtttcattccagggctttatattacaagttggcagtggagcagctgcagagccatcccgaggcacaggaagctctgggccctcctctcaacatccattatctcaagctcatcgacagggaaaacttcgtggacattgttgatgccaagttgaagattcctgtctctggatccaaatcagagggccttctctacgtccactcatccagaggtggcccctttcagaggtggcaccttgacgaggtctttttagagctcaaggatggtcagcagattcctgtgttcaagctcagtggggaaaacggtgatgaagtgaaaaaggagtagagacgacccagaagacccagcttgcttctagtccatccttccctcatctctaccatatggccactggggtggtggcccatctcagtgacagacactcctgcaacccagttttccagccaccagtgggatgatggtatgtgccagcacatggtaattttggtgtaattctaacttgggcacaacgaatgctatttgtcatttttaaactgaatccgaaagaaactcctattataaatttaagataatgtaatgtatttgaaagtgctttgtataaaaaagcacatgataaaaggaatcagaattaataaaatgtttgttgatcttt

SEQ ID NO: 427281 - DNA, 1214 bp, Homo sapiens
cgaaacccttcccggcgcgagtccgagcgtctgagaagcagaagccacacgtcccggcgacctaagttctggatcagccggccggaggacccgtgttagcatttacaatccgaggtgagctgaagcctccggttgtcccggttcgacgctctagccctgcgagcagccgacgccggaagtctctactgctccccgctggcgcgcaggaccgcgggcatttacccgtgctttcccaagcctggaagaactcgtcatgctctttgtagcgtggtgcttctgttgctcacaggttgacttggatcagctgatggttcttttgtcccatggatgttctgctggtactgcagtcatctggtagcccacttaaactagaatgtccatgacagctcattcacatggctagtgccttggacaacttgcctttgatgattttcaagagagttgtgctatgatgtggcaaaagtatgcaggaagcaggcggtcaatgcctctgggagcaaggatccttttccacggtgtgttctatgccgggggctttgccattgtgtattacctcattcaaaagtttcattccagggctttatattacaagttggcagtggagcagctgcagagccatcccgaggcacaggaagctctgggccctcctctcaacatccattatctcaagctcatcgacagggaaaacttcgtggacattgttgatgccaagttgaagattcctgtctctggatccaaatcagagggccttctctacgtccactcatccagaggtggcccctttcagaggtggcaccttgacgaggtctttttagagctcaaggatggtcagcagattcctgtgttcaagctcagtggggaaaacggtgatgaagtgaaaaaggagtagagacgacccagaagacccagcttgcttctagtccatccttccctcatctctaccatatggccactggggtggtggcccatctcagtgacagacactcctgcaacccagttttccagccaccagtgggatgatggtatgtgccagcacatggtaattttggtgtaattctaacttgggcacaacgaatgctatttgtcatttttaaactgaatccgaaagaaactcctattataaatttaagataatgtaatgtatttgaaagtgctttgtataaaaaagcacatgataaaaggaatcagaattaataaaatgtttgttgatcttt

SEQ ID NO: 427282 - DNA, 1313 bp, Homo sapiens
cgaaacccttcccggcgcgagtccgagcgtctgagaagcagaagccacacgtcccggcgacctaagttctggatcagccggccggaggacccgtgttagcatttacaatccgaggtgagctgaagcctccggttgtcccggttcgacgctctagccctgcgagcagccgacgccggaagtctctactgctccccgctggcgcgcaggaccgcgggcatttacccgtgctttcccaagcctggaagaactcgtcatgctctttgtagcgtggtgcttctgttgctcacagaggtgcctgcttccccttctgccatgattggaagtttcctgaggcctccccagccatgtggaactagtggttcagatttactttcccggagtagtcacaggactgggcagtgaaaacaggatgtttgccacacgagtcactcgagagaatctctgagtcctggcgagggctttctgaggcttcgtgtattagcagctgttgtcttccaactcagcggcaggacaacttgcctttgatgattttcaagagagttgtgctatgatgtggcaaaagtatgcaggaagcaggcggtcaatgcctctgggagcaaggatccttttccacggtgtgttctatgccgggggctttgccattgtgtattacctcattcaaaagtttcattccagggctttatattacaagttggcagtggagcagctgcagagccatcccgaggcacaggaagctctgggccctcctctcaacatccattatctcaagctcatcgacagggaaaacttcgtggacattgttgatgccaagttgaagattcctgtctctggatccaaatcagagggccttctctacgtccactcatccagaggtggcccctttcagaggtggcaccttgacgaggtctttttagagctcaaggatggtcagcagattcctgtgttcaagctcagtggggaaaacggtgatgaagtgaaaaaggagtagagacgacccagaagacccagcttgcttctagtccatccttccctcatctctaccatatggccactggggtggtggcccatctcagtgacagacactcctgcaacccagttttccagccaccagtgggatgatggtatgtgccagcacatggtaattttggtgtaattctaacttgggcacaacgaatgctatttgtcatttttaaactgaatccgaaagaaactcctattataaatttaagataatgtaatgtatttgaaagtgctttgtataaaaaagcacatgataaaaggaatcagaattaataaaatgtttgttgatcttt

SEQ ID NO: 427283 - DNA, 2060 bp, Homo sapiens
gaggtaaaatttacattctgtgaaaggcacaaatccaagcgtcctatctgatgagttttaacaaatacacccagttgtgtcactcaagccgttatctagatgtagattgttcccagcacctgaattccctcgtgccctacccaatgggtcccttctcacatcttccagctccaccagaggcagtcacttttcttttttttaaaatgatgtttgaaaattactttgtaatccatcaaaataacaacaggtttccaggacagtttagcctgttctagaatttaacataaatacttgtatactcctcctgtgtaaagccctttggcttggtgtgtttttgatattcatcgatgttgctccgtgtatcaggagtttgctcctttttaacagtggacttttgagcgatcattggaagtacccagagcattgacataggagtcctccttgccaaatggaaagactgccattgaccttaccagccaaccaaagaggggcaggacatttggaaaatcaagtggattctccagctgggctgttagaaaagaactcacttctgtggagaatcactggattttataggcttagctctagaaagcatcattttgtcatcttctgaaatgacaataattatccaattacatctctcctttctgtcattttacacccacagttgaagattcctgtctctggatccaaatcagagggccttctctacgtccactcatccagaggtggcccctttcagaggtatcctgggaaggtgacggcagtgggggagcgggaggaagacttcctgatgaaagcaaccccaactccgttttcatttgttgttaaattactgtgggcataggaagaattatttttcaagcttgaagctgaaagcttcgtggcctgggcagcaagccagtactgcggctcttagctgagtccagtttatccatacagtctactgaattgccctctccttatgccgttgaatttgtaaaactttccagttatagtgatctgggtctatcataatttgatgctatgttacagcttctcacttgactgcctcaattgttataaatgaataaagggcatggactcttgttccagaatttattcatcacattctttgcataagctctccaccccttaattggctttgcttgtctggttgccaatagctacatccactcacttcccccacgggaagcctctctcatagatgtttgctgtttagccaggctgtattttaattcccaaggacaaaaggagcaggaggccccacctagctcaccctgggctcactgacctctgagcctgggattagtgtacaagctggctggattccatgccaggaactgaaggtcactgtgaattaggaaatgagaaataaactgctccttcttcctgatgtcccttccattcgcctgtcagtcattgttaagcctgccttgaagtcgaagctggttaaataatgagagcccatggtagaatgttaaaaattgtgttgacacagcactcgcacaaaataatgtttaaaaaaatttaaggcattattcaaaacaactgctttccgcgcccctttttttgactacggctgttgcctcagccttcatagattagagatactatacttttggtttctctcaggtggcaccttgacgaggtctttttagagctcaaggatggtcagcagattcctgtgttcaagctcagtggggaaaacggtgatgaagtgaaaaaggagtagagacgacccagaagacccagcttgcttctagtccatccttccctcatctctaccatatggccactggggtggtggcccatctcagtgacagacactcctgcaacccagttttccagccaccagtgggatgatggtatgtgccagcacatggtaattttggtgtaattctaacttgggcacaacgaatgctatttgtcatttttaaactgaatccgaaagaaactcctattataaatttaagataatgtaatgtatttgaaagtgctttgtataaaaaagcacatgataaaaggaatcagaattaataaaatgtttgttgatcttt

SEQ ID NO: 427284 - DNA, 893 bp, Homo sapiens
tctgcatgaggtcaaggcccaaggtcatctgcacatccctgcaaaacactgcctgcctgtgctttggtttttgagtctgtaaaatggacaatttagagtagatggccttaattattcgtccatccacagatttcacgtttctgtttctaccctgtacgtcagttggattatttaattttctgtgtagtagattctacctgaccaagttcaataaagaaaataagtgtgtctttcgtccttagagtttcattccagggctttatattacaagttggcagtggagcagctgcagagccatcccgaggcacaggaagctctgggccctcctctcaacatccattatctcaagctcatcgacagggaaaacttcgtggacattgttgatgccaagttgaagattcctgtctctggatccaaatcagagggccttctctacgtccactcatccagaggtggcccctttcagaggtggcaccttgacgaggtctttttagagctcaaggatggtcagcagattcctgtgttcaagctcagtggggaaaacggtgatgaagtgaaaaaggagtagagacgacccagaagacccagcttgcttctagtccatccttccctcatctctaccatatggccactggggtggtggcccatctcagtgacagacactcctgcaacccagttttccagccaccagtgggatgatggtatgtgccagcacatggtaattttggtgtaattctaacttgggcacaacgaatgctatttgtcatttttaaactgaatccgaaagaaactcctattataaatttaagataatgtaatgtatttgaaagtgctttgtataaaaaagcacatgataaaaggaatcagaattaataaaatgtttgttgatcttt

SEQ ID NO: 427285 - DNA, 1067 bp, Homo sapiens
cgaaacccttcccggcgcgagtccgagcgtctgagaagcagaagccacacgtcccggcgacctaagttctggatcagccggccggaggacccgtgttagcatttacaatccgaggtgagctgaagcctccggttgtcccggttcgacgctctagccctgcgagcagccgacgccggaagtctctactgctccccgctggcgcgcaggaccgcgggcatttacccgtgctttcccaagcctggaagaactcgtcatgctctttgtagcgtggtgcttctgttgctcacaggacaacttgcctttgatgattttcaagagagttgtgctatgatgtggcaaaagtatgcaggaagcaggcggtcaatgcctctgggagcaaggatccttttccacggtgtgttctatgccgggggctttgccattgtgtattacctcattcaaaagtttcattccagggctttatattacaagttggcagtggagcagctgcagagccatcccgaggcacaggaagctctgggccctcctctcaacatccattatctcaagctcatcgacagggaaaacttcgtggacattgttgatgccaagttgaagattcctgtctctggatccaaatcagagggccttctctacgtccactcatccagaggtggcccctttcagagagctcaaggatggtcagcagattcctgtgttcaagctcagtggggaaaacggtgatgaagtgaaaaaggagtagagacgacccagaagacccagcttgcttctagtccatccttccctcatctctaccatatggccactggggtggtggcccatctcagtgacagacactcctgcaacccagttttccagccaccagtgggatgatggtatgtgccagcacatggtaattttggtgtaattctaacttgggcacaacgaatgctatttgtcatttttaaactgaatccgaaagaaactcctattataaatttaagataatgtaatgtatttgaaagtgctttgtataaaaaagcacatgataaaaggaatcagaattaataaaatgtttgttgatcttt

SEQ ID NO: 427286 - DNA, 2003 bp, Homo sapiens
cgaaacccttcccggcgcgagtccgagcgtctgagaagcagaagccacacgtcccggcgacctaagttctggatcagccggccggaggacccgtgttagcatttacaatccgaggtgagctgaagcctccggttgtcccggttcgacgctctagccctgcgagcagccgacgccggaagtctctactgctccccgctggcgcgcaggaccgcgggcatttacccgtgctttcccaagcctggaagaactcgtcatgctctttgtagcgtggtgcttctgttgctcacagaggtgcctgcttccccttctgccatgattggaagtttcctgaggcctccccagccatgtggaactgacaacttgcctttgatgattttcaagagagttgtgctatgatgtggcaaaagtatgcaggaagcaggcggtcaatgcctctgggagcaaggatccttttccacggtgtgttctatgccgggggctttgccattgtgtattacctcattcaaaagtttcattccagggctttatattacaagttggcagtggagcagctgcagagccatcccgaggcacaggaagctctgggccctcctctcaacatccattatctcaagctcatcgacagggaaaacttcgtggacattgttgatgccaagttgaagattcctgtctctggatccaaatcagagggccttctctacgtccactcatccagaggtggcccctttcagaggtggcaccttgacgaggtctttttagagctcaaggatggtcagcagattcctgtgttcaagctcagtggggaaaacggtgatgaagtgaaaaaggagtagagacgacccagaagacccagcttgcttctagtccatccttccctcatctctaccatatggccactggggtggtggcccatctcagtgacagacactcctgcaacccagttttccagccaccagtgggatgatgaaacacaactggttttgagaatccatcccttcttcactcagtccacgtaaaggttaggatggtagaaagtgttatacctcttcctccagagttggagcctatgacactgatgacactggcatggaaagccaaagccctacaccaaccagcacacttactggttccaaattgatctacgctggtgtaatcagagtgaatctcagaactttggacagagctgtgagcagagactgactttcctgctgtctccaggtagctgcaaggctgaacagcagcacctactttattaccatcttactgtcattcaaagaaggcagagctgaatgctggagaaaaactgagtaccagcaacagtttttgaaccctgaatattgtcataactgaagctagaattatccctggacttgtttgccactaaaatttccttgttttgcttaccctggtttcagctggcaccctgatcacttgaaaggaacataactgatatactgtcctttgtttttctttccttcctcttctctgcctttgatgattttaaattagaaatctacctgcctctaatctctttaattttctcatttatttactgctgcctattttccaaaacactgcttttcgaatattcctggctcaaaaatctatgtcttcatgacatatgaaacccctagaatccagcctttccccagcttttaatatctcctaattgatttctcaattccagtgaaatgattccatttatttttttcccaaacacatcacaaatattcctaactcttgtgagcaattttctctcattcttctcaacttatctaaatcctaacttttcaaaagatctagctcaagttctgtcttatcatattttgagttcctttctttggcattgtattattttgtatctttccatgtacacatgtgtgcattatctccctgataaaactaactggctagaggataggagtaaagactcaattctaatatccttgttacctaataatacacaaacgtgaaacatgtttgaataaatcactgttaaatat

SEQ ID NO: 427287 - DNA, 1039 bp, Homo sapiens
cgaaacccttcccggcgcgagtccgagcgtctgagaagcagaagccacacgtcccggcgacctaagttctggatcagccggccggaggacccgtgttagcatttacaatccgaggtgagctgaagcctccggttgtcccggttcgacgctctagccctgcgagcagccgacgccggaagtctctactgctccccgctggcgcgcaggaccgcgggcatttacccgtgctttcccaagcctggaagaactcgtcatgctctttgtagcgtggtgcttctgttgctcacaggacaacttgcctttgatgattttcaagagagttgtgctatgatgtggcaaaagtatgcaggaagcaggcggtcaatgcctctgggagcaaggatccttttccacggtgtgttctatgccgggggctttgccattgtgtattacctcattcaaaagtttcattccagggctttatattacaagttggcagtggagcagctgcagagccatcccgaggcacaggaagctctgggccctcctctcaacatccattatctcaagctcatcgacagggaaaacttcgtggacattgttgatgccaagttgaagattcctgtctctggatccaaatcagagggccttctctacgtccactcatccagaggtggcccctttcagaggtggcaccttgacgaggtctttttagagctcaaggatggtcagcagattcctgtgttcaagctcagtggggaaaacggtgatgaagtgatcatctctaccatatggccactggggtggtggcccatctcagtgacagacactcctgcaacccagttttccagccaccagtgggatgatggtatgtgccagcacatggtaattttggtgtaattctaacttgggcacaacgaatgctatttgtcatttttaaactgaatccgaaagaaactcctattataaatttaagataatgtaatgtatttgaaagtgctttgtataaaaaagcacatgataaaaggaatcagaattaataaaatgtttgttgatcttt

SEQ ID NO: 427288 - DNA, 3160 bp, Homo sapiens
cgaaacccttcccggcgcgagtccgagcgtctgagaagcagaagccacacgtcccggcgacctaagttctggatcagccggccggaggacccgtgttagcatttacaatccgaggtgagctgaagcctccggttgtcccggttcgacgctctagccctgcgagcagccgacgccggaagtctctactgctccccgctggcgcgcaggaccgcgggcatttacccgtgctttcccaagcctggaagaactcgtcatgctctttgtagcgtggtgcttctgttgctcacagaggtgcctgcttccccttctgccatgattggaagtttcctgaggcctccccagccatgtggaactgacaacttgcctttgatgattttcaagagagttgtgctatgatgtggcaaaagtatgcaggaagcaggcggtcaatgcctctgggagcaaggatccttttccacggtgtgttctatgccgggggctttgccattgtgtattacctcattcaaattgaagattcctgtctctggatccaaatcagagggccttctctacgtccactcatccagaggtggcccctttcagaggtggcaccttgacgaggtctttttagagctcaaggatggtcagcagattcctgtgttcaagctcagtggggaaaacggtgatgaagtgaaaaaggagtagagacgacccagaagacccagcttgcttctagtccatccttccctcatctctaccatatggccactggggtggtggcccatctcagtgacagacactcctgcaacccagttttccagccaccagtgggatgatggcctccctattccctgagacacaacagtattgaaattgggccaattaataaccccacagtggcctctcactaaatgtgagaggtgaggaagctgcaggagaaaatttgaagctagcagtgttcatgagatgtaagtaaagaagccatctccataaaagtacaacgtgacgcagcaagtgctgatggagaagctgtagaagttacacagaagatctagcttggaccatcgatgaaagtggctacactaaacaacagattttaaatgtagataaaacagcattttattgaaaaaaagatgccatctaggactttcatagttagaaaaactcaatgcctggcttcaaaggacaagctgactcttgtcaggggctagtgcagctgtgactttcagttaaagccaatgctcattgactattctgaaaatcccagggcccttaagatatgctgtataaacgcaacaacaaagcctggatgacgttgggtctgtttacagcctggtctactgagtaagcccactgttgagacctagtgctcagaaaaaatagatttctttcaaaatatggctgggtgcagtggctcacaccggtaatcccagcactttgggaggctggggcgggtggattgcttgatgccaggagttcaagaccagcctgggcaacatggtgaaaccctgtctcaaaaaacaaatccaaaaaaccaaaatattgctactcattaacaatgcacctggttacccaagagctctgatggagatgtacaaggagatgaatactgttttcatgcctgctaacacagtatccattctgctgctgatagatcaagaagtacttttgactttcaaaacttgttatttaagaaatacattttgtggtttctctgatggttctgggcagtcagttcaaaaccttctggaaaggattcaccattctagatgccatcaagagcattcaattcacgggaggaggtcaaaatatcaacattaattggaatttggaagaaatagattccaatcctcatggaggacttggagggtttcaagacttcagaggaggaaggaactgtagatgggctgaaaatagcaagagaactagaagtggaggggcctagagatgtgaccgaattgctgtaacctcaggatcaaacttgtatggatgagaagttccttctcatggacgagcaaagaaggtgatttcttgaaatggaatctactcctggtgaagatgctatgaacattgttgaaatgacaaaagatttagaatattccataaacttagctgtggccagggtttgagaggattgactcctaattttgaagttctactgtgggtaaatgctgtcaaacagcattgcatgccacagaggaatctctcatgaaagagttaataaatgcagcaaacttcactgttgtcttactttaagaaactgccacagtcactgcaggcttcagcaacttatcttttcctaccctcctctcgcatttaaaagtacttttaaattaatgtatgtacattatttttaggcataacactgctgctcatttaaaaaaactacagtatgaaccatgttatatgcagtggaaaggcaaaaaattcatgtgacttacttgcttgtatttggtttattgcagtggtctggaactgaaagtgatgcgtatttctgagttatgcctgtatttaagaagctgagtgaaacccaaagaagtccatgataggacagacttctgaaaactaaagacagaaaaaagcttgaaagcatcaagaaagaagtgaaatcttaactagagggaaaagtaactcagatgacagtggatttctctctggaaaccatggaggccagaaggaagtgagacaagttcttttagtgccagaagaactatcaacttgtggctgggcacggtggctcacacctgtaatcccagcactttgggagaccaaggtgggcagatcacttgaagtcaggagtttgagaccagcctggccaacatggcaaaaccctgtctctactaaaaatacaaaaattagccaggcatggtggcacatgcctgtaatctcagctacttgggaggctgaggcacgagaattacttgaacccgggaggtggaggttgcagtgagccaagatcctgccactgcactccagcctgggcaacagagcaagactgcctcaaaacaaaactctgtcaactccaaattcctatttggtgaaatgatccttcaggattgatggggtaataaaaacattctcggttgatagaaaactaaaagaatttgttgaatgagtctaccctatagaccttgaaaagaccaaccctaaaggaagttcttgaaccagaaaggaaacattt

SEQ ID NO: 427289 - DNA, 1056 bp, Homo sapiens
cgaaacccttcccggcgcgagtccgagcgtctgagaagcagaagccacacgtcccggcgacctaagttctggatcagccggccggaggacccgtgttagcatttacaatccgaggtgagctgaagcctccggttgtcccggttcgacgctctagccctgcgagcagccgacgccggaagtctctactgctccccgctggcgcgcaggaccgcgggcatttacccgtgctttcccaagcctggaagaactcgtcatgctctttgtagcgtggtgcttctgttgctcacagaggtgcctgcttccccttctgccatgattggaagtttcctgaggcctccccagccatgtggaactgctgtacaggtgtggtgccagcatctgctcagcttctggcaggggcctcagggagcttttactcatggcagaaggtgaagtgggaccaggtacatcatatggcaagagcaggagcgagagagagctggaggaggtgccacatacttgaaacaaccagatctcgcaagaactcactattgtgaagatagcaccaagaggatggtgccaactcattcaagagaaatccaccccaatcatccagtcacctcccaccaagccccacctccaacattggggattacatttaaacatgagattttgggggacaaatacccaaactatatcaagactttagaaacagatccatactggtctgctgctaccagctagtccaagccaccaccagctctgccatggagccttttaattggactccctgcttccattcttgtcctttctagagaaatctttaacaaaaagcaagtcatactgtgtcatttcctgattgaaaccttcagcatcttctcttacactttgagtaaaatccagactccctaccatacctacaaaacctgcatgatgaagaccctgccctcttgcctggcctcctcttccacacctcattcacgagcctgccttctgcttcttgaagataccgagcctgtggctgcctcagggccttggcgtgtttggcgtgcccttcccctggttttcaaatgatcc

SEQ ID NO: 427290 - DNA, 819 bp, Homo sapiens
cgaaacccttcccggcgcgagtccgagcgtctgagaagcagaagccacacgtcccggcgacctaagttctggatcagccggccggaggacccgtgttagcatttacaatccgaggtgagctgaagcctccggttgtcccggttcgacgctctagccctgcgagcagccgacgccggaagtctctactgctccccgctggcgcgcaggaccgcgggcatttacccgtgctttcccaagcctggaagaactcgtcatgctctttgtagcgtggtgcttctgttgctcacagaggtgcctgcttccccttctgccatgattggaagtttcctgaggcctccccagccatgtggaactagtggttcagatttactttcccggagtagtcacaggactgggcagtgaaaacaggttgacttggatcagctgatggttcttttgtcccatggatgttctgctggtactgcagtcatctggtagcccacttaaactagaatgtccatgacagctcattcacatggctagtgccttggtagggatgactgggttcaactggaatattggaacagtggggcatcttctccctcccacccatcttaggcctcttcctcacaaagtggcttcttacgtggtctttttatgtagcaagaaccccactagcaggataaccataattcttatatagtggcttaggcttcccaagagtgccagagtgcaaactgccaagcctccttaaagtggaggcatggaacagttccaacatcaattctgcctcctcctgttggttgaagcgagtcatacagccagttggattaattgggg

SEQ ID NO: 427291 - DNA, 3309 bp, Homo sapiens
cgaaacccttcccggcgcgagtccgagcgtctgagaagcagaagccacacgtcccggcgacctaagttctggatcagccggccggaggacccgtgttagcatttacaatccgaggtgagctgaagcctccggttgtcccggttcgacgctctagccctgcgagcagccgacgccggaagtctctactgctccccgctggcgcgcaggaccgcgggcatttacccgtgctttcccaagcctggaagaactcgtcatgctctttgtagcgtggtgcttctgttgctcacagaggtgcctgcttccccttctgccatgattggaagtttcctgaggcctccccagccatgtggaactgacaacttgcctttgatgattttcaagagagttgtgctatgatgtggcaaaagtatgcaggaagcaggcggtcaatgcctctgggagcaaggatccttttccacggtgtgttctatgccgggggctttgccattgtgtattacctcattcaaaagtttcattccagggctttatattacaagttggcagtggagcagctgcagagccatcccgaggcacaggaagctctgggccctcctctcaacatccattatctcaagctcatcgacagggaaaacttcgtggacattgttgatgccaagttgaagattcctgtctctggatccaaatcagagggccttctctacgtccactcatccagaggtggcccctttcagaggtggcaccttgacgaggtctttttagagctcaaggatggtcagcagattcctgtgttcaagctcagtggggaaaacggtgatgaagtgaaaaaggagtagagacgacccagaagacccagcttgcttctagtccatccttccctcatctctaccatatggccactggggtggtggcccatctcagtgacagacactcctgcaacccagttttccagccaccagtgggatgatggcctccctattccctgagacacaacagtattgaaattgggccaattaataaccccacagtggcctctcactaaatgtgagaggtgaggaagctgcaggagaaaatttgaagctagcagtgttcatgagatgtaagtaaagaagccatctccataaaagtacaacgtgacgcagcaagtgctgatggagaagctgtagaagttacacagaagatctagcttggaccatcgatgaaagtggctacactaaacaacagattttaaatgtagataaaacagcattttattgaaaaaaagatgccatctaggactttcatagttagaaaaactcaatgcctggcttcaaaggacaagctgactcttgtcaggggctagtgcagctgtgactttcagttaaagccaatgctcattgactattctgaaaatcccagggcccttaagatatgctgtataaacgcaacaacaaagcctggatgacgttgggtctgtttacagcctggtctactgagtaagcccactgttgagacctagtgctcagaaaaaatagatttctttcaaaatatggctgggtgcagtggctcacaccggtaatcccagcactttgggaggctggggcgggtggattgcttgatgccaggagttcaagaccagcctgggcaacatggtgaaaccctgtctcaaaaaacaaatccaaaaaaccaaaatattgctactcattaacaatgcacctggttacccaagagctctgatggagatgtacaaggagatgaatactgttttcatgcctgctaacacagtatccattctgctgctgatagatcaagaagtacttttgactttcaaaacttgttatttaagaaatacattttgtggtttctctgatggttctgggcagtcagttcaaaaccttctggaaaggattcaccattctagatgccatcaagagcattcaattcacgggaggaggtcaaaatatcaacattaattggaatttggaagaaatagattccaatcctcatggaggacttggagggtttcaagacttcagaggaggaaggaactgtagatgggctgaaaatagcaagagaactagaagtggaggggcctagagatgtgaccgaattgctgtaacctcaggatcaaacttgtatggatgagaagttccttctcatggacgagcaaagaaggtgatttcttgaaatggaatctactcctggtgaagatgctatgaacattgttgaaatgacaaaagatttagaatattccataaacttagctgtggccagggtttgagaggattgactcctaattttgaagttctactgtgggtaaatgctgtcaaacagcattgcatgccacagaggaatctctcatgaaagagttaataaatgcagcaaacttcactgttgtcttactttaagaaactgccacagtcactgcaggcttcagcaacttatcttttcctaccctcctctcgcatttaaaagtacttttaaattaatgtatgtacattatttttaggcataacactgctgctcatttaaaaaaactacagtatgaaccatgttatatgcagtggaaaggcaaaaaattcatgtgacttacttgcttgtatttggtttattgcagtggtctggaactgaaagtgatgcgtatttctgagttatgcctgtatttaagaagctgagtgaaacccaaagaagtccatgataggacagacttctgaaaactaaagacagaaaaaagcttgaaagcatcaagaaagaagtgaaatcttaactagagggaaaagtaactcagatgacagtggatttctctctggaaaccatggaggccagaaggaagtgagacaagttcttttagtgccagaagaactatcaacttgtggctgggcacggtggctcacacctgtaatcccagcactttgggagaccaaggtgggcagatcacttgaagtcaggagtttgagaccagcctggccaacatggcaaaaccctgtctctactaaaaatacaaaaattagccaggcatggtggcacatgcctgtaatctcagctacttgggaggctgaggcacgagaattacttgaacccgggaggtggaggttgcagtgagccaagatcctgccactgcactccagcctgggcaacagagcaagactgcctcaaaacaaaactctgtcaactccaaattcctatttggtgaaatgatccttcaggattgatggggtaataaaaacattctcggttgatagaaaactaaaagaatttgttgaatgagtctaccctatagaccttgaaaagaccaaccctaaaggaagttcttgaaccagaaaggaaacattt

SEQ ID NO: 427292 - DNA, 972 bp, Homo sapiens
  misc_feature (95)..(95): n is a, c, g, or t
ctggtcattgacgtaggtgcttggattcgtctaccaataatagaaacggcccagggaggtaacctgaacgtactgatactgaatccatgatgaangtgcttgcgtgtcagttatctggattcttaatcaagcatggatgtcctaacgcagattctcgcatatcagaattactgcgcccgtcgcaggattttcaagagagttgtgctatgatgtggcaaaagtatgcaggaagcaggcggtcaatgcctctgggagcaaggatccttttccacggtgtgttctatgccgggggctttgccattgtgtattacctcattcaaaagtttcattccagggctttatattacaagttggcagtggagcagctgcagagccatcccgaggcacaggaagctctgggccctcctctcaacatccattatctcaagctcatcgacagggaaaacttcgtggacattgttgatgccaagttgaagattcctgtctctggatccaaatcagagggccttctctacgtccactcatccagaggtggcccctttcagaggtggcaccttgacgaggtctttttagagctcaaggatggtcagcagattcctgtgttcaagctcagtggggaaaacggtgatgaagtgaaaaaggagtagagacgacccagaagacccagcttgcttctagtccatccttccctcatctctaccatatggccactggggtggtggcccatctcagtgacagacactcctgcaacccagttttccagccaccagtgggatgatggtatgtgccagcacatggtaattttggtgtaattctaacttgggcacaacgaatgctatttgtcatttttaaactgaatccgaaagaaactcctattataaatttaagataatgtaatgtatttgaaagtgctttgtataaaaaagcacatgataaaaggaatcagaattaataaaatgtttgttgatcttt

SEQ ID NO: 427293 - DNA, 2784 bp, Homo sapiens
cgaaacccttcccggcgcgagtccgagcgtctgagaagcagaagccacacgtcccggcgacctaagttctggatcagccggccggaggacccgtgttagcatttacaatccgaggtgagctgaagcctccggttgtcccggttcgacgctctagccctgcgagcagccgacgccggaagtctctactgctccccgctggcgcgcaggaccgcgggcatttacccgtgctttcccaagcctggaagaactcgtcatgctctttgtagcgtggtgcttctgttgctcacaggatgtttgccacacgagtcactcgagagaatctctgagtcctggcgagggctttctgaggcttcgtgtattagcagctgttgtcttccaactcagcggcaggacaacttgcctttgatgattttcaagagagttgtgctatgatgtggcaaaagtatgcaggaagcaggcggtcaatgcctctgggagcaaggatccttttccacggtgtgttctatgccgggggctttgccattgtgtattacctcattcaaaagtttcattccagggctttatattacaagttggcagtggagcagctgcagagccatcccgaggcacaggaagctctgggccctcctctcaacatccattatctcaagctcatcgacagggaaaacttcgtggacattgttgatgccaagttgaagattcctgtctctggatccaaatcagagggccttctctacgtccactcatccagaggtggcccctttcagaggtggcaccttgacgaggtctttttagagctcaaggatggtcagcagattcctgtgttcaagctcagtggggaaaacggtgatgaagtgaaaaaggagtagagacgacccagaagacccagcttgcttctagtccatccttccctcatctctaccatatggccactggggtggtggcccatctcagtgacagacactcctgcaacccagttttccagccaccagtgggatgatgtggtctggaactgaaagtgatgcgtatttctgagttatgcctgtatttaagaagctgagtgaaacccaaagaagtccatgataggacagacttctgaaaactaaagacagaaaaaagcttgaaagcatcaagaaagaagtgaaatcttaactagagggaaaagtaactcagatgacagtggatttctctctggaaaccatggaggccagaaggaagtgagacaagttcttttagtgccagaagaactatcaacttgtggctgggcacggtggctcacacctgtaatcccagcactttgggagaccaaggtgggcagatcacttgaagtcaggagtttgagaccagcctggccaacatggcaaaaccctgtctctactaaaaatacaaaaattagccaggcatggtggcacatgcctgtaatctcagctacttgggaggctgaggcacgagaattacttgaacccgggaggtggaggttgcagtgagccaagatcctgccactgcactccagcctgggcaacagagcaagactgcctcaaaacaaaactctgtcaactccaaattcctatttggtgaaatgatccttcaggattgatgggttgcacctggacttgatatgaaagtaaccatcagaaaatcaacagagatcttaaacttgcctaccacagacacctgcaggaatatactaagaatcatcacagtggacctttattgtctcctgagcacccattcattgttctttcagaaacacaactggttttgagaatccatcccttcttcactcagtccacgtaaaggttaggatggtagaaagtgttatacctcttcctccagagttggagcctatgacactgatgacactggcatggaaagccaaagccctacaccaaccagcacacttactggttccaaattgatctacgctggtgtaatcagagtgaatctcagaactttggacagagctgtgagcagagactgactttcctgctgtctccaggtagctgcaaggctgaacagcagcacctactttattaccatcttactgtcattcaaagaaggcagagctgaatgctggagaaaaactgagtaccagcaacagtttttgaaccctgaatattgtcataactgaagctagaattatccctggacttgtttgccactaaaatttccttgttttgcttaccctggtttcagctggcaccctgatcacttgaaaggaacataactgatatactgtcctttgtttttctttccttcctcttctctgcctttgatgattttaaattagaaatctacctgcctctaatctctttaattttctcatttatttactgctgcctattttccaaaacactgcttttcgaatattcctggctcaaaaatctatgtcttcatgacatatgaaacccctagaatccagcctttccccagcttttaatatctcctaattgatttctcaattccagtgaaatgattccatttatttttttcccaaacacatcacaaatattcctaactcttgtgagcaattttctctcattcttctcaacttatctaaatcctaacttttcaaaagatctagctcaagttctgtcttatcatattttgagttcctttctttggcattgtattattttgtatctttccatgtacacatgtgtgcattatctccctgataaaactaactggctagaggataggagtaaagactcaattctaatatccttgttacctaataatacacaaacgtgaaacatgtttgaataaatcactgttaaatat

SEQ ID NO: 427294 - DNA, 1194 bp, Homo sapiens
cgaaacccttcccggcgcgagtccgagcgtctgagaagcagaagccacacgtcccggcgacctaagttctggatcagccggccggaggacccgtgttagcatttacaatccgaggtgagctgaagcctccggttgtcccggttcgacgctctagccctgcgagcagccgacgccggaagtctctactgctccccgctggcgcgcaggaccgcgggcatttacccgtgctttcccaagcctggaagaactcgtcatgctctttgtagcgtggtgcttctgttgctcacaggatgtttgccacacgagtcactcgagagaatctctgagtcctggcgagggctttctgaggcttcgtgtattagcagctgttgtcttccaactcagcggcaggacaacttgcctttgatgattttcaagagagttgtgctatgatgtggcaaaagtatgcaggaagcaggcggtcaatgcctctgggagcaaggatccttttccacggtgtgttctatgccgggggctttgccattgtgtattacctcattcaaaagtttcattccagggctttatattacaagttggcagtggagcagctgcagagccatcccgaggcacaggaagctctgggccctcctctcaacatccattatctcaagctcatcgacagggaaaacttcgtggacattgttgatgccaagttgaagattcctgtctctggatccaaatcagagggccttctctacgtccactcatccagaggtggcccctttcagaggtggcaccttgacgaggtctttttagagctcaaggatggtcagcagattcctgtgttcaagctcagtggggaaaacggtgatgaagtgaaaaaggagtagagacgacccagaagacccagcttgcttctagtccatccttccctcatctctaccatatggccactggggtggtggcccatctcagtgacagacactcctgcaacccagttttccagccaccagtgggatgatggtatgtgccagcacatggtaattttggtgtaattctaacttgggcacaacgaatgctatttgtcatttttaaactgaatccgaaagaaactcctattataaatttaagataatgtaatgtatttgaaagtgctttgtataaaaaagcacatgataaaaggaatcagaattaataaaatgtttgttgatcttt

SEQ ID NO: 427295 - DNA, 1434 bp, Homo sapiens
cgaaacccttcccggcgcgagtccgagcgtctgagaagcagaagccacacgtcccggcgacctaagttctggatcagccggccggaggacccgtgttagcatttacaatccgaggtgagctgaagcctccggttgtcccggttcgacgctctagccctgcgagcagccgacgccggaagtctctactgctccccgctggcgcgcaggaccgcgggcatttacccgtgctttcccaagcctggaagaactcgtcatgctctttgtagcgtggtgcttctgttgctcacagaggtgcctgcttccccttctgccatgattggaagtttcctgaggcctccccagccatgtggaactagtggttcagatttactttcccggagtagtcacaggactgggcagtgaaaacaggttgacttggatcagctgatggttcttttgtcccatggatgttctgctggtactgcagtcatctggtagcccacttaaactagaatgtccatgacagctcattcacatggctagtgccttggatgtttgccacacgagtcactcgagagaatctctgagtcctggcgagggctttctgaggcttcgtgtattagcagctgttgtcttccaactcagcggcaggacaacttgcctttgatgattttcaagagagttgtgctatgatgtggcaaaagtatgcaggaagcaggcggtcaatgcctctgggagcaaggatccttttccacggtgtgttctatgccgggggctttgccattgtgtattacctcattcaaaagtttcattccagggctttatattacaagttggcagtggagcagctgcagagccatcccgaggcacaggaagctctgggccctcctctcaacatccattatctcaagctcatcgacagggaaaacttcgtggacattgttgatgccaagttgaagattcctgtctctggatccaaatcagagggccttctctacgtccactcatccagaggtggcccctttcagaggtggcaccttgacgaggtctttttagagctcaaggatggtcagcagattcctgtgttcaagctcagtggggaaaacggtgatgaagtgaaaaaggagtagagacgacccagaagacccagcttgcttctagtccatccttccctcatctctaccatatggccactggggtggtggcccatctcagtgacagacactcctgcaacccagttttccagccaccagtgggatgatggtatgtgccagcacatggtaattttggtgtaattctaacttgggcacaacgaatgctatttgtcatttttaaactgaatccgaaagaaactcctattataaatttaagataatgtaatgtatttgaaagtgctttgtataaaaaagcacatgataaaaggaatcagaattaataaaatgtttgttgatcttt

SEQ ID NO: 427296 - DNA, 1784 bp, Homo sapiens
cgaaacccttcccggcgcgagtccgagcgtctgagaagcagaagccacacgtcccggcgacctaagttctggatcagccggccggaggacccgtgttagcatttacaatccgaggtgagctgaagcctccggttgtcccggttcgacgctctagccctgcgagcagccgacgccggaagtctctactgctccccgctggcgcgcaggaccgcgggcatttacccgtgctttcccaagcctggaagaactcgtcatgctctttgtagcgtggtgcttctgttgctcacagaggtgcctgcttccccttctgccatgattggaagtttcctgaggcctccccagccatgtggaactgctgtacaggtgtggtgccagcatctgctcagcttctggcaggggcctcagggagcttttactcatggcagaaggtgaagtgggaccaggtacatcatatggcaagagcaggagcgagagagagctggaggaggtgccacatacttgaaacaaccagatctcgcaagaactcactattgtgaagatagcaccaagaggatggtgccaactcattcaagagaaatccaccccaatcatccagtcacctcccaccaagccccacctccaacattggggattacatttaaacatgagattttgggggacaaatacccaaactatatcaagactttagaaacagatccatactgagtggttcagatttactttcccggagtagtcacaggactgggcagtgaaaacaggatgtttgccacacgagtcactcgagagaatctctgagtcctggcgagggctttctgaggcttcgtgtattagcagctgttgtcttccaactcagcggcaggacaacttgcctttgatgattttcaagagagttgtgctatgatgtggcaaaagtatgcaggaagcaggcggtcaatgcctctgggagcaaggatccttttccacggtgtgttctatgccgggggctttgccattgtgtattacctcattcaaaagtttcattccagggctttatattacaagttggcagtggagcagctgcagagccatcccgaggcacaggaagctctgggccctcctctcaacatccattatctcaagctcatcgacagggaaaacttcgtggacattgttgatgccaaggtaatgtgctttccctgcgaaccgcaggctggtgcctgctgaaggagaggagagtctactgtctcctggaaagtcctggagttaaggatttgggatgggaaaatccactaagtaaagctagttgaagattcctgtctctggatccaaatcagagggccttctctacgtccactcatccagaggtggcccctttcagaggtggcaccttgacgaggtctttttagagctcaaggatggtcagcagattcctgtgttcaagctcagtggggaaaacggtgatgaagtgaaaaaggagtagagacgacccagaagacccagcttgcttctagtccatccttccctcatctctaccatatggccactggggtggtggcccatctcagtgacagacactcctgcaacccagttttccagccaccagtgggatgatggtatgtgccagcacatggtaattttggtgtaattctaacttgggcacaacgaatgctatttgtcatttttaaactgaatccgaaagaaactcctattataaatttaagataatgtaatgtatttgaaagtgctttgtataaaaaagcacatgataaaaggaatcagaattaataaaatgtttgttgatcttt

SEQ ID NO: 427297 - DNA, 1682 bp, Homo sapiens
cgaaacccttcccggcgcgagtccgagcgtctgagaagcagaagccacacgtcccggcgacctaagttctggatcagccggccggaggacccgtgttagcatttacaatccgaggtgagctgaagcctccggttgtcccggttcgacgctctagccctgcgagcagccgacgccggaagtctctactgctccccgctggcgcgcaggaccgcgggcatttacccgtgctttcccaagcctggaagaactcgtcatgctctttgtagcgtggtgcttctgttgctcacagaggtgcctgcttccccttctgccatgattggaagtttcctgaggcctccccagccatgtggaactgacaacttgcctttgatgattttcaagagagttgtgctatgatgtggcaaaagtatgcaggaagcaggcggtcaatgcctctgggagcaaggatccttttccacggtgtgttctatgccgggggctttgccattgtgtattacctcattcaaaagtttcattccagggctttatattacaagttggcagtggagcagctgcagagccatcccgaggcacaggaagctctgggccctcctctcaacatccattatctcaagctcatcgacagggaaaacttcgtggacattgttgatgccaagttgaagattcctgtctctggatccaaatcagagggccttctctacgtccactcatccagaggtggcccctttcagaggtggcaccttgacgaggtctttttagagctcaaggatggtcagcagattcctgtgttcaagctcagtggggaaaacggtgatgaagtgaaaaaggagtagagacgacccagaagacccagcttgcttctagtccatccttccctcatctctaccatatggccactggggtggtggcccatctcagtgacagacactcctgcaacccagttttccagccaccagtgggatgatgtggtctggaactgaaagtgatgcgtatttctgagttatgcctgtatttaagaagctgagtgaaacccaaagaagtccatgataggacagacttctgaaaactaaagacagaaaaaagcttgaaagcatcaagaaagaagtgaaatcttaactagagggaaaagtaactcagatgacagtggatttctctctggaaaccatggaggccagaaggaagtgagacaagttcttttagtgccagaagaactatcaacttgtggctgggcacggtggctcacacctgtaatcccagcactttgggagaccaaggtgggcagatcacttgaagtcaggagtttgagaccagcctggccaacatggcaaaaccctgtctctactaaaaatacaaaaattagccaggcatggtggcacatgcctgtaatctcagctacttgggaggctgaggcacgagaattacttgaacccgggaggtggaggttgcagtgagccaagatcctgccactgcactccagcctgggcaacagagcaagactgcctcaaaacaaaactctgtcaactccaaattcctatttggtgaaatgatccttcaggattgatggggtaataaaaacattctcggttgatagaaaactaaaagaatttgttgaatgagtctaccctatagaccttgaaaagaccaaccctaaaggaagttcttgaaccagaaaggaaacattt

SEQ ID NO: 427298 - DNA, 2084 bp, Homo sapiens
cgaaacccttcccggcgcgagtccgagcgtctgagaagcagaagccacacgtcccggcgacctaagttctggatcagccggccggaggacccgtgttagcatttacaatccgaggtgagctgaagcctccggttgtcccggttcgacgctctagccctgcgagcagccgacgccggaagtctctactgctccccgctggcgcgcaggaccgcgggcatttacccgtgctttcccaagcctggaagaactcgtcatgctctttgtagcgtggtgcttctgttgctcacaggacaacttgcctttgatgattttcaagagagttgtgctatgatgtggcaaaagtatgcaggaagcaggcggtcaatgcctctgggagcaaggatccttttccacggtgtgttctatgccgggggctttgccattgtgtattacctcattcaaaagtttcattccagggctttatattacaagttggcagtggagcagctgcagagccatcccgaggcacaggaagctctgggccctcctctcaacatccattatctcaagctcatcgacagggaaaacttcgtggacattgttgatgccaagttgaagattcctgtctctggatccaaatcagagggccttctctacgtccactcatccagaggtggcccctttcagaggtggcaccttgacgaggtctttttagagctcaaggatggtcagcagattcctgtgttcaagctcagtggggaaaacggtgatgaagtgaaaaaggagtagagacgacccagaagacccagcttgcttctagtccatccttccctcatctctaccatatggccactggggtggtggcccatctcagtgacagacactcctgcaacccagttttccagccaccagtgggatgatgttgcacctggacttgatatgaaagtaaccatcagaaaatcaacagagatcttaaacttgcctaccacagacacctgcaggaatatactaagaatcatcacagtggacctttattgtctcctgagcacccattcattgttctttcagaaacacaactggttttgagaatccatcccttcttcactcagtccacgtaaaggttaggatggtagaaagtgttatacctcttcctccagagttggagcctatgacactgatgacactggcatggaaagccaaagccctacaccaaccagcacacttactggttccaaattgatctacgctggtgtaatcagagtgaatctcagaactttggacagagctgtgagcagagactgactttcctgctgtctccaggtagctgcaaggctgaacagcagcacctactttattaccatcttactgtcattcaaagaaggcagagctgaatgctggagaaaaactgagtaccagcaacagtttttgaaccctgaatattgtcataactgaagctagaattatccctggacttgtttgccactaaaatttccttgttttgcttaccctggtttcagctggcaccctgatcacttgaaaggaacataactgatatactgtcctttgtttttctttccttcctcttctctgcctttgatgattttaaattagaaatctacctgcctctaatctctttaattttctcatttatttactgctgcctattttccaaaacactgcttttcgaatattcctggctcaaaaatctatgtcttcatgacatatgaaacccctagaatccagcctttccccagcttttaatatctcctaattgatttctcaattccagtgaaatgattccatttatttttttcccaaacacatcacaaatattcctaactcttgtgagcaattttctctcattcttctcaacttatctaaatcctaacttttcaaaagatctagctcaagttctgtcttatcatattttgagttcctttctttggcattgtattattttgtatctttccatgtacacatgtgtgcattatctccctgataaaactaactggctagaggataggagtaaagactcaattctaatatccttgttacctaataatacacaaacgtgaaacatgtttgaataaatcactgttaaatat

SEQ ID NO: 427299 - DNA, 900 bp, Homo sapiens
ggcccacctgctcataaacaaaatgcccatgttgggtctcagaggtgatcggcgatcagagggcgatcacctctgagacccaccttgctcataaacaaaatgcccatgttggtcctctgccctggacctgtgacattctggactatttctgtgtttatttgtggccgagtgtaacaaccatataataaatcacctcttccgctgtttaaaaaaaaaaaaaaaaaaaaaaaaaaaaaaaaaaaaaaaaaaaaaaaaaccccgcggcggcctctcttttttgttggggggggggagaaaaaggggtgttaaggaaaggcggcgccgcgggggctcacagcggggttctctcgtgagaccccactttttttttcccaacgggggggaaaactatcgggggggctcccccctatgagggagaggggccgacattaaatttttcccgaagaaggcccgcggggttaccccggccgccttttatagtgatctgcggccgacaaaaccccgcgaagcaccagagccacgagcctatataatccatatcaacgatcgacctgaggctgagaagcgacgacaaacaccagcacgcatatcgcagcaacagcgctcgaaaacaaaggacgaggaacagaactactgccgcgcgcacacacagacgccacaacaacagaccacacccacggcacgcaacagcacgcgacgagccggagaagggaggagcagacgcacacaaacacaaccccaccatggatccccaccacagaggagccgacgcacgcaggatccaccaaccacgcgcgaagacacgaaccaaagaaagacgcagcccgaactcaagagggtagaacaagatacgcagagcagaacgcacaacaagcagagacgggacgaagacagaccaac

SEQ ID NO: 427300 - DNA, 799 bp, Homo sapiens
  misc_feature (261)..(261): n is a, c, g, or t
  misc_feature (264)..(265): n is a, c, g, or t
  misc_feature (267)..(267): n is a, c, g, or t
  misc_feature (283)..(283): n is a, c, g, or t
ctagaacttcctctgagacaagctctagatccattgagacggagctctagacagtagcatgcagtcccacaacttgtctcaatggatctagaacttcatcgccctctgatcgccgatcacctctgagacccaccttgctcataaacaaaatgcccatgttggtcctctgccctggacctgtgacattctggactatttctgtgtttatttgtggccgagtgtaacaaccatataataaatcacctcttccgctgtttaaancannanaaaaaaaaaaaaaaanaaaaaaaaaaaaaaaaaaaaaaaaaaaaaaaaaaaaaaaaaaaaaaaaaaaaaaaaggggggggggggaaaaaaaaatccccggggggcggcccaaaaatgagacaccgccacacagtgtttagtagagcgaaagaagggcgcccaatataaaagggggcgagcgataaataaaagaaaagcgagagcgaagaaggcgggcgaggaagaaaaaaaaaacaaaatggtagtaacggacgaacaacacctgctggcagccagaccgaacgacaatcagagaaagagaacaaccacaaacacaccagtcggaggggagaagagaaaacaaaaacgggaggacacacacaaccacacaaaaaagaagataagacaaagcacctcagaggacaaaaaaaaaacagaaaagacgaccgaagagacaatgacgacggacaaaaacaccaacgagaacacacatagccgaaggacaaaaaagaacacaaagaggaagaggcacaaaccaaaaccacacaccgag

SEQ ID NO: 427301 - DNA, 896 bp, Homo sapiens
  misc_feature (523)..(523): n is a, c, g, or t
  misc_feature (526)..(527): n is a, c, g, or t
  misc_feature (529)..(529): n is a, c, g, or t
  misc_feature (545)..(545): n is a, c, g, or t
tcactggagacaggaggttttattggatgctgatgggggtaggaaaggtccccagaagcatgggggctgagtcagtcagcaaagtgcgtaaggcctagcgccattttttggaaacctctgcgccatgagagccaagtggaggaagaagcgaatgcgcaggctgaagcgcaaaagaagaaagatgaggcagaggtccaagtaaaccgctagcttgttgcaccgtggaggccacaggagcagaaacatggaatgccagacgctggggatgctggtacaagttgtgggactgcatgctactgtctagagcttgtctcaatggatctagaacttcatcgccctctgatcgccgatcacctctgagacccaccttgctcataaacaaaatgcccatgttggtcctctgccctggacctgtgacattctggactatttctgtgtttatttgtggccgagtgtaacaaccatataataaatcacctcttccgctgttttagctgaagaattaaatcaaaaaaaaaaaaancannanaaaaaaaaaaaaaaanaaaaaaaaaaaaaaaaaaaaaaaaaaaaaaaaaaaaattaaaaccctgccctcttttacaaaatatgagttccgggcctatctagaaaaaaaacacccccgccccccgcgggttttttttttttttttccccccaaaaaaacatttgtggcaccaaaattttttgcggggggaaatttttgttaccccccaccaaagttttaaaccaaccttggggcttttgtgggaaaaaacaaaaaaaaaacccccccccaccccccccccacattttttgcccactttaaaaaacccccctctttttagggcggggaaagaactcttttttttttgtgggtcacaccacatttttata

SEQ ID NO: 427302 - DNA, 931 bp, Homo sapiens
tcactggagacaggaggttttattggatgctgatgggggtaggaaaggtccccagaagcatgggggctgagtcagtcagcaaagtgcgtaaggcctagcgccattttttggaaacctctgcgccatgagagccaagtggaggaagaagcgaatgcgcaggctgaagcgcaaaagaagaaagatgaggcagaggtccaagtaaaccgctagcttgttgcaccgtggaggccacaggagcagaaacatggaatgccagacgctggggatgctggtacaagttgtgggactgcatgctactgtctagagcttgtctcaatggatctagaacttcatcgccctctgatcgccgatcacctctgagacccaccttgctcataaacaaaatgcccatgttggtcctctgccctggacctgtgacattctggactatttctgtgtttatttgtggccgagtgtaacaaccatataataaatcacctcttccgctgttttagctgaaaaaaaaaaaggcaaaaaaaaaaaaaaaaaaaaaattcgggggcttttttgtgtgggggggggaaaaaggggttattgaaaggggcggggcaagtgtgttttcgtggccccattttttggtcaaggggggaaaatgggagggccccaaaagggggggggaaaaaatagtggaaaaggaacgcgggttaacgtcgttttggagtatttcgtcgcacaagcaaacggagagatgcgaacagcgaacacaatcgaggagcaacagggggtagccctacacaaggggtacaaagcaacgccggctcgtgcgaaagctctgacactacacgagtacgatgtccatagaccccagacaagttaaacggaggcatatatataccagaaccaggtactagaagaaacacacaagcgagcgcagttacaaatgcgtaacgac

SEQ ID NO: 427303 - DNA, 939 bp, Homo sapiens
tcactggagacaggaggttttattggatgctgatgggggtaggaaaggtccccagaagcatgggggctgagtcagtcagcaaagtgcgtaaggcctagcgccattttttggaaacctctgcgccatgagagccaagtggaggaagaagcgaatgcgcaggctgaagcgcaaaagaagaaagatgaggcagaggtccaagtaaaccgctagcttgttgcaccgtggaggccacaggagcagaaacatggaatgccagacgctggggatgctggtacaagttgtgggactgcatgctactgtctagagcttgtctcaatggatctagaacttcatcgccctctgatcgccgatcacctctgagacccaccttgctcataaacaaaatgcccatgttggtcctctgccctggacctgtgacattctggactatttctgtgtttatttgtggccgagtgtaacaaccatataataaatcacctcttccgctgttttagctgaagaattaaatcaaaaaaaaaaaaaaaaaaaaaaaaaaaaaaaattcgggggcttttttgtgtgggggggggaaaaaggggttattgaaaggggcggggcaagtgtgttttcgtggccccattttttggtcaaggggggaaaatgggagggccccaaaagggggggggaaaaaatagtggaaaaggaacgcgggttaacgtcgttttggagtatttcgtcgcacaagcaaacggagagatgcgaacagcgaacacaatcgaggagcaacagggggtagccctacacaaggggtacaaagcaacgccggctcgtgcgaaagctctgacactacacgagtacgatgtccatagaccccagacaagttaaacggaggcatatatataccagaaccaggtactagaagaaacacacaagcgagcgcagttacaaatgcgtaacgac

SEQ ID NO: 427304 - DNA, 491 bp, Homo sapiens
tcactggagacaggaggttttattggatgctgatgggggtaggaaaggtccccagaagcatgggggctgagtcagtcagcaaagtgcgtaaggcctagcgccattttttggaaacctctgcgccatgagagccaagtggaggaagaagcgaatgcgcaggctgaagcgcaaaagaagaaagatgaggcagaggtccaagtaaaccgctagcttgttgcaccgtggaggccacaggagcagaaacatggaatgccagacgctggggatgctggtacaagttgtgggactgcatgctactgtctagagcttgtctcaatggatctagaacttcatcgccctctgatcgccgatcacctctgagacccaccttgctcataaacaaaatgcccatgttggtcctctgccctggacctgtgacattctggactatttctgtgtttatttgtggccgagtgtaacaaccatataataaatcacctcttccgctgttt

SEQ ID NO: 427305 - DNA, 443 bp, Homo sapiens
tcactggagacaggaggttttattggatgctgatgggggtaggaaaggtccccagaagcatgggggctgagtcagtcagcaaagtgcgtaaggcctagcgccattttttggaaacctctgcgccatgagagccaagtggaggaagaagcgaatgcgcaggctgaagcgcaaaagaagaaagatgaggcagaggtccaagtaaaccgctagcttgttgcaccgtggaggccacaggagcagaaacatggaatgccagaccttgtctcaatggatctagaacttcatcgccctctgatcgccgatcacctctgagacccaccttgctcataaacaaaatgcccatgttggtcctctgccctggacctgtgacattctggactatttctgtgtttatttgtggccgagtgtaacaaccatataataaatcacctcttccgctgttt

SEQ ID NO: 427306 - DNA, 1261 bp, Homo sapiens
cgaccgctgtcctccaacagcgcagggcagagcggctggcgccgccggagcgcggagccacgaccctccctggccgcctttgtctactggccgtgcggcccggaaccgccactctccagggccggggacgcgcccgcagctgtcggtgacagctcctccctaccgcaaccctccggggcggaggggcggtcgggccgggccctgctagcccgcgaccgcaagcccgcgctcgcggatcgatgcccccgcagcagggggaccccgcgttccccgaccgctgcgaggcgcctccggtgccgccgcgtcgggagcgcggtggacgcgggggacgcgggcctggggagccggggggccgggggcgtgcggggggtgccgaggggcgcggcgtcaagtgcgtgctggtcggcgacggcgcggtgggcaagacgagcctggtggtgagctacaccaccaacggctaccccaccgagtacatccctactgccttcgacaacttctccgcggtggtgtctgtggatgggcggcccgtgagactccaactctgtgacactgccggacaggatgaatttgacaagctgaggcctctctgctacaccaacacagacatcttcctgctctgcttcagtgtcgtgagcccctcatccttccagaacgtcagtgagaaatgggtgccggagattcgatgccactgtcccaaagcccccatcatcctagttggaacgcagtcggatctcagagaagatgtcaaagtcctcattgagttggacaaatgcaaagaaaagccagtgcctgaagaggcggctaagctgtgcgccgaggaaatcaaagccgcctcctacatcgagtgttcagccttgactcaaaaaaacctcaaagaggtctttgatgcagccatcgtcgctggcattcaatactcggacactcagcaacagccaaagaagtctaaaagcaggactccagataaaatgaaaaacctctccaagtcctggtggaagaagtactgctgtttcgtatgatgctggcaagacacccagaaaggctattttcagatgaaatcgatattagaagctatattagctgaaacaactccttttactgcgtagaacctatatcgagagtgtgtgtatatgtattataggaggagctctcaattttatgtattctttctgcctttaattttcttgtttgtttgagcttagggatgagatacttatgcaagatatttttgaagtaaattaaacatttttcacatctctggaaa

SEQ ID NO: 427307 - DNA, 1370 bp, Homo sapiens
cgaccgctgtcctccaacagcgcagggcagagcggctggcgccgccggagcgcggagccacgaccctccctggccgcctttgtctactggccgtgcggcccggaaccgccactctccagggccggggacgcgcccgcagctgtcggtgacagctcctccctaccgcaaccctccggggcggaggggcggtcgggccgggccctgctagcccgcgaccgcaagcccgcgctcgcggatcgatgcccccgcagcagggggaccccgcgttccccgaccgctgcgaggcgcctccggtgccgccgcgtcgggagcgcggtggacgcgggggacgcgggcctggggagccggggggccgggggcgtgcggggggtgccgaggggcgcggcgtcaagtgcgtgctggtcggcgacggcgcggtgggcaagacgagcctggtggtgagctacaccaccaacggctaccccaccgagtacatccctactgccttcgacaacttctccgcggtggtgtctgtggatgggcggcccgtgagactccaactctgtgacactgccggacaggatgaatttgacaagctgaggcctctctgctacaccaacacagacatcttcctgctctgcttcagtgtcgtgagcccctcatccttccagaacgtcagtgagaaatgggtgccggagattcgatgccactgtcccaaagcccccatcatcctagttggaacgcagtcggatctcagagaagatgtcaaagtcctcattgagttggacaaatgcaaagaaaagccagtgcctgaagaggcggctaagctgtgcgccgaggaaatcaaagccgcctcctacatcgagtgttcagccttgactcaaaaaaacctcaaagaggtctttgatgcagccatcgtcgctggcattcaatactcggacactcagcaacagccaaagaagtctaaaagcaggactccagataaaatgaaaaacctctccaagtcctggtggaagaagtactgctgtttcgtatgatgctggcaagacacccagaaaggctattttcagatgaaatcgatattagaagctatattagctgaaacaactccttttactgcgtagaacctatatcgagagtgtgtgtatatgtattataggagggtcccagttatgtatctctgcttattctggtgggactgggggacttgggaatttagggcactttgcactgtgataagctacacgggtaatttgtgaaccgctggtgaaagcggcatttgagagggaggttcccggaggaggggttgatattattagtatgctatgttttttaattatttcgaggagacaagaaactagaggtgtgcaccaacaggacgagcagccgcg

SEQ ID NO: 427308 - DNA, 3881 bp, Homo sapiens
cgaccgctgtcctccaacagcgcagggcagagcggctggcgccgccggagcgcggagccacgaccctccctggccgcctttgtctactggccgtgcggcccggaaccgccactctccagggccggggacgcgcccgcagctgtcggtgacagctcctccctaccgcaaccctccggggcggaggggcggtcgggccgggccctgctagcccgcgaccgcaagcccgcgctcgcggatcgatgcccccgcagcagggggaccccgcgttccccgaccgctgcgaggcgcctccggtgccgccgcgtcgggagcgcggtggacgcgggggacgcgggcctggggagccggggggccgggggcgtgcggggggtgccgaggggcgcggcgtcaagtgcgtgctggtcggcgacggcgcggtgggcaagacgagcctggtggtgagctacaccaccaacggctaccccaccgagtacatccctactgccttcgacaacttctccggatgaatttgacaagctgaggcctctctgctacaccaacacagacatcttcctgctctgcttcagtgtcgtgagcccctcatccttccagaacgtcagtgagaaatgggtgccggagattcgatgccactgtcccaaagcccccatcatcctagttggaacgcagtcggatctcagagaagatgtcaaagtcctcattgagttggacaaatgcaaagaaaagccagtgcctgaagaggcggctaagctgtgcgccgaggaaatcaaagccgcctcctacatcgagtgttcagccttgactcaaaaaaacctcaaagaggtctttgatgcagccatcgtcgctggcattcaatactcggacactcagcaacagccaaagaagtctaaaagcaggactccagataaaatgaaaaacctctccaagtcctggtggaagaagtactgctgtttcgtatgatgctggcaagacacccagaaaggctattttcagatgaaatcgatattagaagctatattagctgaaacaactccttttactgcgtagaacctatatcgagagtgtgtgtatatgtattataggaggagctctcaattttatgtattctttctgcctttaattttcttgtttgtttgagcttagggatgagatacttatgcaagatatttttgaagtaaattaaacatttttcacatctctggaaatttagagttctagacctctggttaatttatatctaatatgaagaagacacctctaatctggatgttaagaatgaagttctgctacattataatgtacagaagagcaaaagggaggaacactatggttaaccctctcttgattaagggctacttaatgcacagtgcattatgtacacaggtcaaccatggtaacaatagttcttagctttgaaactccatgcaaaccatgccttttttttaaggagcaaaaatctgagaaaaaaagtgagagacctctgcctacaaaacctcaaaccagtcacttttgtcaattgctaatacccagttacttatgatttaaaaacaaccaacagaaaacatcccactgactgtatggcactctgtagtcaaaaaaggaaacttccttattgggacttttctttcttagtccagttgtgttgacacatatgaacacagacaaagtgctatgcggaggaaagcaagtgttggtcagtagtttcatgttttagggagtggttcctgtggagatcagaaagtgacatttgctttcggtactgtaatacgtgcaccaaactgcctcaatcctaggtaacgagggcaacagggagcacctgtctggattgtttttaaacctccatactcaagctgtctcttcggcagggaggtgaatactcttgaaaggccaacagcaagtgtttgtgggacacaacacagataattttttcttaagtcggccaagatgtacttctctgtgtgcacacccatgcacactcatgcacacagatacataggtctgtatggctgtatttgctgttgattcagactttcacaccattaatggggaaaagcgtggccacaaaaacagatgctaggaagcttggcttcctcttcttgttgacccttttttgaaccaacatcttttttattatattcagagtatgtttttaagtgtatcttaatatatacattttttaggacatcttaaatctaaacaaaaaataaaatgaacatctcttgaaacctgttaaaacaaccagttaaagccacagatggctttcagggcagtagcagcagaggccagtggactctgaggactcctgaggggcggggcgtgtagccagccaggtgcatgccgggaccatggcccccatacttggctgcttcctgtgacagtgaaatacatccttcaaggtggcagctgttagggctgaatcttctggagaaaaaggtgccatctcaggagaatagcttttactctggtaggaatgcttccgagacaccacaaggcagcctgaacactcagttgcagggtcgggcttgcggtgggtgacccagagccaccaaagtcacatccacaactaatgagggaaatctgtaaagccagttagatagaagaattttatttttctgtgggttttgtgttgtcttttttatgttaaaaagaaatccagtttgtgtttttctatagaaaaagtaaaagatcaggttatactttaggttaggggttctatttattcctgttagtaaataaaattaacaaatttctttgtttaacaaaagattaatctttaaaccactaaaatacatagactgattgattattcaacacattggaattgatgtcggtcatagtttcctgaagcatttagttacaacctgaaggaataaaatgatttgtggaaatgcttaaaatagacctaactgaatacagtctcatcttgccgcgcctggcttacctatctgtggaaagctaggcttcccaggctgggctctgcctgtctggtgcctggaggtgtgggagggaagatgagttatttaactggtaagcgatttgaaacactatttttatattaaagtaaatggcatggagtatagtgcaaattcatttttaagatagaacacaaaacttgaaagaagttttatgcgtgtgacagtgtatggggctgcagttggtctccctggaggggacttccacacctcctgcctttaggccatgggtggaaagtgctcagtgaagtacacctgtgtggcccagttctgaaagctttatacagttgaattttaagtggggttgataacaccttggactgttagtgttaaaaatctagtgggttgacctttaaatgcaacagtttttaaaatatattgctgcattttatagaatagtaaaggtacgattatacttgagattttcctccatttttatttcttcgtgaacatagagtttggggccgaaaatgtttttaaagtatgtgtttgagttaaatataaagttggttcacttcaaagctaaaaaattgttaaacttgcagcttggtattgcagagaagattttataagaattttgctttagagaatgccactttggctgaactacaagtgtaggccaccattataatttataaatacagcatacttcaaaactgtttgttatctcttgttaccatgtatgtataaatggaccttttataaccttgttctctgcttgacagactcaagagaaactacccaggtattacacaagccaaaatgggagcaaggccttctctccagactatcgtaacctggtgccttaccaagttgtgcttttctgttttcaagtgtaaatgatgttgagcagaatgttgtacttgaaaatgctataagtgagatggtatgaaataaattctgacttatgaa

SEQ ID NO: 427309 - DNA, 3886 bp, Homo sapiens
cgaccgctgtcctccaacagcgcagggcagagcggctggcgccgccggagcgcggagccacgaccctccctggccgcctttgtctactggccgtgcggcccggaaccgccactctccagggccggggacgcgcccgcagctgtcggtgacagctcctccctaccgcaaccctccggggcggaggggcggtcgggccgggccctgctagcccgcgaccgcaagcccgcgctcgcggatcgatgcccccgcagcagggggaccccgcgttccccgaccgctgcgaggcgcctccggtgccgccgcgtcgggagcgcggtggacgcgggggacgcgggcctggggagccggggggccgggggcgtgcggggggtgccgaggggcgcggcgtcaagtgcgtgctggtcggcgacggcgcggtgggcaagacgagcctggtggtgagctacaccaccaacggctaccccaccgagtacatccctactgccttcgacaacttctccgcggtggtgtctgtggatgggcggcccgtgagactccaactctgtgacactgccggacaggatgaatttgacaagctgaggcctctctgctacaccaacacagacatcttcctgctctgcttcagtgtcgtgagcccctcatccttccagaacgtcagtgagaaatgggtgccggagattcgatgccactgtcccaaagcccccatcatcctagttggaacgcagtcggatctcagagaagatgtcaaagtcctcattgagttggacaaatgcaaagaaaagccagtgcctgaagaggcggctaagctgtgcgccgaggaaatcaaagccgcctcctacatcgagtgttcagccttgactcaaaaaaacctcaaagaggtctttgatgcagccatcgtcgctggcattcaatactcggacactcagcaacagccaaagaagtctaaaagcaggactccagataaaatgaaaaacctctccaagtcctggtggaagaagtactgctgtttcgtatgatgctggcaagacacccagaaaggctattttcagatgaaatcgatattagaagctatattagctgaaacaactccttttactgcgtagaacctatatcgagagtgtgtgtatatgtattataggaggagctctcaattttatgtattctttctgcctttaattttcttgtttgtttgagcttagggatgagatacttatgcaagatatttttgaagtaaattaaacatttttcacatctctggaaatttagagttctagacctctggttaatttatatctaatatgaagaagacacctctaatctggatgttaagaatgaagttctgctacattataatgtacagaagagcaaaagggaggaacactatggttaaccctctcttgattaagggctacttaatgcacagtgcattatgtacacaggtcaaccatggtaacaatagttcttagctttgaaactccatgcaaaccatgccttttttttaaggagcaaaaatctgagaaaaaaagtgagagacctctgcctacaaaacctcaaaccagtcacttttgtcaattgctaatacccagttacttatgatttaaaaacaaccaacagaaaacatcccactgactgtatggcactctgtagtcaaaaaaggaaacttccttattgggacttttctttcttagtccagttgtgttgacacatatgaacacagacaaagtgctatgcggaggaaagcaagtgttggtcagtagtttcatgttttagggagtggttcctgtggagatcagaaagtgacatttgctttcggtactgtaatacgtgcaccaaactgcctcaatcctaggtaacgagggcaacagggagcacctgtctggattgtttttaaacctccatactcaagctgtctcttcggcagggaggtgaatactcttgaaaggccaacagcaagtgtttgtgggacacaacacagataattttttcttaagtcggccaagatgtacttctctgtgtgcacacccatgcacactcatgcacacagatacataggtctgtatggctgtatttgctgttgattcagactttcacaccattaatggggaaaagcgtggccacaaaaacagatgctaggaagcttggcttcctcttcttgttgacccttttttgaaccaacatcttttttattatattcagagtatgtttttaagtgtatcttaatatatacattttttaggacatcttaaatctaaacaaaaaataaaatgaacatctcttgaaacctgttaaaacaaccagttaaagccacagatggctttcagggcagtagcagcagaggccagtggactctgaggactcctgaggggcggggcgtgtagccagccaggtgcatgccgggaccatggcccccatacttggctgcttcctgtgacagtgaaatacatccttcaaggtggcagctgttagggctgaatcttctggagaaaaaggtgccatctcaggagaatagcttttactctggtaggaatgcttccgagacaccacaaggcagcctgaacactcagttgcagggtcgggcttgcggtgggtgacccagagccaccaaagtcacatccacaactaatgagggaaatctgtaaagccagttagatagaagaattttatttttctgtgggttttgtgttgtcttttttatgttaaaaagaaatccagtttgtgtttttctatagaaaaagtaaaagatcaggttatactttaggttaggggttctatttattcctgttagtaaataaaattaacaaatttctttgtttaacaaaagattaatctttaaaccactaaaatacatagactgattgattattcaacacattggaattgatgtcggtcatagtttcctgaagcatttagttacaacctgaaggaataaaatgatttgtggaaatgcttaaaatagacctaactgaatacagtctcatcttgccgcgcctggcttacctatctgtggaaagctaggcttcccaggctgggctctgcctgtctggtgcctggaggtgtgggagggaagatgagttatttaactggtaagcgatttgaaacactatttttatattaaagtaaatggcatggagtatagtgcaaattcatttttaagatagaacacaaaacttgaaagaagttttatgcgtgtgacagtgtatggggctgcagttggtctccctggaggggacttccacacctcctgcctttaggccatgggtggaaagtgctcagtgaagtacacctgtgtggcccagttctgaaagctttatacagttgaattttaagtggggttgataacaccttggactgttagtgttaaaaatctagtgggttgacctttaaatgcaacagtttttaaaatatattgctgcattttatagaatagtaaaggtacgattatacttgagattttcctccatttttatttcttcgtgaacatagagtttggggccgaaaatgtttttaaagtatgtgtttgagttaaatataaagttggttcaataagaattttgctttagagaatgccactttggctgaactacaagtgtaggccaccattataatttataaatacagcatacttcaaaactgtttgttatctcttgttaccatgtatgtataaatggaccttttataaccttgttctctgcttgacagactcaagagaaactacccaggtattacacaagccaaaatgggagcaaggccttctctccagactatcgtaacctggtgccttaccaagttgtgcttttctgttttcaagtgtaaatgatgttgagcagaatgttgtacttgaaaatgctataagtgagatggtatgaaataaattctgacttatgaa

SEQ ID NO: 427310 - DNA, 1776 bp, Homo sapiens
  misc_feature (1680)..(1680): n is a, c, g, or t
cgaccgctgtcctccaacagcgcagggcagagcggctggcgccgccggagcgcggagccacgaccctccctggccgcctttgtctactggccgtgcggcccggaaccgccactctccagggccggggacgcgcccgcagctgtcggtgacagctcctccctaccgcaaccctccggggcggaggggcggtcgggccgggccctgctagcccgcgaccgcaagcccgcgctcgcggatcgatgcccccgcagcagggggaccccgcgttccccgaccgctgcgaggcgcctccggtgccgccgcgtcgggagcgcggtggacgcgggggacgcgggcctggggagccggggggccgggggcgtgcggggggtgccgaggggcgcggcgtcaagtgcgtgctggtcggcgacggcgcggtgggcaagacgagcctggtggtgagctacaccaccaacggctaccccaccgagtacatccctactgccttcgacaacttctccgcggtggtgtctgtggatgggcggcccgtgagactccaactctgtgacactgccggacaggatgaatttgacaagctgaggcctctctgctacaccaacacagacatcttcctgctctgcttcagtgtcgtgagcccctcatccttccagaacgtcagtgagaaatgggtgccggagattcgatgccactgtcccaaagcccccatcatcctagttggaacgcagtcggatctcagagaagatgtcaaagtcctcattgagttggacaaatgcaaagaaaagccagtgcctgaagaggcggctaagctgtgcgccgaggaaatcaaagccgcctcctacatcgagtgttcagccttgactcaaaaaaacctcaaagaggtctttgatgcagccatcgtcgctggcattcaatactcggacactcagcaacagccaaagaagtctaaaagcaggactccagataaaatgaaaaacctctccaagtcctggtggaagaagtactgctgtttcgtatgatgctggcaagacacccagaaaggctattttcagatgaaatcgatattagaagctatattagctgaaacaactccttttactgcgtagaacctatatcgagagtgtgtgtatatgtattataggaggagctctcaattttatgtattctttctgcctttaattttcttgtttgtttgagcttagggatgagatacttatgcaagatatttttgaagtaaattaaacatttttcacatctctggaaaaaaaaaaaaaaaaaaaaaaaaaaaaaaaaaagggggggggggaaaaatttcccccgggggggcccatttggggccccggttttttgtggtccaaggtgtggggccccttatgggggaggcggggtattataagcgcgagggcaggggcgccgcgtgttaaacccaagcggtcgctgtggtccggggagcactcggctcgctgggcgctctcttggggagaagggaccctcactttccggggggggggccatactggggccaactcaccccaggggatttaagacgctcccgggggaaactcacacattccacgtggtttacgggtgtaacccgacggggtactatgcctggggggctggagcgatcggcgcacggatttgtctctggaccattttacgacgcgcgctcaaaaacaaacnggtacaaccgagcaacgcgaaccacaaaaacgaaagtaacacatcttatacaaaacacacgcagcgcaataccgactcacaaacacaacaactgaa

SEQ ID NO: 427311 - DNA, 3940 bp, Homo sapiens
cgaccgctgtcctccaacagcgcagggcagagcggctggcgccgccggagcgcggagccacgaccctccctggccgcctttgtctactggccgtgcggcccggaaccgccactctccagggccggggacgcgcccgcagctgtcggtgacagctcctccctaccgcaaccctccggggcggaggggcggtcgggccgggccctgctagcccgcgaccgcaagcccgcgctcgcggatcgatgcccccgcagcagggggaccccgcgttccccgaccgctgcgaggcgcctccggtgccgccgcgtcgggagcgcggtggacgcgggggacgcgggcctggggagccggggggccgggggcgtgcggggggtgccgaggggcgcggcgtcaagtgcgtgctggtcggcgacggcgcggtgggcaagacgagcctggtggtgagctacaccaccaacggctaccccaccgagtacatccctactgccttcgacaacttctccgcggtggtgtctgtggatgggcggcccgtgagactccaactctgtgacactgccggacaggatgaatttgacaagctgaggcctctctgctacaccaacacagacatcttcctgctctgcttcagtgtcgtgagcccctcatccttccagaacgtcagtgagaaatgggtgccggagattcgatgccactgtcccaaagcccccatcatcctagttggaacgcagtcggatctcagagaagatgtcaaagtcctcattgagttggacaaatgcaaagaaaagccagtgcctgaagaggcggctaagctgtgcgccgaggaaatcaaagccgcctcctacatcgagtgttcagccttgactcaaaaaaacctcaaagaggtctttgatgcagccatcgtcgctggcattcaatactcggacactcagcaacagccaaagaagtctaaaagcaggactccagataaaatgaaaaacctctccaagtcctggtggaagaagtactgctgtttcgtatgatgctggcaagacacccagaaaggctattttcagatgaaatcgatattagaagctatattagctgaaacaactccttttactgcgtagaacctatatcgagagtgtgtgtatatgtattataggaggagctctcaattttatgtattctttctgcctttaattttcttgtttgtttgagcttagggatgagatacttatgcaagatatttttgaagtaaattaaacatttttcacatctctggaaatttagagttctagacctctggttaatttatatctaatatgaagaagacacctctaatctggatgttaagaatgaagttctgctacattataatgtacagaagagcaaaagggaggaacactatggttaaccctctcttgattaagggctacttaatgcacagtgcattatgtacacaggtcaaccatggtaacaatagttcttagctttgaaactccatgcaaaccatgccttttttttaaggagcaaaaatctgagaaaaaaagtgagagacctctgcctacaaaacctcaaaccagtcacttttgtcaattgctaatacccagttacttatgatttaaaaacaaccaacagaaaacatcccactgactgtatggcactctgtagtcaaaaaaggaaacttccttattgggacttttctttcttagtccagttgtgttgacacatatgaacacagacaaagtgctatgcggaggaaagcaagtgttggtcagtagtttcatgttttagggagtggttcctgtggagatcagaaagtgacatttgctttcggtactgtaatacgtgcaccaaactgcctcaatcctaggtaacgagggcaacagggagcacctgtctggattgtttttaaacctccatactcaagctgtctcttcggcagggaggtgaatactcttgaaaggccaacagcaagtgtttgtgggacacaacacagataattttttcttaagtcggccaagatgtacttctctgtgtgcacacccatgcacactcatgcacacagatacataggtctgtatggctgtatttgctgttgattcagactttcacaccattaatggggaaaagcgtggccacaaaaacagatgctaggaagcttggcttcctcttcttgttgacccttttttgaaccaacatcttttttattatattcagagtatgtttttaagtgtatcttaatatatacattttttaggacatcttaaatctaaacaaaaaataaaatgaacatctcttgaaacctgttaaaacaaccagttaaagccacagatggctttcagggcagtagcagcagaggccagtggactctgaggactcctgaggggcggggcgtgtagccagccaggtgcatgccgggaccatggcccccatacttggctgcttcctgtgacagtgaaatacatccttcaaggtggcagctgttagggctgaatcttctggagaaaaaggtgccatctcaggagaatagcttttactctggtaggaatgcttccgagacaccacaaggcagcctgaacactcagttgcagggtcgggcttgcggtgggtgacccagagccaccaaagtcacatccacaactaatgagggaaatctgtaaagccagttagatagaagaattttatttttctgtgggttttgtgttgtcttttttatgttaaaaagaaatccagtttgtgtttttctatagaaaaagtaaaagatcaggttatactttaggttaggggttctatttattcctgttagtaaataaaattaacaaatttctttgtttaacaaaagattaatctttaaaccactaaaatacatagactgattgattattcaacacattggaattgatgtcggtcatagtttcctgaagcatttagttacaacctgaaggaataaaatgatttgtggaaatgcttaaaatagacctaactgaatacagtctcatcttgccgcgcctggcttacctatctgtggaaagctaggcttcccaggctgggctctgcctgtctggtgcctggaggtgtgggagggaagatgagttatttaactggtaagcgatttgaaacactatttttatattaaagtaaatggcatggagtatagtgcaaattcatttttaagatagaacacaaaacttgaaagaagttttatgcgtgtgacagtgtatggggctgcagttggtctccctggaggggacttccacacctcctgcctttaggccatgggtggaaagtgctcagtgaagtacacctgtgtggcccagttctgaaagctttatacagttgaattttaagtggggttgataacaccttggactgttagtgttaaaaatctagtgggttgacctttaaatgcaacagtttttaaaatatattgctgcattttatagaatagtaaaggtacgattatacttgagattttcctccatttttatttcttcgtgaacatagagtttggggccgaaaatgtttttaaagtatgtgtttgagttaaatataaagttggttcacttcaaagctaaaaaattgttaaacttgcagcttggtattgcagagaagattttataagaattttgctttagagaatgccactttggctgaactacaagtgtaggccaccattataatttataaatacagcatacttcaaaactgtttgttatctcttgttaccatgtatgtataaatggaccttttataaccttgttctctgcttgacagactcaagagaaactacccaggtattacacaagccaaaatgggagcaaggccttctctccagactatcgtaacctggtgccttaccaagttgtgcttttctgttttcaagtgtaaatgatgttgagcagaatgttgtacttgaaaatgctataagtgagatggtatgaaataaattctgacttatgaa

SEQ ID NO: 427312 - DNA, 3886 bp, Homo sapiens
cgaccgctgtcctccaacagcgcagggcagagcggctggcgccgccggagcgcggagccacgaccctccctggccgcctttgtctactggccgtgcggcccggaaccgccactctccagggccggggacgcgcccgcagctgtcggtgacagctcctccctaccgcaaccctccggggcggaggggcggtcgggccgggccctgctagcccgcgaccgcaagcccgcgctcgcggatcgatgcccccgcagcagggggaccccgcgttccccgaccgctgcgaggcgcctccggtgccgccgcgtcgggagcgcggtggacgcgggggacgcgggcctggggagccggggggccgggggcgtgcggggggtgccgaggggcgcggcgtcaagtgcgtgctggtcggcgacggcgcggtgggcaagacgagcctggtggtgagctacaccaccaacggctaccccaccgagtacatccctactgccttcgacaacttctccgcggtggtgtctgtggatgggcggcccgtgagactccaactctgtgacactgccggacaggatgaatttgacaagctgaggcctctctgctacaccaacacagacatcttcctgctctgcttcagtgtcgtgagcccctcatccttccagaacgtcagtgagaaatgggtgccggagattcgatgccactgtcccaaagcccccatcatcctagttggaacgcagtcggatctcagagaagatgtcaaagtcctcattgagttggacaaatgcaaagaaaagccagtgcctgaagaggcggctaagctgtgcgccgaggaaatcaaagccgcctcctacatcgagtgttcagccttgactcaaaaaaacctcaaagaggtctttgatgcagccatcgtcgctggcattcaatactcggacactcagcaacagccaaagaagtctaaaagcaggactccagataaaatgaaaaacctctccaagtcctggtggaagaagtactgctgtttcgtatgatgctggcaagacacccagaaaggctattttcagatgaaatcgatattagaagctatattagctgaaacaactccttttactgcgtagaacctatatcgagagtgtgtgtatatgtattataggaggagctctcaattttatgtattctttctgcctttaattttcttgtttgtttgagcttagggatgagatacttatgcaagatatttttgaagtaaattaaacatttttcacatctctggaaatttagagttctagacctctggttaatttatatctaatatgaagaagacacctctaatctggatgttaagaatgaagttctgctacattataatgtacagaagagcaaaagggaggaacactatggttaaccctctcttgattaagggctacttaatgcacagtgcattatgtacacaggtcaaccatggtaacaatagttcttagctttgaaactccatgcaaaccatgccttttttttaaggagcaaaaatctgagaaaaaaagtgagagacctctgcctacaaaacctcaaaccagtcacttttgtcaattgctaatacccagttacttatgatttaaaaacaaccaacagaaaacatcccactgactgtatggcactctgtagtcaaaaaaggaaacttccttattgggacttttctttcttagtccagttgtgttgacacatatgaacacagacaaagtgctatgcggaggaaagcaagtgttggtcagtagtttcatgttttagggagtggttcctgtggagatcagaaagtgacatttgctttcggtactgtaatacgtgcaccaaactgcctcaatcctaggtaacgagggcaacagggagcacctgtctggattgtttttaaacctccatactcaagctgtctcttcggcagggaggtgaatactcttgaaaggccaacagcaagtgtttgtgggacacaacacagataattttttcttaagtcggccaagatgtacttctctgtgtgcacacccatgcacactcatgcacacagatacataggtctgtatggctgtatttgctgttgattcagactttcacaccattaatggggaaaagcgtggccacaaaaacagatgctaggaagcttggcttcctcttcttgttgacccttttttgaaccaacatcttttttattatattcagagtatgtttttaagtgtatcttaatatatacattttttaggacatcttaaatctaaacaaaaaataaaatgaacatctcttgaaacctgttaaaacaaccagttaaagccacagatggctttcagggcagtagcagcagaggccagtggactctgaggactcctgaggggcggggcgtgtagccagccaggtgcatgccgggaccatggcccccatacttggctgcttcctgtgacagtgaaatacatccttcaaggtggcagctgttagggctgaatcttctggagacaccacaaggcagcctgaacactcagttgcagggtcgggcttgcggtgggtgacccagagccaccaaagtcacatccacaactaatgagggaaatctgtaaagccagttagatagaagaattttatttttctgtgggttttgtgttgtcttttttatgttaaaaagaaatccagtttgtgtttttctatagaaaaagtaaaagatcaggttatactttaggttaggggttctatttattcctgttagtaaataaaattaacaaatttctttgtttaacaaaagattaatctttaaaccactaaaatacatagactgattgattattcaacacattggaattgatgtcggtcatagtttcctgaagcatttagttacaacctgaaggaataaaatgatttgtggaaatgcttaaaatagacctaactgaatacagtctcatcttgccgcgcctggcttacctatctgtggaaagctaggcttcccaggctgggctctgcctgtctggtgcctggaggtgtgggagggaagatgagttatttaactggtaagcgatttgaaacactatttttatattaaagtaaatggcatggagtatagtgcaaattcatttttaagatagaacacaaaacttgaaagaagttttatgcgtgtgacagtgtatggggctgcagttggtctccctggaggggacttccacacctcctgcctttaggccatgggtggaaagtgctcagtgaagtacacctgtgtggcccagttctgaaagctttatacagttgaattttaagtggggttgataacaccttggactgttagtgttaaaaatctagtgggttgacctttaaatgcaacagtttttaaaatatattgctgcattttatagaatagtaaaggtacgattatacttgagattttcctccatttttatttcttcgtgaacatagagtttggggccgaaaatgtttttaaagtatgtgtttgagttaaatataaagttggttcacttcaaagctaaaaaattgttaaacttgcagcttggtattgcagagaagattttataagaattttgctttagagaatgccactttggctgaactacaagtgtaggccaccattataatttataaatacagcatacttcaaaactgtttgttatctcttgttaccatgtatgtataaatggaccttttataaccttgttctctgcttgacagactcaagagaaactacccaggtattacacaagccaaaatgggagcaaggccttctctccagactatcgtaacctggtgccttaccaagttgtgcttttctgttttcaagtgtaaatgatgttgagcagaatgttgtacttgaaaatgctataagtgagatggtatgaaataaattctgacttatgaa

SEQ ID NO: 427313 - DNA, 3621 bp, Homo sapiens
cgaccgctgtcctccaacagcgcagggcagagcggctggcgccgccggagcgcggagccacgaccctccctggccgcctttgtctactggccgtgcggcccggaaccgccactctccagggccggggacgcgcccgcagctgtcggtgacagctcctccctaccgcaaccctccggggcggaggggcggtcgggccgggccctgctagcccgcgaccgcaagcccgcgctcgcggatcgatgcccccgcagcagggggaccccgcgttccccgaccgctgcgaggcgcctccggtgccgccgcgtcgggagcgcggtggacgcgggggacgcgggcctggggagccggggggccgggggcgtgcggggggtgccgaggggcgcggcgtcaagtgcgtgctggtcggcgacggcgcggtgggcaagacgagcctggtggtgagctacaccaccaacggctaccccaccgagtacatccctactgccttcgacaacttctccgcggtggtgtctgtggatgggcggcccgtgagactccaactctgtgacactgccggacaggatgaatttgacaagctgaggcctctctgctacaccaacacagacatcttcctgctctgcttcagtgtcgtgagcccctcatccttccagaacgtcagtgagaaatgggtgccggagattcgatgccactgtcccaaagcccccatcatcctagttggaacgcagtcggatctcagagaagatgtcaaagtcctcattgagttggacaaatgcaaagaaaagccagtgcctgaagaggcggctaagctgtgcgccgaggaaatcaaagccgcctcctacatcgagtgttcagccttgactcaaaaaaacctcaaagaggtctttgatgcagccatcgtcgctggcattcaatactcggacactcagcaacagccaaagaagtctaaaagcaggactccagataaaatgaaaaacctctccaagtcctggtggaagaagtactgctgtttcgtatgatgctggcaagacacccagaaaggctattttcagatgaaatcgatattagaagctatattagctgaaacaactccttttactgcgtagaacctatatcgagagtgtgtgtatatgtattataggaggagctctcaattttatgtattctttctgcctttaattttcttgtttgtttgagcttagggatgagatacttatgcaagatatttttgaagtaaattaaacatttttcacatctctggaaatttagagttctagacctctggttaatttatatctaatatgaagaagacacctctaatctggatgttaagaatgaagttctgctacattataatgtacagaagagcaaaagggaggaacactatggttaaccctctcttgattaagggctacttaatgcacagtgcattatgtacacaggtcaaccatggtaacaatagttcttagctttgaaactccatgcaaaccatgccttttttttaaggagcaaaaatctgagaaaaaaagtgagagacctctgcctacaaaacctcaaaccagtcacttttgtcaattgctaatacccagttacttatgatttaaaaacaaccaacagaaaacatcccactgactgtatggcactctgtagtcaaaaaaggaaacttccttattgggacttttctttcttagtccagttgtgttgacacatatgaacacagacaaagtgctatgcggaggaaagcaagtgttggtcagtagtttcatgttttagggagtggttcctgtggagatcagaaagtgacatttgctttcggtactgtaatacgtgcaccaaactgcctcaatcctaggtaacgagggcaacagggagcacctgtctggattgtttttaaacctccatactcaagctgtctcttcggcagggaggtgaatactcttgaaaggccaacagcaagtgtttgtgggacacaacacagataattttttcttaagtcggccaagatgtacttctctgtgtgcacacccatgcacactcatgcacacagatacataggtctgtatggctgtatttgctgttgattcagactttcacaccattaatggggaaaagcgtggccacaaaaacagatgctaggaagcttggcttcctcttcttgttgacccttttttgaaccaacatcttttttattatattcagagtatgtttttaagtgtatcttaatatatacattttttaggacatcttaaatctaaacaaaaaataaaatgaacatctcttgaaacctgttaaaacaaccagttaaagccacagatggctttcagggcagtagcagcagaggccagtggactctgaggactcctgaggggcggggcgtgtagccagccaggtgcatgccgggaccatggcccccatacttggctgcttcctgtgacagtgaaatacatccttcaaggtggcagctgttagggctgaatcttctggagaaaaaggtgccatctcaggagaatagcttttactctggtaggaatgcttccgagacaccacaaggcagcctgaacactcagttgcagggtcgggcttgcggtgggtgacccagagccaccaaagtcacatccacaactaatgagggaaatctgtaaagccagttagatagaagaattttatttttctgtgggttttgtgttgtcttttttatgttaaaaagaaatccagtttgtgtttttctatagaaaaagtaaaagatcaggttatactttaggttaggggttctatttattcctgttagtaaataaaattaacaaatttctttgtttaacaaaagattaatctttaaaccactaaaatacatagactgattgattattcaacacattggaattgatgtcggtcatagtttcctgaagcatttagttacaacctgaaggaataaaatgatttgtggaaatgcttaaaatagacctaactgaatacagtctcatcttgccgcgcctggcttacctatctgtggaaagctaggcttcccaggctgggctctgcctgtctggtgcctggaggtgtgggagggaagatgagttatttaactggtaagcgatttgaaacactatttttatattaaagtaaatggcatggagtatagtgcaaattcatttttaagatagaacacaaaacttgaaagaagttttatgcgtgtgacagtgtatggggctgcagttggtctccctggaggggacttccacacctcctgcctttaggccatgggtggaaagtgctcagtgaagtacacctgtgtggcccagttctgaaagctttatacagttgaattttaagtggggttgataacaccttggactgttagtgttaaaaaattatgaagtatgtcaggcataccaaaagataaggaagatgttatctttacaccattacagccccatatggctcaagagaaactacccaggtattacacaagccaaaatgggagcaaggccttctctccagactatcgtaacctggtgccttaccaagttgtgcttttctgttttcaagtgtaaatgatgttgagcagaatgttgtacttgaaaatgctataagtgagatggtatgaaataaattctgacttatgaa

SEQ ID NO: 427314 - DNA, 3466 bp, Homo sapiens
aaaataaattatgacatttagtatctaaggttagaaaaccacgcccacatgctaaaatgggtgttgaaaactaggttacttataatgcaaggaatcaggaaactttagttatttatagtataatcaccattatctgtttaaaggatccatttagttaaaatcgggcactctatattcattaaggtttatgaattaaaaagaaagctttatgtagttatgcatgtcagtttgctatttaaaatgtgtgacagtgtttgtcatattaagagtgaatttggcaggaattcccaagatggacattgtgcttttaaactagaacttgtaagacattatgtgaatatcccttgccaattttttttataataagaaaacatctgactaaagtcaaagaatgatttcttatggtttattttgatgaaagttcttttaacatgtcttgaatgtacacataaaggaatccaaagctttccattctaacttaatctttgtgataacattattgccatgttctacaaccgtaagatgacagttttcaatgtagtgacacaaaagggcatgaaaaactaactgctagctttcctttcatttcaaaagtccaagaatttctagtatatttggattttagcttctgttcaaagcaaatccagatgcaactccagtaagtggcctttgctcttttttgtaccaaagagcccagatgattcctacagtccctttcttctctaacatgctgtggttccttaaatatgagtaatttctctaagatataacccaggtgctttgagaagctgcattaaggtgttcaggccctcagatatcacatggtacacttgattagtaataaaaccagagatcaatttaaattgctgataggtcctgtctcagtgtgtggcattgactgttttcaggaaaatagatacagattaatatgagttatgcgtgtaggttgtgtatagattgagaagatagatacttctcaatctagtagtttgatttatttaaccaatggtttcagtttgcttgagcatatgaaaatcctgcttaatgtgcttaagagtataataaatgtgtacttttgtcctcaaacctagtagctgggttttaacactcatggacatggtcttaatcaatggagttaaataaacaaattcagcaagttattaaatctgacatggtaggagaggggagatgtgtcctgcttattaaatgtgttggtccattgaaagttacatggattgccaatttttaaaacactaaagttgaataaaatgcatgaacaatagaaaaatgctgaacattattttggatgctagctgcttggacattaactgtgttatttctgctttgagatgaaaatatatatttatctttgcttattttatcccagatgtgttctgaatatccttcttcataaatcatggaaaactcactgctgagatagtaaaccatgaaatcgccttttcagttggtgccatgtatctgacagttccatcttggaaggtttcaaaattaccttttaaaatgatctcagaagtctgtagattctcaatgatactgaaagctttgcacctctttggtagaaaccaggtctatttagaaaatggctttatgataaatgttgcctcctgagtgataatgaagtgttcctggatattgtattgtaatttaatgtgcttaccacactgccacattttaatgagtcagagaaaaattaatttttcttcaatacaataatagaacaagtagcctattctcttaaaaagtatgtgaaaagaaaattatgaaaaaatatgcatacctaatgaagtattggttttagtaagaattaaatacatttcattgagctttaaagtactttggagaaactttggggcacgttttcctactctaattcaactaaagttataaataaagagaaaaactcattcagaaatcatggattttaaaaatattttactgcagccaagttttcatttcaaaatgtaatttcagtttggagcttttaggcattatgtatatttaaaaaatatattcttcaaaaatgcattttggcatggtgggatggatgttgcaaaagatatccggagcctccagtctgtcattaactgatatggtaaatcacctctcttctttgggtctcaattttttatttatctatatggtaaactcagagatcactccttaggggtgagtcctattgcaatatgaccgacaaagaagacaaaatagcattgaaactaacccatacaaaatatccaactctggattctgtgaataagtatcttgaccataaaaagtcattgctgttcttgtttctaatgtaaatagtgtccattagtaaaagtgaaattcagtcttaagtagggtgaattggatcaccatttacacaagagatggctttttcctttgcttgaataaacattttggatcacctccaaagaatgaaaaccagtagtacgttttagtcatattagtcaggatgagaaactataagatgtgtgtaacatttggaaatgcaccaaagtgagcgtttaaatcttctcattttattgaaaactaagagcagaaaatgtaaaatgctcatgaaggttttgaatgccaaaagatattttagaatcaatttataaaggggtaattcattaattacactttaaaattggaaagtgggataagaaatctaaagtaaaccagcttatctttgaaacaatattattttgaaattggctttaaaataaaaccattcagattgaaattctaattagctcatttgtggagtttgatcacacaattcataatgttgctgctttccattaactagtcttgaaatgcctttgtttgtaaaaataaaataatggtactttcattttataacaaggtgtttttttcaagaaataatccatgctaaaatggatatttgtgatcctgaaatgtttactaagcattgtaaatttatttataactgccatctccaactacatccttatgatgtttttaacaataaaattaaaacaactgttaaactaaaaaccacaccgttttccagtacttgatctctgagctacaatactcactaaatataattttccaatcaaaatattctattctatattctaagggttaatatgtgattatagtgtccacttgccaccatttttttaaatcaatggacttgaaaagtattaatttagatggatgcgcagatataccctcagttcagtcatagattggagtttgcatataataatgtaaatgtatgtcgacactattctaaatagttctattatgactgaaatttaattaaataaaaaaggttgtaaaatgtgatgtgtatgtgtatatactgtatgtgtactttttaaaataggtgtatgtcccaacccttttttatacaggtttgaatttaaaattacatgatatatacatatactttattgttctaaataaagaattttatgcactctcaaaa

SEQ ID NO: 427315 - DNA, 3027 bp, Homo sapiens
aaaataaattatgacatttagtatctaaggttagaaaaccacgcccacatgctaaaatgggtgttgaaaactaggttacttataatgcaaggaatcaggaaactttagttatttatagtataatcaccattatctgtttaaaggatccatttagttaaaatcgggcactctatattcattaaggtttatgaattaaaaagaaagctttatgtagttatgcatgtcagtttgctatttaaaatgtgtgacagtgtttgtcatattaagagtgaatttggcaggaattcccaagatggacattgtgcttttaaactagaacttgtaagacattatgtgaatatcccttgccaattttttttataataagaaaacatctgactaaagtcaaagaatgatttcttatggtttattttgatgaaagttcttttaacatgtcttgaatgtacacataaaggaatccaaagctttccattctaacttaatctttgtgataacattattgccatgttctacaaccgtaagatgacagttttcaatgtagtgacacaaaagggcatgaaaaactaactgctagctttcctttcatttcaaaagtccaagaatttctagtatatttggattttagcttctgttcaaagcaaatccagatgcaactccagtaagtggcctttgctcttttttgtaccaaagagcccagatgattcctacagtccctttcttctctaacatgctgtggttccttaaatatgagtaatttctctaagatataacccaggtgctttgagaagctgcattaaggtgttcaggccctcagatatcacatggtacacttgattagtaataaaaccagagatcaatttaaattgctgataggtcctgtctcagtgtgtggcattgactgttttcaggaaaatagatacagattaatatgagttatgcgtgtaggttgtgtatagattgagaagatagatacttctcaatctagtagtttgatttatttaaccaatggtttcagtttgcttgagcatatgaaaatcctgcttaatgtgcttaagagtataataaatgtgtacttttgtcctcaaacctagtagctgggttttaacactcatggacatggtcttaatcaatggagttaaataaacaaattcagcaagttattaaatctgacatggtaggagaggggagatgtgtcctgcttattaaatgtgttggtccattgaaagttacatggattgccaatttttaaaacactaaagttgaataaaatgcatgaacaatagaaaaatgctgaacattattttggatgctagctgcttggacattaactgtgttatttctgctttgagatgaaaatatatatttatctttgcttattttatcccagatgtgttctgaatatccttcttcataaatcatggaaaactcactgctgagatagtaaaccatgaaatcgccttttcagttggtgccatgtatctgacagttccatcttggaaggtttcaaaattaccttttaaaatgatctcagaagtctgtagattctcaatgatactgaaagctttgcacctctttggtagaaaccaggtctatttagaaaatggctttatgataaatgttgcctcctgagtgataatgaagtgttcctggatattgtattgtaatttaatgtgcttaccacactgccacattttaatgagtcagagaaaaattaatttttcttcaatacaataatagaacaagtagcctattctcttaaaaagtatgtgaaaagaaaattatgaaaaaatatgcatacctaatgaagtattggttttagtaagaattaaatacatttcattgagctttaaagtactttggagaaactttggggcacgttttcctactctaattcaactaaagttataaataaagagaaaaactcattcagaaatcatggattttaaaaatattttactgcagccaagttttcatttcaaaatgtaatttcagtttggagcttttaggcattatgtatatttaaaaaatatattcttcaaaaatgcattttggcatggtgggatggatgttgcaaaagatatccggagcctccagtctgtcattaactgatatggtaaatcacctctcttctttgggtctcaattttttatttatctatatggtaaactcagagatcactccttaggggtgagtcctattgcaatatgaccgacaaagaagacaaaatagcattgaaactaacccatacaaaatatccaactctggattctgtgaataagtatcttgaccataaaaagtcattgctgttcttgtttctaatgtaaatagtgtccattagtaaaagtgaaattcagtcttaagtagggtgaattggatcaccatttacacaagagatggctttttcctttgcttgaataaacattttggatcacctccaaagaatgaaaaccagtagtacgttttagtcatattagtcaggatgagaaactataagatgtgtgtaacatttggaaatgcaccaaagtgagcgtttaaatcttctcattttattgaaaactaagagcagaaaatgtaaaatgctcatgaaggttttgaatgccaaaagatattttagaatcaatttataaaggggtaattcattaattacactttaaaattggaaagtgggataagaaatctaaagtaaaccagcttatctttgaaacaatattattttgaaattggctttaaaataaaaccattcagattgaaattctaattagctcatttgtggagtttgatcacacaattcataatgttgctgctttccattaactagtcttgaaatgcctttgtttgtaaaaataaaataatggtactttcattttataacaaggtgtttttttcaagaaataatccatgctaaaatggatatttgtgatcctgaaatgtttactaagcattgtaaatttatttataactgccatctccaactacatccttatgatgtttttaacaataaaatgttctagatcgcgagcggccgct

SEQ ID NO: 427316 - DNA, 3445 bp, Homo sapiens
ttcagaaggccagccggcaggaggagccggacagcctctcctattactgcgctgctgagaccaacggggtgggtgcagcctcgggcaccccgccctccaaggctaccctggaggggaaggtggcttcccccaagcactgtgttctggctcggcccaaagggactccccctctgccccctgtccgaaagtccagcctggaccagaagaaccgggccagccctcagcacagtgccagcggcagcggcaccagcagccccctgaaccaaccagccgccttcccggcgggcctcccagacgagcctagcggcaagacgaaggacgccagcagcagcagcaagctcttcagtgccaagctggagcagctggccagcagaagcaactcgctgggcagggcgacggtcagccactacgaatgcctctccccggagcgggccgagagcctgtcctccgtgagctcccggctgcacgcgggcaaggacggcaccatgccccgcgcggggaggagcctgggccgcagcgccgggacctcgccccccagctccggggcctcgcccaaggccggccagtccaagatctccgccgtgagcagactcctcctggccagccccagagcgcacggcccgtccgcctccaccaccaaaaccctcagcttctccaccaagtccctgccgcaggcggtgggccagggctccagctcgccccccggtgggaagcacacgccctggtccacgcagtccctcagcaggaacaggagctcgggcctggcctccaagcttcccctgcgggccgtcagcgggcgcatctcggagctgctgcagggtggcgcgggcgcccggggcttgcagctgcgggccgggcccgaggcggaggcgcgcgggggggccctggccgaggacgagcccgcggccgcgcacctgctcccgtcgccctacagcaagatcacgcccccgcggaggccccaccgctgcagcagcggccacggcagcgacaacagcagcgtgctgagcggggagctcccgccggccatggggaagacggccctgttctaccacagcggcggcagcagcggctacgagagcgtgatgcgggacagcgaggccaccggcagcgcgtcctcggcgcaggactccacgagcgagaacagcagctccgtgggcggcaggtgccggagcctcaagaccccgaagaaacgctccaatccaggttctcagagacggaggcttatcccagcactatccctggacacctcttcccctgtgagaaaaccccccaacagcacaggcgtccgctgggtggatggccccttgcggagcagcccgaggggccttggggaaccctttgagattaaagtctatgaaatcgatgacgtggagcgcctgcagcggcgacgagggggtgccagcaaggaggccatgtgcttcaatgcaaagctgaagattctggaacaccgccagcagaggatcgccgaggtccgcgcgaagtacgagtggctgatgaaggagctggaggcgaccaaacagtatctgatgctggatcccaacaagtggctcagtgaatttgacttggagcaggtttgggagctggattccctggagtacctggaggcactggagtgtgtgacggagcgcctggagagccgtgtcaacttctgcaaggcccatctcatgatgatcacctgcttcgacatcacctccaggcgccggtagatgagccagacccttgtcctagtggtcccccgctccccaggacttcagagatgttgcacgcccctaggccctctgtgctggggcatcaaagacaatgaatgaggatgaaggttggtggcaagtctggagcgggcgttgagcggaaggcgagttttcttttgttttctgtaggaaaggtgcaaacgtcaaacaccgtggaaggagaaaaggatgggaagcccgaggggtgtccaagccctgtgagactgaaaaagcactttgaggaaccttaaagaccttgtttgtacataagaactgctagcaaaagagacctcactcttctcttgctttcgtgagaaaggaggggcgtggatgtaggattgctgtggaaagcgaacacaaaacaacccagaatgactgattaagtgccttgcgaatctttattattatccaaacatttatgttcatactttcttgtgtacagatggtgctagtcaagatgaaaacaacaaaacaaacaagaaaaacattttggaaatgtattcacagctctttttctcttggtgttttatcctatttctgacttgctgtttctaagtaagttgtgtttgtagagctatttcttaatcagtattgcttatgaataaatattacctgtcttttatggttattctggtgaggccactcaaacagagagacttccctcggcacgagccagtgtgtgtgtttccaaagtaggtttggagcagcaggtgacctcgatgccacatcccaacaagcagcgtggtcaggtagacccagaaggttgattgtggggcaggtgctttagagaacaggtgaggagacggcacctgcagcacaggggaggaggagtcctttgcgacctgggccctccctgctcctgggaggtgggccgtatgttctgtagaccgtttgcccccctcaagtcctccacacatgtggttccttgacccacaaatccacagtttgcgtggccctcaaaattcatattcatttttattccaaaaagtcttgaacgaaagctggaaccaattcaccagagccatatttctttctttagtattttctagtgttgtgttgtagattgattaaagtgggtttttccccagctgagagaccttctcaggcttgttcagagacttcaactgtattggattagaagaaggattcttgagactgtacatcttgtctgttgtccagagtacaaggatttcagctctcctgtgtcccaaagcctctatgccaagaagggacaggcttgtcctctcagtctttgctcctgcccaaaggcagagagagcttcccctccataactcacacgaccctggataggcagaacatagctgaagactatggatgtccaggtcttggctcccaacaactcaggacctcaaattcagatgttcctccctataacaattcccttaggaattatgatacccattttagtgttgattgatagaaacctggggtacagagtggtcaagggatttccctgataaaagctgtggtgctgatgatagtgcagcccagaatctaagagtccctgcagccttcgcatcgaggatggtacttaggcgtgtgcagagcacgcttcccttttgccctcaaatgcagcatatcttcatgagcctatttatttccaagctaggctgtctttattaaccaacaactcagccccagccactccccaagcggggaaaaaaacactacgtttcttggtcagtgtacctctggac

SEQ ID NO: 427317 - DNA, 232 bp, Homo sapiens
attatgagattaggagcccttgatctaaaggcagggagttctggaaagaggagtatagaagcctcaaggcagaagcaagctggcatgtccaatgggatagaggagcagaaggaaagctcctgcggccagagccaaagattgaggggcagagtggttggagacagaggtagggccagatcatgtgacttctttgaaagcttctgaaacttgcaaagggacctccacttcccca

SEQ ID NO: 427318 - DNA, 1701 bp, Homo sapiens
acgggattaccgagggggtgcgggatgctgatgctgaactggccaagctgggagggaagaagaaagggaggggaggggagaatcgaggacggacggcctagccaggccaagaatgcaattgccccggtggtgggagctgggagacccctgtgcttggacgggacagggtcgggggacacgcaggatgagccccgcgaccactggcacattcttgctgacagtgtacagtattttctccaaggtacactccgatcggaatgtatacccatcagcaggtgtcctctttgttcatgttttggaaagagaatattttaagggggaatttccaccttacccaaaacctggcgagattagtaatgatcccataacatttaatacaaatttaatgggttacccagaccgacctggatggcttcgatatatccaaaggacaccatatagtgatggagtcctatatgggtccccaacagctgaaaatgtggggaagccaacaatcattgagataactgcctacaacaggcgcacctttgagactgcaaggcataatttgataattaatataatgtctgcagaagacttcccgttgccatatcaagcagaattcttcattaagaatatgaatgtagaagaaatgttggccagtgaggttcttggagactttcttggcgcagtgaaaaatgtgtggcagccagagcgcctgaacgccataaacatcacatcggccctagacaggggtggcagggtgccacttcccattaatgacctgaaggagggcgtttatgtcatggttggtgcagatgtcccgttttcttcttgtttacgagaagttgaaaatccacagaatcaattgagatgtagtcaagaaatggagcctgtaataacatgtgataaaaaatttcgtactcaattttacattgactggtgcaaaatttcattggttgataaaacaaagcaagtgtccacctatcaggaagtgattcgtggagaggggattttacctgatggtggagaatacaaacccccttctgattctttgaaaagcagagactattacacggatttcctaattacactggctgtgccctcggcagtggcactggtcctttttctaatacttgcttatatcatgtgctgccgacgggaaggcgtggaaaagagaaacatgcaaacaccagacatccaactggtccatcacagtgctattcagaaatctaccaaggagcttcgagacatgtccaagaatagagagatagcatggcccctgtcaacgcttcctgtgttccaccctgtgactggggaaatcatacctcctttacacacagacaactatgatagcacaaacatgccattgatgcaaacgcagcagaacttgccacatcagactcagattccccaacagcagactacaggtaaatggtatccctgaagaaagaaaactgactgaagcaatgaatttataatcagacaatatagcagttacatcacatttcttttctcttccaataatgcatgagcttttctggcatatgttatgcatgttggcagtattaagtgtataccaaataatacaacataactttcattttactaatgtatttttttgtacttaaagcatttttgacaatttgtaaaacattgatgactttatatttgttacaataaaagttgatctttaaaataaatattattaatgaagcctaa

SEQ ID NO: 427319 - DNA, 808 bp, Homo sapiens
agaatttatttcaatcaaggccttgattcttaatctccatttttttcatttttctatgtgtttctcatcagtattccatcgctgtatgtgtactcatccaagcaatgtcataaacctggtggcaaatgctgcctggttgcatttaatagtgacaatgtcagcatttccacatcatgcaagatcccatgagcatatagtcttaatgttccaaatatcaatgctattatttaattcataaattttgttttgtttctagggaaaagagaaacatgcaaacaccagacatccaactggtccatcacagtgctattcagaaatctaccaaggagcttcgagacatgtccaagaatagagagatagcatggcccctgtcaacgcttcctgtgttccaccctgtgactggggaaatcatacctcctttacacacagacaactatgatagcacaaacatgccattgatgcaaacgcagcagaacttgccacatcagactcagattccccaacagcagactacaggtaaatggtatccctgaagaaagaaaactgactgaagcaatgaatttataatcagacaatatagcagttacatcacatttcttttctcttccaataatgcatgagcttttctggcatatgttatgcatgttggcagtattaagtgtataccaaataatacaacataactttcattttactaatgtatttttttgtacttaaagcatttttgacaatttgtaaaacattgatgactttatatttgttacaataaaagttgatctttaaaataaatattattaatgaagcctaa

SEQ ID NO: 427320 - DNA, 394 bp, Homo sapiens
  misc_feature (63)..(63): n is a, c, g, or t
tttatacagtctttcgtccctatccgcccctcacttcgcgcacagaccccgcgctaggaactncgccacatcagactctgattccccaacagcagactacaggtaaatggtatccctgaagaaagaaaactgactgaagcaatgaatttataatcagacaatatagcagttacatcacatttcttttctcttccaataatgcatgagcttttctggcatatgttatgcatgttggcagtattaagtgtataccaaataatacaacataactttcattttactaatgtatttttttgtacttaaagcatttttgacaatttgtaaaacattgatgactttatatttgttacaataaaagttgatctttaaaataaatattattaatgaagcctaa

SEQ ID NO: 427321 - DNA, 757 bp, Homo sapiens
agaatttatttcaatcaaggccttgattcttaatctccatttttttcatttttctatgtgtttctcatcagtattccatcgctgtatgtgtactcatccaagcaatgtcataaacctggtggcaaatgctgcctggttgcatttaatagtgacaatgtcagcatttccacatcatgcaagatcccatgagcatatagtcttaatgttccaaatatcaatgctattatttaattcataaattttgttttgtttctagggaaaagagaaacatgcaaacaccagagtaagtgtcttctttcctgttattttcttcatcattttttcccacctctcagttgcccatcatgctccatacatgtgtgtcaagctttttttcatttgtcatctttcatagtttatttcataaatgtgaaagctgctttctaaatagagatatttaggaggggtagaaactaaaactaaaaagggtttgaaaactaagattacacagataaaaattaaacctaaaatatttcagattcagaatattaacttaccatttatattatgtgatttccaatctgcatttctataaaccagagaacagatgaaaagacctttcatacaagttttccagaatctacagtaataacctaccataaaatgaaacttctgtgagtatttataaatgccccaccagaagcaaaaatataaaagctatggtagttttatcttaaatcatagaaaataaatagaaaactagttggttacttaggac

SEQ ID NO: 427322 - DNA, 995 bp, Homo sapiens
tctcgactagagatcccctcggtctacttgtctagggtgcacgttcctcattacgacctgaaggagggcgtttatgtcatggttggtgcagatgtcccgttttcttcttgtttacgagaagttgaaaatccacagaatcaattgagatgtagtcaagaaatggagcctgtaataacatgtgataaaaaatttcgtactcaattttacattgactggtgcaaaatttcattggttgataaaacaaagcaagtgtccacctatcaggaagtgattcgtggagaggggattttacctgatggtggagaatacaaacccccttctgattctttgaaaagcagagactattacacggatttcctaattacactggctgtgccctcggcagtggcactggtcctttttctaatacttgcttatatcatgtgctgccgacgggaaggcgtggaaaagagaaacatgcaaacaccagacatccaactggtccatcacagtgctattcagaaatctaccaaggagcttcgagacatgtccaagaatagagagatagcatggcccctgtcaacgcttcctgtgttccaccctgtgactggggaaatcatacctcctttacacacagacaactatgatagcacaaacatgccattgatgcaaacgcagcagaacttgccacatcagactcagattccccaacagcagactacaggtaaatggtatccctgaagaaagaaaactgactgaagcaatgaatttataatcagacaatatagcagttacatcacatttcttttctcttccaataatgcatgagcttttctggcatatgttatgcatgttggcagtattaagtgtataccaaataatacaacataactttcattttactaatgtatttttttgtacttaaagcatttttgacaatttgtaaaacattgatgactttatatttgttacaataaaagttgatctttaaaataaatattattaatgaagcctaa

SEQ ID NO: 427323 - DNA, 1735 bp, Homo sapiens
acgggattaccgagggggtgcgggatgctgatgctgaactggccaagctgggagggaagaagaaagggaggggaggggagaatcgaggacggacggcctagccaggccaagaatgcaattgccccggtggtgggagctgggagacccctgtgcttggacgggacagggtcgggggacacgcaggatgagccccgcgaccactggcacattcttgctgacagtgtacagtattttctccaaggtacactccgatcggaatgtatacccatcagcaggtgtcctctttgttcatgttttggaaagagaatattttaagggggaatttccaccttacccaaaacctggcgagattagtaatgatcccataacatttaatacaaatttaatgggttacccagaccgacctggatggcttcgatatatccaaaggacaccatatagtgatggagtcctatatgggtccccaacagctgaaaatgtggggaagccaacaatcattgagataactgcctacaacaggcgcacctttgagactgcaaggcataatttgataattaatataatgtctgcagaagacttcccgttgccatatcaagcagaattcttcattaagaatatgaatgtagaagaaatgttggccagtgaggttcttggagactttcttggcgcagtgaaaaatgtgtggcagccagagcgcctgaacgccataaacatcacatcggccctagacaggggtggcagggtgccacttcccattaatgacctgaaggagggcgtttatgtcatggttggtgcagatgtcccgttttcttcttgtttacgagaagttgaaaatccacagaatcaattgagatgtagtcaagaaatggagcctgtaataacatgtgataaaaaatttcgtactcaattttacattgactggtgcaaaatttcattggttgataaaacaaagcaagtgtccacctatcaggaagtgattcgtggagaggggattttacctgatggtggagaatacaaacccccttctgattctttgaaaagcagagactattacacggatttcctaattacactggctgtgccctcggcagtggcactggtcctttttctaatacttgcttatatcatgtgctgccgacgggaaggcgtggaaaagagaaacatgcaaacaccagacatccaactggtccatcacagtgctattcagaaatctaccaaggagcttcgagacatgtccaagaatagagagatagcatggcccctgtcaacgcttcctgtgttccaccctgtgactggggaaatcatacctcctttacacacagacaactatgatagcacaaacatgccattgatgcaaacgcagcagaacttgccacatcagactcagattccccaacagcagactacaggtaaatggtatccctgaagaaagaaaactgactgaagcaatgaatttataatcagacaatatagcagttacatcacatttcttttctcttccaataatgcatgagcttttctggcatatgttatgcatgttggcagtattaagtgtataccaaataatacaacataactttcattttactaatgtatttttttgtacttaaagcatttttgacaatttgtaaaacattgatgactttatattgtaacaaatataaagtcatcaatgttttacaaattgttacaataaaagttgatctttaaaataaatattattaatgaagcctaa

SEQ ID NO: 427324 - DNA, 1776 bp, Homo sapiens
acgggattaccgagggggtgcgggatgctgatgctgaactggccaagctgggagggaagaagaaagggaggggaggggagaatcgaggacggacggcctagccaggccaagaatgcaattgccccggtggtgggagctgggagacccctgtgcttggacgggacagggtcgggggacacgcaggatgagccccgcgaccactggcacattcttgctgacagtgtacagtattttctccaaggtacactccgatcggaatgtatacccatcagcaggtgtcctctttgttcatgttttggaaagagaatattttaagggggaatttccaccttacccaaaacctggcgagattagtaatgatcccataacatttaatacaaatttaatgggttacccagaccgacctggatggcttcgatatatccaaaggacaccatatagtgatggagtcctatatgggtccccaacagctgaaaatgtggggaagccaacaatcattgagataactgcctacaacaggcgcacctttgagactgcaaggcataatttgataattaatataatgtctgcagaagacttcccgttgccatatcaagcagaattcttcattaagaatatgaatgtagaagaaatgttggccagtgaggttcttggagactttcttggcgcagtgaaaaatgtgtggcagccagagcgcctgaacgccataaacatcacatcggccctagacaggggtggcagggtgccacttcccattaatgacctgaaggagggcgtttatgtcatggttggtgcagatgtcccgttttcttcttgtttacgagaagttgaaaatccacagaatcaattgagatgtagtcaagaaatggagcctgtaataacatgtgataaaaaatttcgtactcaattttacattgactggtgcaaaatttcattggttgataaaacaaagcaagtgtccacctatcaggaagtgattcgtggagaggggattttacctgatggtggagaatacaaacccccttctgattctttgaaaagcagagactattacacggatttcctaattacactggctgtgccctcggcagtggcactggtcctttttctaatacttgcttatatcatgtgctgccgacgggaaggcgtggaaaagagaaacatgcaaacaccagacatccaactggtccatcacagtgctattcagaaatctaccaaggagcttcgagacatgtccaagaatagagagatagcatggcccctgtcaacgcttcctgtgttccaccctgtgactggggaaatcatacctcctttacacacagacaactatgatagcacaaacatgccattgatgcaaacgcagcaatggagtttcgctcctgttgcccaggctggagtgcaatggagcgatcttggctcactgcagcctccgcctcccaggaacttgccacatcagactcagattccccaacagcagactacaggtaaatggtatccctgaagaaagaaaactgactgaagcaatgaatttataatcagacaatatagcagttacatcacatttcttttctcttccaataatgcatgagcttttctggcatatgttatgcatgttggcagtattaagtgtataccaaataatacaacataactttcattttactaatgtatttttttgtacttaaagcatttttgacaatttgtaaaacattgatgactttatatttgttacaataaaagttgatctttaaaataaatattattaatgaagcctaa

SEQ ID NO: 427325 - DNA, 1736 bp, Homo sapiens
acgggattaccgagggggtgcgggatgctgatgctgaactggccaagctgggagggaagaagaaagggaggggaggggagaatcgaggacggacggcctagccaggccaagaatgcaattgccccggtggtgggagctgggagacccctgtgcttggacgggacagggtcgggggacacgcaggatgagccccgcgaccactggcacattcttgctgacagtgtacagtattttctccaaggtacactccgatcggaatgtatacccatcagcaggtgtcctctttgttcatgttttggaaagagaatattttaagggggaatttccaccttacccaaaacctggcgagattagtaatgatcccataacatttaatacaaatttaatgggttacccagaccgacctggatggcttcgatatatccaaaggacaccatatagtgatggagtcctatatgggtccccaacagctgaaaatgtggggaagccaacaatcattgagataactgcctacaacaggcgcacctttgagactgcaaggcataatttgataattaatataatgtctgcagaagacttcccgttgccatatcaagcagaattcttcattaagaatatgaatgtagaagaaatgttggccagtgaggttcttggagactttcttggcgcagtgaaaaatgtgtggcagccagagcgcctgaacgccataaacatcacatcggccctagacaggggtggcagggtgccacttcccattaatgacctgaaggagggcgtttatgtcatggttggtgcagatgtcccgttttcttcttgtttacgagaagttgaaaatccacagaatcaattgagatgtagtcaagaaatggagcctgtaataacatgtgataaaaaatttcgtactcaattttacattgactggtgcaaaatttcattggttgataaaacaaagcaagtgtccacctatcaggaagtgattcgtggagaggggattttacctgatggtggagaatacaaacccccttctgattctttgaaaagcagagactattacacggatttcctaattacactggctgtgccctcggcagtggcactggtcctttttctaatacttgcttatatcatgtgctgccgacgggaaggcgtggaaaagagaaacatgcaaacaccagacatccaactggtccatcacagtgctattcagaaatctaccaaggagcttcgagacatgtccaagaatagagagatagcatggcccctgtcaacgcttcctgtgttccaccctgtgactggggaaatcatacctcctttacacacagacaactatgatagcacaaacatgccattgatgcaaacgcagcagaacttgccacatcagactcagattccccaacagcagactacaggagattttcgtttgacaacttttcaaagatttgaggtaaatggtatccctgaagaaagaaaactgactgaagcaatgaatttataatcagacaatatagcagttacatcacatttcttttctcttccaataatgcatgagcttttctggcatatgttatgcatgttggcagtattaagtgtataccaaataatacaacataactttcattttactaatgtatttttttgtacttaaagcatttttgacaatttgtaaaacattgatgactttatatttgttacaataaaagttgatctttaaaataaatattattaatgaagcctaa

SEQ ID NO: 427326 - DNA, 1170 bp, Homo sapiens
acgggattaccgagggggtgcgggatgctgatgctgaactggccaagctgggagggaagaagaaagggaggggaggggagaatcgaggacggacggcctagccaggccaagaatgcaattgccccggtggtgggagctgggagacccctgtgcttggacgggacagggtcgggggacacgcaggatgagccccgcgaccactggcacattcttgctgacagtgtacagtattttctccaaggtacactccgatcggaatgtatacccatcagcaggtgtcctctttgttcatgttttggaaagagaatattttaagggggaatttccaccttacccaaaacctggcgagattagtaatgatcccataacatttaatacaaatttaatgggttacccagaccgacctggatggcttcgatatatccaaaggacaccatatagtgatggagtcctatatgggtccccaacagctgaaaatgtggggaagccaacaatcattgagataactgcctacaacaggcgcacctttgagactgcaaggcataatttgataattaatataatgtctgcagaagacttcccgttgccatatcaagcagaattcttcattaagaatatgaatgtagaagaaatgttggccagtgaggttcttggagactttcttggcgcagtgaaaaatgtgtggcagccagagcgcctgaacgccataaacatcacatcggccctagacaggggtggcagggtgccacttcccattaatgacctgaaggagggcgtttatgtcatggttggtgcagatgtcccgttttcttcttgtttacgagaagttgaaaatccacagaatcaattgagatgtagtcaagaaatggagcctgtaataacatgtgataaaaaatttcgtactcaattttacattgactggtgcaaaatttcattggttgataaaacaaagcaagtgtccacctatcaggaagtgattcgtggagaggggattttacctgatggtggagaatacaaacccccttctgattctttgaaaagcagagactattacacggatttcctaattacactggctgtgccctcggcagtggcactggtcctttttctaatacttgcttatatcatgtgctgccgacgggaaggcgtgtgagtactttaaaactaata

SEQ ID NO: 427327 - DNA, 699 bp, Homo sapiens
tattaaaagtatgtgagatgtatgcctttctgaaatagtttattgaatgcccaaagtgccataatgtcttattattttaaaagataaaaatacttcataagtttttcaaattgatgacccatcaggctaatatatgattttaaatatatgttgttttatttctttttgacctagcatccaactggtccatcacagtgctattcagaaatctaccaaggagcttcgagacatgtccaagaatagagagatagcatggcccctgtcaacgcttcctgtgttccaccctgtgactggggaaatcatacctcctttacacacagacaactatgatagcacaaacatgccattgatgcaaacgcagcagaacttgccacatcagactcagattccccaacagcagactacaggtaaatggtatccctgaagaaagaaaactgactgaagcaatgaatttataatcagacaatatagcagttacatcacatttcttttctcttccaataatgcatgagcttttctggcatatgttatgcatgttggcagtattaagtgtataccaaataatacaacataactttcattttactaatgtatttttttgtacttaaagcatttttgacaatttgtaaaacattgatgactttatatttgttacaataaaagttgatctttaaaataaatattattaatgaagcctaa

SEQ ID NO: 427328 - DNA, 838 bp, Homo sapiens
tcatttagttccttgttttcttttaaattcctatcaaagctttaagaaatgaactagctgctggtgttgtgttcctggacttgagcactagctgggataatagagcagttaaaagctgacaattgcactaacttttggactaggcccaaaccattaggtttgatgccccttcaggttttctcattttctctgccctaccagcccacatgatatttttttaaaagccacgattaaaaggtacagttatacatcctgcagttaacctccattctttttgtttattgtgggaggaattttcagactgtacctcttgggaaatacaaaatattatagctttggtccaagaaggagaagactaatttagaattttttcttttgttttctgttttttaaaaaaaccaaatacagagaaataatgcaatgtaattattttacattgtattaagaagatggaaactttctccttgccataatttgctttgctcaaaatctaaaagtatccatgccctgactaactcctgcccatattcattcttacacattgcagtaaatggtatccctgaagaaagaaaactgactgaagcaatgaatttataatcagacaatatagcagttacatcacatttcttttctcttccaataatgcatgagcttttctggcatatgttatgcatgttggcagtattaagtgtataccaaataatacaacataactttcattttactaatgtatttttttgtacttaaagcatttttgacaatttgtaaaacattgatgactttatatttgttacaataaaagttgatctttaaaataaatattattaatgaagcctaa

SEQ ID NO: 427329 - DNA, 391 bp, Homo sapiens
  misc_feature (60)..(60): n is a, c, g, or t
gtgtctgtcctccagtctacggctgaggacaaagatgattaagcggggtttgaggaactncgccacatcagactctgattccccaacagcagactacaggtaaatggtatccctgaagaaagaaaactgactgaagcaatgaatttataatcagacaatatagcagttacatcacatttcttttctcttccaataatgcatgagcttttctggcatatgttatgcatgttggcagtattaagtgtataccaaataatacaacataactttcattttactaatgtatttttttgtacttaaagcatttttgacaatttgtaaaacattgatgactttatatttgttacaataaaagttgatctttaaaataaatattattaatgaagcctaa

SEQ ID NO: 427330 - DNA, 754 bp, Homo sapiens
agaatttatttcaatcaaggccttgattcttaatctccatttttttcatttttctatgtgtttctcatcagtattccatcgctgtatgtgtactcatccaagcaatgtcataaacctggtggcaaatgctgcctggttgcatttaatagtgacaatgtcagcatttccacatcatgcaagatcccatgagcatatagtcttaatgttccaaatatcaatgctattatttaattcataaattttgttttgtttctagggaaaagagaaacatgcaaacaccagacatccaactggtccatcacagtgctattcagaaatctaccaaggagcttcgagacatgtccaagaatagagagatagcatggcccctgtcaacgcttcctgtgttccaccctgtgactggggaaatcatacctcctttacacacagacaactatgatagcacaaacatgccattgatgcaaacgcagcagaacttgccacatcagactcagattccccaacagcagactacaggtgagtgctaagaataataaatttttcttttctcttccaataatgcatgagcttttctggcatatgttatgcatgttggcagtattaagtgtataccaaataatacaacataactttcattttactaatgtatttttttgtacttaaagcatttttgacaatttgtaaaacattgatgactttatatttgttacaataaaagttgatctttaaaataaatattattaatgaagcctaa

SEQ ID NO: 427331 - DNA, 1871 bp, Homo sapiens
acgggattaccgagggggtgcgggatgctgatgctgaactggccaagctgggagggaagaagaaagggaggggaggggagaatcgaggacggacggcctagccaggccaagaatgcaattgccccggtggtgggagctgggagacccctgtgcttggacgggacagggtcgggggacacgcaggatgagccccgcgaccactggcacattcttgctgacagtggaatatgaaagagacaaatgaagtagtggacagagaaagacttgacagtttgcttttaagcttttttattaagctgtgctgatggcataaatggaacagttaactggaagaccagacaggccaacaattttattatcagcagaaaaatggctgctgggatgaaagatgtgtacagtattttctccaaggtacactccgatcggaatgtatacccatcagcaggtgtcctctttgttcatgttttggaaagagaatattttaagggggaatttccaccttacccaaaacctggcgagattagtaatgatcccataacatttaatacaaatttaatgggttacccagaccgacctggatggcttcgatatatccaaaggacaccatatagtgatggagtcctatatgggtccccaacagctgaaaatgtggggaagccaacaatcattgagataactgcctacaacaggcgcacctttgagactgcaaggcataatttgataattaatataatgtctgcagaagacttcccgttgccatatcaagcagaattcttcattaagaatatgaatgtagaagaaatgttggccagtgaggttcttggagactttcttggcgcagtgaaaaatgtgtggcagccagagcgcctgaacgccataaacatcacatcggccctagacaggggtggcagggtgccacttcccattaatgacctgaaggagggcgtttatgtcatggttggtgcagatgtcccgttttcttcttgtttacgagaagttgaaaatccacagaatcaattgagatgtagtcaagaaatggagcctgtaataacatgtgataaaaaatttcgtactcaattttacattgactggtgcaaaatttcattggttgataaaacaaagcaagtgtccacctatcaggaagtgattcgtggagaggggattttacctgatggtggagaatacaaacccccttctgattctttgaaaagcagagactattacacggatttcctaattacactggctgtgccctcggcagtggcactggtcctttttctaatacttgcttatatcatgtgctgccgacgggaaggcgtggaaaagagaaacatgcaaacaccagacatccaactggtccatcacagtgctattcagaaatctaccaaggagcttcgagacatgtccaagaatagagagatagcatggcccctgtcaacgcttcctgtgttccaccctgtgactggggaaatcatacctcctttacacacagacaactatgatagcacaaacatgccattgatgcaaacgcagcagaacttgccacatcagactcagattccccaacagcagactacaggtaaatggtatccctgaagaaagaaaactgactgaagcaatgaatttataatcagacaatatagcagttacatcacatttcttttctcttccaataatgcatgagcttttctggcatatgttatgcatgttggcagtattaagtgtataccaaataatacaacataactttcattttactaatgtatttttttgtacttaaagcatttttgacaatttgtaaaacattgatgactttatatttgttacaataaaagttgatctttaaaataaatattattaatgaagcctaa

SEQ ID NO: 427332 - DNA, 1756 bp, Homo sapiens
acgggattaccgagggggtgcgggatgctgatgctgaactggccaagctgggagggaagaagaaagggaggggaggggagaatcgaggacggacggcctagccaggccaagaatgcaattgccccggtggtgggagctgggagacccctgtgcttggacgggacagggtcgggggacacgcaggatgagccccgcgaccactggcacattcttgctgacagtgtacagtattttctccaaggtacactccgatcggaatgtatacccatcagcaggtgtcctctttgttcatgttttggaaagagaatattttaagggggaatttccaccttacccaaaacctggcgagattagtaatgatcccataacatttaatacaaatttaatgggttacccagaccgacctggatggcttcgatatatccaaaggacaccatatagtgatggagtcctatatgggtccccaacagctgaaaatgtggggaagccaacaatcattgagataactgcctacaacaggcgcacctttgagactgcaaggcataatttgataattaatataatgtctgcagaagacttcccgttgccatatcaagcagaattcttcattaagaatatgaatgtagaagaaatgttggccagtgaggttcttggagactttcttggcgcagtgaaaaatgtgtggcagccagagcgcctgaacgccataaacatcacatcggccctagacaggggtggcagggtgccacttcccattaatgacctgaaggagggcgtttatgtcatggttggtgcagatgtcccgttttcttcttgtttacgagaagttgaaaatccacagaatcaattgagatgtagtcaagaaatggagcctgtaataacatgtgataaaaaatttcgtactcaattttacattgactggtgcaaaatttcattggttgataaaacaaagcaagtgtccacctatcaggaagtgattcgtggagaggggattttacctgatggtggagaatacaaacccccttctgattctttgaaaagcagagactattacacggatttcctaattacactggctgtgccctcggcagtggcactggtcctttttctaatacttgcttatatcatgtgctgccgacgggaaggcgtggaaaagagaaacatgcaaacaccagacatccaactggtccatcacagtgctattcagaaatctaccaaggagcttcgagacatgtccaagaatagagagatagcatggcccctgtcaacgcttcctgtgttccaccctgtgactggggaaatcatacctcctttacacacagacaactatgatagcacaaacatgccattgatgcaaacgcagcagaacttgccacatcagactcagattccccaacagcagactacaggtaaatggtatccctgaagaaagaaaactgactgaagcaatgaatttataatcagacaatatagcagttacatcacatttcttttctcttccaataatgcatgagcttttctggcatatgttatgcatgttggcagtattaagtgtataccaaataatacaacataactttcattttactaatgtatttttttgtacttaaagcatttttgacaatttgtaaaacattgatgactttatatttgttacaataaaagttgatctttaaaataaatattattaatgaagcctaaaaacaacaccaacacgaaaacaaaaaagaagggggggggcgcccgaaaaaccccc

SEQ ID NO: 427333 - DNA, 1674 bp, Homo sapiens
acgggattaccgagggggtgcgggatgctgatgctgaactggccaagctgggagggaagaagaaagggaggggaggggagaatcgaggacggacggcctagccaggccaagaatgcaattgccccggtggtgggagctgggagacccctgtgcttggacgggacagggtcgggggacacgcaggatgagccccgcgaccactggcacattcttgctgacagtgtacagtattttctccaaggtacactccgatcggaatgtatacccatcagcaggtgtcctctttgttcatgttttggaaagagaatattttaagggggaatttccaccttacccaaaacctggcgagattagtaatgatcccataacatttaatacaaatttaatgggttacccagaccgacctggatggcttcgatatatccaaaggacaccatatagtgatggagtcctatatgggtccccaacagctgaaaatgtggggaagccaacaatcattgagataactgcctacaacaggcgcacctttgagactgcaaggcataatttgataattaatataatgtctgcagaagacttcccgttgccatatcaagcagaattcttcattaagaatatgaatgtagaagaaatgttggccagtgaggttcttggagactttcttggcgcagtgaaaaatgtgtggcagccagagcgcctgaacgccataaacatcacatcggccctagacaggggtggcagggtgccacttcccattaatgacctgaaggagggcgtttatgtcatggttggtgcagatgtcccgttttcttcttgtttacgagaagttgaaaatccacagaatcaattgagatgtagtcaagaaatggagcctgtaataacatgtgataaaaaatttcgtactcaattttacattgactggtgcaaaatttcattggttgataaaacaaagcaagtgtccacctatcaggaagtgattcgtggagaggggattttacctgatggtggagaatacaaacccccttctgattctttgaaaagcagagactattacacggatttcctaattacactggctgtgccctcggcagtggcactggtcctttttctaatacttgcttatatcatgtgctgccgacgggaaggcgtcatccaactggtccatcacagtgctattcagaaatctaccaaggagcttcgagacatgtccaagaatagagagatagcatggcccctgtcaacgcttcctgtgttccaccctgtgactggggaaatcatacctcctttacacacagacaactatgatagcacaaacatgccattgatgcaaacgcagcagaacttgccacatcagactcagattccccaacagcagactacaggtaaatggtatccctgaagaaagaaaactgactgaagcaatgaatttataatcagacaatatagcagttacatcacatttcttttctcttccaataatgcatgagcttttctggcatatgttatgcatgttggcagtattaagtgtataccaaataatacaacataactttcattttactaatgtatttttttgtacttaaagcatttttgacaatttgtaaaacattgatgactttatatttgttacaataaaagttgatctttaaaataaatattattaatgaagcctaa

SEQ ID NO: 427334 - DNA, 1468 bp, Homo sapiens
acgggattaccgagggggtgcgggatgctgatgctgaactggccaagctgggagggaagaagaaagggaggggaggggagaatcgaggacggacggcctagccaggccaagaatgcaattgccccggtggtgggagctgggagacccctgtgcttggacgggacagggtcgggggacacgcaggatgagccccgcgaccactggcacattcttgctgacagtgtacagtattttctccaaggtacactccgatcggaatgtatacccatcagcaggtgtcctctttgttcatgttttggaaagagaatattttaagggggaatttccaccttacccaaaacctggcgagattagtaatgatcccataacatttaatacaaatttaatgggttacccagaccgacctggatggcttcgatatatccaaaggacaccatatagtgatggagtcctatatgggtccccaacagctgaaaatgtggggaagccaacaatcattgagataactgcctacaacaggcgcacctttgagactgcaaggcataatttgataattaatataatgtctgcagaagacttcccgttgccatatcaagcagaattcttcattaagaatatgaatgtagaagaaatgttggccagtgaggttcttggagactttcttggcgcagtgaaaaatgtgtggcagccagagcgcctgaacgccataaacatcacatcggccctagacaggggtggcagggtgccacttcccattaatgacctgaaggagggcgtttatgtcatggttggtgcagatgtcccgttttcttcttgtttacgagaagttgaaaatccacagaatcaattgagatgtagtcaagaaatggagcctgtaataacatgtgataaaaaatttcgtactcaattttacattgactggtgcaaaatttcattggttgataaaacaaagcaagtgtccacctatcaggaagtgattcgtggagaggggattttacctgatggtggagaatacaaacccccttctgattctttgaaaagcagagactattacacggatttcctaattacactggctgtgccctcggcagtggcactggtcctttttctaatacttgcttatatcatgtgctgccgacgggaaggcgtggaaaagagaaacatgcaaacaccagagtaaatggtatccctgaagaaagaaaactgactgaagcaatgaatttataatcagacaatatagcagttacatcacatttcttttctcttccaataatgcatgagcttttctggcatatgttatgcatgttggcagtattaagtgtataccaaataatacaacataactttcattttactaatgtatttttttgtacttaaagcatttttgacaatttgtaaaacattgatgactttatatttgttacaataaaagttgatctttaaaataaatattattaatgaagcctaa

SEQ ID NO: 427335 - DNA, 1159 bp, Homo sapiens
  misc_feature (1103)..(1103): n is a, c, g, or t
  misc_feature (1134)..(1134): n is a, c, g, or t
  misc_feature (1147)..(1147): n is a, c, g, or t
acgggattaccgagggggtgcgggatgctgatgctgaactggccaagctgggagggaagaagaaagggaggggaggggagaatcgaggacggacggcctagccaggccaagaatgcaattgccccggtggtgggagctgggagacccctgtgcttggacgggacagggtcgggggacacgcaggatgagccccgcgaccactggcacattcttgctgacagtgtacagtattttctccaaggtacactccgatcggaatgtatacccatcagcaggtgtcctctttgttcatgttttggaaagagaatattttaagggggaatttccaccttacccaaaacctggcgagattagtaatgatcccataacatttaatacaaatttaatgggttacccagaccgacctggatggcttcgatatatccaaaggacaccatatagtgatggagtcctatatgggtccccaacagctgaaaatgtggggaagccaacaatcattgagataactgcctacaacaggcgcacctttgagactgcaaggcataatttgataattaatataatgtctgcagaagacttcccgttgccatatcaagcagaattcttcattaagaatatgaatgtagaagaaatgttggccagtgaggttcttggagactttcttggcgcagtgaaaaatgtgtggcagccagagcgcctgaacgccataaacatcacatcggccctagacaggggtggcagggtgccacttcccattaatgacctgaaggagggcgtttatgtcatggttggtgcagatgtcccgttttcttcttgtttacgagaagttgaaaatccacagaatcaattgagatgtagtcaagaaatggagcctgtaataacatgtgataaaaaatttcgtactcaattttacattgactggtgcaaaatttcattggttgataaaacaaagcaagtgtccacctatcaggaagtgattcgtggagaggggattttacctgatggtggagaatacaaacccccttctgattctttgaaaagcagagactattacacggatttcctaattacactggctgtgccctcgggggggggggggggcngggggggaaaacgggcgggggcgggggcggnggggcgggggggngggggggggggg

SEQ ID NO: 427336 - DNA, 563 bp, Homo sapiens
taacttatctgggtgcccatctggtttaaattgctcattttacattaatttaacaataatagctgttggtggtcatgttttccccaggagaagaagttgacagacagctgtgcagagatgccatcttccccatccctgtggcctgtgatgccccatgcccgaaagactgtgtgctcagcacatggtctacgtggtcctcctgctcacacacctgctcagggaaaacgacagaagggaaacagatacgagcacgatccattctggcctatgcgggtgaagaaggtgagtcgccagcttcagacgccatctaggttcgtttcaaaagttagtgtgcatcttttttgtgtagcctggaaaagatgatattctatgaaagtcaacaaccagaaattcagccatccaagatttaatatctgttgatgtgttgagcaatttgattctgtcccccaaaattaatcttgaaaatggatctctaacaaaggagaaagactttttaaaagtgaactcattttgtttttcctaccaccttaatatatatttaactctttgctccaaaaaaaaaa

SEQ ID NO: 427337 - DNA, 2245 bp, Homo sapiens
gtccggaaattcccgggtcgactacaacaactaaattcgcgaccgtgtcgacattcatcaataactaatccaatatgtggacagtaatcttaatttcaaagccttttttgaggatactacggtgtagcttaagtgaatttaaaaagagtgcataaaagcttgtttttaattacttataacaaagcacaaattacttctaacaaggcaaatatttattgacatataagacattctgctaggcattgtaaaaaaaaaaaaaaaaaagtaatggcttttgtatacataggtacttaagacagacatccaaaagaaggaaaaaatgcttaatgagtgaagatagcactgaaacatgttgacttttactctaggtttgtttttagatggggttagtattttcccctacgtaatgtacatgtctttaggccacagtattaggagtttgatttttccctgccccaccctcaggtaggtggcagtggtcattgtagcttaatcagacccctgttaagttcctgggcatttcaaggtaaattcacgtcttccttctcacagaaattgaatagacctctcacacacttatttacctcccccaacaacctgtatccttggccctttctgattttctctgcttggtctctttctactcttgacagctattcttacctacttcccactaaacatgcccaattttttaattaaaaaaaaaagaattcctatatttccttccctattagaatcaaagtgtcactcactcagagtgtgaacatcctgatttacaccaaatccactggtcaaagaaatgaataaagggaaaaggaaaaatgtggaaggcatgcagggaaaaaaaaaaaaaaaaaagcccttttctgtaaaaatgtccatgcctacacttgctttagaccatcccatatcctcctgcctccatctcgagtctttgttcacattccacaccacaagacagtgagggaggactgtacttttcagtaccatacagaagggagagcctgttctaaagctgacgtgggtctcaatagtacatgagaagcacaattcccaaatgatctgggatctcctgtttataaatatattaccaaattcaagtgtgggttcttcttctatttccactgtaagattgagggtgttgaaaaaacagtagtccttgagcaaatctgtgaggaatcttgtcagaatgtgatctttcctgggactagtttagttgtgagaactacatctgcttgttctgggaataagggtctccccaggtcctgccctcaggtggccctggctgcaggacaggatttcaggtatcagaaactggtgtgtgagccaagcaaatagttatccatttataaaaaggatggtttgcagtgtgttataataattttatatctagcagggacaatgaaaaatggttatgtctacattattaaatgaatgaaactaatgctaaacagttaattttgcatttttatttttctgtgtttctaccaagtcagatcttaaaaatgggcagtatatgaagagctttagtttgtgggagtcatgttttcagtgatcaaaaatctctatattatttagaatataattgtcagtcttgttgtgttttgtagatttattgtttttaagccatagtttctagattacctacttttaaccctcaagtaaacttttccctatttttcagaaatctgtttgtgtttatttttagaaagtaaacatttagattccttttctggtactttttttctccatttctatcacacagatttgaagagatcagtatctatcattgtaaaatataactttattaaaatttgcaatctgtctttctataaattattattccctaaatgtgtattttatgttaatttaactacctgaatatttattttgtttaaataaggaggcagctgtctaagaatttttgttaatattactttgtaaattgcgtaatgtaatttattttacattatgtacatttcctttttaacgcacaaaatgtctatgtacaattaactacagatttgcaaataatgtcactaagctttattcagtcaatacagatggcatgtgaagatgtaatatgcttttttacattttcatatgggttatttgtaaataactatattgctgacaaacataaatacggaaatcattttcattctaatcatgtgtatctgtgttttgatttgcaccaattgcttcttaaatatggattaaaatttttttccagtgaatacctaaa

SEQ ID NO: 427338 - DNA, 9317 bp, Homo sapiens
  misc_feature (6468)..(6468): n is a, c, g, or t
gagtggagcccctgctcaaaaacatgccatgacatggtgtcccctgcaggcactcgtgtaaggacacgaaccatcaggcagtttcccattggcagtgaaaaggagtgtccagaatttgaagaaaaagaaccctgtttgtctcaaggagatggagttgtcccctgtgccacgtatggctggagaactacagagtggactgagtgccgtgtggaccctttgctcagtcagcaggacaagaggcgcggcaaccagacggccctctgtggagggggcatccagacccgagaggtgtactgcgtgcaggccaacgaaaacctcctctcacaattaagtacccacaagaacaaagaagcctcaaagccaatggacttaaaattatgcactggacctatccctaatactacacagctgtgccacattccttgtccaactgaatgtgaagtttcaccttggtcagcttggggaccttgtacttatgaaaactgtaatgatcagcaagggaaaaaaggcttcaaactgaggaagcggcgcattaccaatgagcccactggaggctctggggtaaccggaaactgccctcacttactggaagccattccctgtgaagagcctgcctgttatgactggaaagcggtgagactgggagactgcgagccagataacggaaaggagtgtggtccaggcacgcaagttcaagaggttgtgtgcatcaacagtgatggagaagaagttgacagacagctgtgcagagatgccatcttccccatccctgtggcctgtgatgccccatgcccgaaagactgtgtgctcagcacatggtctacgtggtcctcctgctcacacacctgctcagggaaaacgacagaagggaaacagatacgagcacgatccattctggcctatgcgggtgaagaaggtggaattcgctgtccaaatagcagtgctttgcaagaagtacgaagctgtaatgagcatccttgcacagtgtaccactggcaaactggtccctggggccagtgcattgaggacacctcagtatcgtccttcaacacaactacgacttggaatggggaggcctcctgctctgtcggcatgcagacaagaaaagtcatctgtgtgcgagtcaatgtgggccaagtgggacccaaaaaatgtcctgaaagccttcgacctgaaactgtaaggccttgtctgcttccttgtaagaaggactgtattgtgaccccatatagtgactggacatcatgcccctcttcgtgtaaagaaggggactccagtatcaggaagcagtctaggcatcgggtcatcattcagctgccagccaacgggggccgagactgcacagatcccctctatgaagagaaggcctgtgaggcacctcaagcgtgccaaagctacaggtggaagactcacaaatggcgcagatgccaattagtcccttggagcgtgcaacaagacagccctggagcacaggaaggctgtgggcctgggcgacaggcaagagccattacttgtcgcaagcaagatggaggacaggctggaatccatgagtgcctacagtatgcaggccctgtgccagcccttacccaggcctgccagatcccctgccaggatgactgtcaattgaccagctggtccaagttttcttcatgcaatggagactgtggtgcagttaggaccagaaagcgcactcttgttggaaaaagtaaaaagaaggaaaaatgtaaaaattcccatttgtatcccctgattgagactcagtattgtccttgtgacaaatataatgcacaacctgtggggaactggtcagactgtattttaccagagggaaaagtggaagtgttgctgggaatgaaagtacaaggagacatcaaggaatgcggacaaggatatcgttaccaagcaatggcatgctacgatcaaaatggcaggcttgtggaaacatctagatgtaacagccatggttacattgaggaggcctgcatcatcccctgcccctcagactgcaagctcagtgagtggtccaactggtcgcgctgcagcaagtcctgtgggagtggtgtgaaggttcgttctaaatggctgcgtgaaaaaccatataatggaggaaggccttgccccaaactggaccatgtcaaccaggcacaggtgtatgaggttgtcccatgccacagtgactgcaaccagtacctatgggtcacagagccctggagcatctgcaaggtgacctttgtgaatatgcgggagaactgtggagagggcgtgcaaacccgaaaagtgagatgcatgcagaatacagcagatggcccttctgaacatgtagaggattacctctgtgacccagaagagatgcccctgggctctagagtgtgcaaattaccatgccctgaggactgtgtgatatctgaatggggtccatggacccaatgtgttttgccttgcaatcaaagcagtttccggcaaaggtcagctgatcccatcagacaaccagctgatgaaggaagatcttgccctaatgctgttgagaaagaaccctgtaacctgaacaaaaactgctaccactatgattataatgtaacagactggagtacatgtcagctgagtgagaaggcagtttgtggaaatggaataaaaacaaggatgttggattgtgttcgaagtgatggcaagtcagttgacctgaaatattgtgaagcgcttggcttggagaagaactggcagatgaacacgtcctgcatggtggaatgccctgtgaactgtcagctttctgattggtctccttggtcagaatgttctcaaacatgtggcctcacaggaaaaatgatccgaagacgaacagtgacccagccctttcaaggtgatggaagaccatgcccttccctgatggaccagtccaaaccctgcccagtgaagccttgttatcggtggcaatatggccagtggtctccatgccaagtgcaggaggcccagtgtggagaagggaccagaacaaggaacatttcttgtgtagtaagtgatgggtcagctgatgatttcagcaaagtggtggatgaggaattctgtgctgacattgaactcattatagatggtaataaaaatatggttctggaggaatcctgcagccagccttgcccaggtgactgttatttgaaggactggtcttcctggagcctgtgtcagctgacctgtgtgaatggtgaggatctaggctttggtggaatacaggtcagatccagaccggtgattatacaagaactagagaatcagcatctgtgcccagagcagatgttagaaacaaaatcatgttatgatggacagtgctatgaatataaatggatggccagtgcttggaagggctcttcccgaacagtgtggtgtcaaaggtcagatggtataaatgtaacagggggctgcttggtgatgagccagcctgatgccgacaggtcttgtaacccaccgtgtagtcaaccccactcgtactgtagcgagacaaaaacatgccattgtgaagaagggtacactgaagtcatgtcttctaacagcacccttgagcaatgcacacttatccccgtggtggtattacccaccatggaggacaaaagaggagatgtgaaaaccagtcgggctgtacatccaacccaaccctccagtaacccagcaggacggggaaggacctggtttctacagccatttgggccagatgggagactaaagacctgggtttacggtgtagcagctggggcatttgtgttactcatctttattgtctccatgatttatctagcttgcaaaaagccaaagaaaccccaaagaaggcaaaacaaccgactgaaacctttaaccttagcctatgatggagatgccgacatgtaacatataacttttcctggcaacaaccagtttcggctttctgacttcatagatgtccagaggccacaacaaatgtatccaaactgtgtggattaaaatatattttaatttttaaaaatggcatcataaagacaagagtgaaaatcatactgccactggagatatttaagacagtaccacttatatacagaccatcaaccgtgagaattataggagatttagctgaatacatgctgcattctgaaagttttatgtcatcttttctgaaatctaccgactgaaaaaccactttcatctctaaaaaataatggtggaattggccagttaggatgcctgatacaagaccgtctgcagtgttaatccataaaacttcctagcatgaagagtttctaccaagatctccacaatactatggtcaaattaacatgtgtactcagttgaatgacacacattatgtcagattatgtacttgctaataagcaattttaacaatgcataacaaataaactctaagctaagcagaaaatccactgaataaattcagcatcttggtggtcgatggtagattttattgacctgcatttcagagacaaagcctcttttttaagacttcttgtctctctccaaagtaagaatgctggacaagtactagtgtcttagaagaacgagtcctcaagttcagtattttatagtggtaattgtctggaaaactaatttacttgtgttaatacaatacgtttctactttccctgattttcaaactggttgcctgcatcttttttgctatatggaaggcacatttttgcactatattagtgcagcacgataggcgcttaaccagtattgccatagaaactgcctcttttcatgtgggatgaagacatctgtgccaagagtggcatgaagacatttgcaagttcttgtatcctgaagagagtaaagttcagtttggatggcagcaagatgaaatcagctattacacctgctgtacacacacttcctcatcactgcagccattgtgaaattgacaacatggcggtaatttaagtgttgaagtccctaaccccttaaccctctaaaaggtggattcctctagttggtttgtaattgttctttgaaggctgtttatgactagatttttatatttgttatctttgttaagaaaaaaaaagaaaaaaaaaggaactggatgtctttttaattttgagcagatggagaaaataaataatgtatcaatgacctttgtaactaaaggaaatcaaaattatatgttgatttttctttctctctgatttcccagtttcagattgaatgtctgtcttgcaggcagttatttcaaaatccatagtcttttgcctttctcactggcaaaatttgaagcaatctctctcttcaatgtatgatttcaaaactaaaattttaaaagagaagaataaatatcttatccaagacttcattgcatatctagagcaagagtggcaaactttttctgtaaaggactatatagaaaatattttccacaaggtctatgttgcaacttctcaactttgccattctgctaatgcaatcttagtaaataaaagaatgaacataactgttttcctatataacttcccttacaaaaacagccagtaggccacctttgcaggtcatattttgctgacccctggtctggatgttttttaatgctagctctccatggtgtcatctttcgttttcattcatttttcaaaggtgagaatttacagtcattacatttcccactgtatcagaagtagctgtattttctacagatgtagccctgggaatggcacagtggaacaatatttaactaactcagcagacttcttgcaaatgaaaagaaaactcaaaaggtgccattaaaaagcaataccattttcaggcaacattattgcaacaacctttgtgagagaggacactagcttttcaggatatttgaaaaataatataactaacatgctattttatcttaaacagctgtgttcctgtaaaagtgttttggattagaaggtatttttaccttcatactggagtatgaactccccctgctgttcattagagtatttgcaaagattacaaaagacatcaggttaggatgtcattgtccccaaaatgaaaatatttgtatgtatttcaataagaactaaatgcagtaagcgctaattcctcattcaatattcactatattaggaaatgtaaatcatttcaaagagaacaggtagtcaggaagatgaaaattttactttaaagcaaggatttaaacaaagaaaaccataaaaacaaagtccattttatctgttttattaaagaggaagaaaaaataatattgttactttaaaactgtgattgtcaatatatataatcaggggtcttccagataatcctaaagttgatctctttgaataaaataaactccatttgtccaaaatagttaagaaagactctattgtggttacttgaaaaattcagctaaccctcttatgaaatgtgtgcaacacctattaattttgaaatgtgggatagaatacctactaaagctatatttaaggtattgtaaaatgtcattaattcagaaangattagtatcatcctacctataagaattaaattagcaaatcaaaattatagaatgttatgaaaaatacattttattcataaattaattagattttacagcatatatgcatgcatatatatatatacacacacacacacacacacccatatatatgagagagaggaaattaggttcaacatgacctaatattagagaacatattggaaggtcactgtttgttaggataaataaatactggataacctcgttagaaaggtggaaagaggagaacgtagcaatctggctattttggacaaagggaaggttattatattcatgtttataacatgaaaatggccttatttttgtttctgacatgagacaataatgagttaaatattttattggaatttcatcaaaaccttatttttactgttccttctaaaaatttgggaggggaatatagtagtaacttctctattgacacttttacctcaccgagggggtaaaagatgtagaactgctgttccctagaatgaaggtctgttgtttggtttttaaaaaaagaagagcagaaaaagtttgacacagtattatatgattttgctggactatttcactagaaaccacgtagaataggactaactgatctcttttgaaaggggctgatttgcttattcatcaataactaatccaatatgtggacagtaatcttaatttcaaagccttttttgaggatactacggtgtagcttaagtgaatttaaaaagagtgcataaaagcttgtttttaattacttataacaaagcacaaattacttctaacaaggcaaatatttattgacatataagacattctgctaggcattgtaaaaaaaaaaaaaaaaaagtaatggcttttgtatacataggtacttaagacagacatccaaaagaaggaaaaaatgcttaatgagtgaagatagcactgaaacatgttgacttttactctaggtttgtttttagatggggttagtattttcccctacgtaatgtacatgtctttaggccacagtattaggagtttgatttttccctgccccaccctcaggtaggtggcagtggtcattgtagcttaatcagacccctgttaagttcctgggcatttcaaggtaaattcacgtcttccttctcacagaaattgaatagacctctcacacacttatttacctcccccaacaacctgtatccttggccctttctgattttctctgcttggtctctttctactcttgacagctattcttacctacttcccactaaacatgcccaattttttaattaaaaaaaaaagaattcctatatttccttccctattagaatcaaagtgtcactcactcagagtgtgaacatcctgatttacaccaaatccactggtcaaagaaatgaataaagggaaaaggaaaaatgtggaaggcatgcagggaaaaaaaaaaaaaaaaaagcccttttctgtaaaaatgtccatgcctacacttgctttagaccatcccatatcctcctgcctccatctcgagtctttgttcacattccacaccacaagacagtgagggaggactgtacttttcagtaccatacagaagggagagcctgttctaaagctgacgtgggtctcaatagtacatgagaagcacaattcccaaatgatctgggatctcctgtttataaatatattaccaaattcaagtgtgggttcttcttctatttccactgtaagattgagggtgttgaaaaaacagtagtccttgagcaaatctgtgaggaatcttgtcagaatgtgatctttcctgggactagtttagttgtgagaactacatctgcttgttctgggaataagggtctccccaggtcctgccctcaggtggccctggctgcaggacaggatttcaggtatcagaaactggtgtgtgagccaagcaaatagttatccatttataaaaaggatggtttgcagtgtgttataataattttatatctagcagggacaatgaaaaatggttatgtctacattattaaatgaatgaaactaatgctaaacagttaattttgcatttttatttttctgtgtttctaccaagtcagatcttaaaaatgggcagtatatgaagagctttagtttgtgggagtcatgttttcagtgatcaaaaatctctatattatttagaatataattgtcagtcttgttgtgttttgtagatttattgtttttaagccatagtttctagattacctacttttaaccctcaagtaaacttttccctatttttcagaaatctgtttgtgtttatttttagaaagtaaacatttagattccttttctggtactttttttctccatttctatcacacagatttgaagagatcagtatctatcattgtaaaatataactttattaaaatttgcaatctgtctttctataaattattattccctaaatgtgtattttatgttaatttaactacctgaatatttattttgtttaaataaggaggcagctgtctaagaatttttgttaatattactttgtaaattgcgtaatgtaatttattttacattatgtacatttcctttttaacgcacaaaatgtctatgtacaattaactacagatttgcaaataatgtcactaagctttattcagtcaatacagatggcatgtgaagatgtaatatgcttttttacattttcatatgggttatttgtaaataactatattgctgacaaacataaatacggaaatcattttcattctaatcatgtgtatctgtgttttgatttgcaccaattgcttcttaaatatggattaaaatttttttccagtgaatacctaaa

SEQ ID NO: 427339 - DNA, 5953 bp, Homo sapiens
  misc_feature (3104)..(3104): n is a, c, g, or t
caaaatatattatttgtcaaaacatgattttctgttccgcagggggctgcttggtgatgagccagcctgatgccgacaggtcttgtaacccaccgtgtagtcaaccccactcgtactgtagcgagacaaaaacatgccattgtgaagaagggtacactgaagtcatgtcttctaacagcacccttgagcaatgcacacttatccccgtggtggtattacccaccatggaggacaaaagaggagatgtgaaaaccagtcgggctgtacatccaacccaaccctccagtaacccagcaggacggggaaggacctggtttctacagccatttgggccagatgggagactaaagacctgggtttacggtgtagcagctggggcatttgtgttactcatctttattgtctccatgatttatctagcttgcaaaaagccaaagaaaccccaaagaaggcaaaacaaccgactgaaacctttaaccttagcctatgatggagatgccgacatgtaacatataacttttcctggcaacaaccagtttcggctttctgacttcatagatgtccagaggccacaacaaatgtatccaaactgtgtggattaaaatatattttaatttttaaaaatggcatcataaagacaagagtgaaaatcatactgccactggagatatttaagacagtaccacttatatacagaccatcaaccgtgagaattataggagatttagctgaatacatgctgcattctgaaagttttatgtcatcttttctgaaatctaccgactgaaaaaccactttcatctctaaaaaataatggtggaattggccagttaggatgcctgatacaagaccgtctgcagtgttaatccataaaacttcctagcatgaagagtttctaccaagatctccacaatactatggtcaaattaacatgtgtactcagttgaatgacacacattatgtcagattatgtacttgctaataagcaattttaacaatgcataacaaataaactctaagctaagcagaaaatccactgaataaattcagcatcttggtggtcgatggtagattttattgacctgcatttcagagacaaagcctcttttttaagacttcttgtctctctccaaagtaagaatgctggacaagtactagtgtcttagaagaacgagtcctcaagttcagtattttatagtggtaattgtctggaaaactaatttacttgtgttaatacaatacgtttctactttccctgattttcaaactggttgcctgcatcttttttgctatatggaaggcacatttttgcactatattagtgcagcacgataggcgcttaaccagtattgccatagaaactgcctcttttcatgtgggatgaagacatctgtgccaagagtggcatgaagacatttgcaagttcttgtatcctgaagagagtaaagttcagtttggatggcagcaagatgaaatcagctattacacctgctgtacacacacttcctcatcactgcagccattgtgaaattgacaacatggcggtaatttaagtgttgaagtccctaaccccttaaccctctaaaaggtggattcctctagttggtttgtaattgttctttgaaggctgtttatgactagatttttatatttgttatctttgttaagaaaaaaaaagaaaaaaaaaggaactggatgtctttttaattttgagcagatggagaaaataaataatgtatcaatgacctttgtaactaaaggaaatcaaaattatatgttgatttttctttctctctgatttcccagtttcagattgaatgtctgtcttgcaggcagttatttcaaaatccatagtcttttgcctttctcactggcaaaatttgaagcaatctctctcttcaatgtatgatttcaaaactaaaattttaaaagagaagaataaatatcttatccaagacttcattgcatatctagagcaagagtggcaaactttttctgtaaaggactatatagaaaatattttccacaaggtctatgttgcaacttctcaactttgccattctgctaatgcaatcttagtaaataaaagaatgaacataactgttttcctatataacttcccttacaaaaacagccagtaggccacctttgcaggtcatattttgctgacccctggtctggatgttttttaatgctagctctccatggtgtcatctttcgttttcattcatttttcaaaggtgagaatttacagtcattacatttcccactgtatcagaagtagctgtattttctacagatgtagccctgggaatggcacagtggaacaatatttaactaactcagcagacttcttgcaaatgaaaagaaaactcaaaaggtgccattaaaaagcaataccattttcaggcaacattattgcaacaacctttgtgagagaggacactagcttttcaggatatttgaaaaataatataactaacatgctattttatcttaaacagctgtgttcctgtaaaagtgttttggattagaaggtatttttaccttcatactggagtatgaactccccctgctgttcattagagtatttgcaaagattacaaaagacatcaggttaggatgtcattgtccccaaaatgaaaatatttgtatgtatttcaataagaactaaatgcagtaagcgctaattcctcattcaatattcactatattaggaaatgtaaatcatttcaaagagaacaggtagtcaggaagatgaaaattttactttaaagcaaggatttaaacaaagaaaaccataaaaacaaagtccattttatctgttttattaaagaggaagaaaaaataatattgttactttaaaactgtgattgtcaatatatataatcaggggtcttccagataatcctaaagttgatctctttgaataaaataaactccatttgtccaaaatagttaagaaagactctattgtggttacttgaaaaattcagctaaccctcttatgaaatgtgtgcaacacctattaattttgaaatgtgggatagaatacctactaaagctatatttaaggtattgtaaaatgtcattaattcagaaangattagtatcatcctacctataagaattaaattagcaaatcaaaattatagaatgttatgaaaaatacattttattcataaattaattagattttacagcatatatgcatgcatatatatatatacacacacacacacacacacccatatatatgagagagaggaaattaggttcaacatgacctaatattagagaacatattggaaggtcactgtttgttaggataaataaatactggataacctcgttagaaaggtggaaagaggagaacgtagcaatctggctattttggacaaagggaaggttattatattcatgtttataacatgaaaatggccttatttttgtttctgacatgagacaataatgagttaaatattttattggaatttcatcaaaaccttatttttactgttccttctaaaaatttgggaggggaatatagtagtaacttctctattgacacttttacctcaccgagggggtaaaagatgtagaactgctgttccctagaatgaaggtctgttgtttggtttttaaaaaaagaagagcagaaaaagtttgacacagtattatatgattttgctggactatttcactagaaaccacgtagaataggactaactgatctcttttgaaaggggctgatttgcttattcatcaataactaatccaatatgtggacagtaatcttaatttcaaagccttttttgaggatactacggtgtagcttaagtgaatttaaaaagagtgcataaaagcttgtttttaattacttataacaaagcacaaattacttctaacaaggcaaatatttattgacatataagacattctgctaggcattgtaaaaaaaaaaaaaaaaaagtaatggcttttgtatacataggtacttaagacagacatccaaaagaaggaaaaaatgcttaatgagtgaagatagcactgaaacatgttgacttttactctaggtttgtttttagatggggttagtattttcccctacgtaatgtacatgtctttaggccacagtattaggagtttgatttttccctgccccaccctcaggtaggtggcagtggtcattgtagcttaatcagacccctgttaagttcctgggcatttcaaggtaaattcacgtcttccttctcacagaaattgaatagacctctcacacacttatttacctcccccaacaacctgtatccttggccctttctgattttctctgcttggtctctttctactcttgacagctattcttacctacttcccactaaacatgcccaattttttaattaaaaaaaaaagaattcctatatttccttccctattagaatcaaagtgtcactcactcagagtgtgaacatcctgatttacaccaaatccactggtcaaagaaatgaataaagggaaaaggaaaaatgtggaaggcatgcagggaaaaaaaaaaaaaaaaaagcccttttctgtaaaaatgtccatgcctacacttgctttagaccatcccatatcctcctgcctccatctcgagtctttgttcacattccacaccacaagacagtgagggaggactgtacttttcagtaccatacagaagggagagcctgttctaaagctgacgtgggtctcaatagtacatgagaagcacaattcccaaatgatctgggatctcctgtttataaatatattaccaaattcaagtgtgggttcttcttctatttccactgtaagattgagggtgttgaaaaaacagtagtccttgagcaaatctgtgaggaatcttgtcagaatgtgatctttcctgggactagtttagttgtgagaactacatctgcttgttctgggaataagggtctccccaggtcctgccctcaggtggccctggctgcaggacaggatttcaggtatcagaaactggtgtgtgagccaagcaaatagttatccatttataaaaaggatggtttgcagtgtgttataataattttatatctagcagggacaatgaaaaatggttatgtctacattattaaatgaatgaaactaatgctaaacagttaattttgcatttttatttttctgtgtttctaccaagtcagatcttaaaaatgggcagtatatgaagagctttagtttgtgggagtcatgttttcagtgatcaaaaatctctatattatttagaatataattgtcagtcttgttgtgttttgtagatttattgtttttaagccatagtttctagattacctacttttaaccctcaagtaaacttttccctatttttcagaaatctgtttgtgtttatttttagaaagtaaacatttagattccttttctggtactttttttctccatttctatcacacagatttgaagagatcagtatctatcattgtaaaatataactttattaaaatttgcaatctgtctttctataaattattattccctaaatgtgtattttatgttaatttaactacctgaatatttattttgtttaaataaggaggcagctgtctaagaatttttgttaatattactttgtaaattgcgtaatgtaatttattttacattatgtacatttcctttttaacgcacaaaatgtctatgtacaattaactacagatttgcaaataatgtcactaagctttattcagtcaatacagatggcatgtgaagatgtaatatgcttttttacattttcatatgggttatttgtaaataactatattgctgacaaacataaatacggaaatcattttcattctaatcatgtgtatctgtgttttgatttgcaccaattgcttcttaaatatggattaaaatttttttccagtgaatacctaaa

SEQ ID NO: 427340 - DNA, 4605 bp, Homo sapiens
  misc_feature (1756)..(1756): n is a, c, g, or t
tgtatttgcccatagtagtgcgagctctggtagaaccctcatgctaggaagttttatggattaacactgcagacgttcttgtatcctgaagagagtaaagttcagtttggatggcagcaagatgaaatcagctattacacctgctgtacacacacttcctcatcactgcagccattgtgaaattgacaacatggcggtaatttaagtgttgaagtccctaaccccttaaccctctaaaaggtggattcctctagttggtttgtaattgttctttgaaggctgtttatgactagatttttatatttgttatctttgttaagaaaaaaaaagaaaaaaaaaggaactggatgtctttttaattttgagcagatggagaaaataaataatgtatcaatgacctttgtaactaaaggaaatcaaaattatatgttgatttttctttctctctgatttcccagtttcagattgaatgtctgtcttgcaggcagttatttcaaaatccatagtcttttgcctttctcactggcaaaatttgaagcaatctctctcttcaatgtatgatttcaaaactaaaattttaaaagagaagaataaatatcttatccaagacttcattgcatatctagagcaagagtggcaaactttttctgtaaaggactatatagaaaatattttccacaaggtctatgttgcaacttctcaactttgccattctgctaatgcaatcttagtaaataaaagaatgaacataactgttttcctatataacttcccttacaaaaacagccagtaggccacctttgcaggtcatattttgctgacccctggtctggatgttttttaatgctagctctccatggtgtcatctttcgttttcattcatttttcaaaggtgagaatttacagtcattacatttcccactgtatcagaagtagctgtattttctacagatgtagccctgggaatggcacagtggaacaatatttaactaactcagcagacttcttgcaaatgaaaagaaaactcaaaaggtgccattaaaaagcaataccattttcaggcaacattattgcaacaacctttgtgagagaggacactagcttttcaggatatttgaaaaataatataactaacatgctattttatcttaaacagctgtgttcctgtaaaagtgttttggattagaaggtatttttaccttcatactggagtatgaactccccctgctgttcattagagtatttgcaaagattacaaaagacatcaggttaggatgtcattgtccccaaaatgaaaatatttgtatgtatttcaataagaactaaatgcagtaagcgctaattcctcattcaatattcactatattaggaaatgtaaatcatttcaaagagaacaggtagtcaggaagatgaaaattttactttaaagcaaggatttaaacaaagaaaaccataaaaacaaagtccattttatctgttttattaaagaggaagaaaaaataatattgttactttaaaactgtgattgtcaatatatataatcaggggtcttccagataatcctaaagttgatctctttgaataaaataaactccatttgtccaaaatagttaagaaagactctattgtggttacttgaaaaattcagctaaccctcttatgaaatgtgtgcaacacctattaattttgaaatgtgggatagaatacctactaaagctatatttaaggtattgtaaaatgtcattaattcagaaangattagtatcatcctacctataagaattaaattagcaaatcaaaattatagaatgttatgaaaaatacattttattcataaattaattagattttacagcatatatgcatgcatatatatatatacacacacacacacacacacccatatatatgagagagaggaaattaggttcaacatgacctaatattagagaacatattggaaggtcactgtttgttaggataaataaatactggataacctcgttagaaaggtggaaagaggagaacgtagcaatctggctattttggacaaagggaaggttattatattcatgtttataacatgaaaatggccttatttttgtttctgacatgagacaataatgagttaaatattttattggaatttcatcaaaaccttatttttactgttccttctaaaaatttgggaggggaatatagtagtaacttctctattgacacttttacctcaccgagggggtaaaagatgtagaactgctgttccctagaatgaaggtctgttgtttggtttttaaaaaaagaagagcagaaaaagtttgacacagtattatatgattttgctggactatttcactagaaaccacgtagaataggactaactgatctcttttgaaaggggctgatttgcttattcatcaataactaatccaatatgtggacagtaatcttaatttcaaagccttttttgaggatactacggtgtagcttaagtgaatttaaaaagagtgcataaaagcttgtttttaattacttataacaaagcacaaattacttctaacaaggcaaatatttattgacatataagacattctgctaggcattgtaaaaaaaaaaaaaaaaaagtaatggcttttgtatacataggtacttaagacagacatccaaaagaaggaaaaaatgcttaatgagtgaagatagcactgaaacatgttgacttttactctaggtttgtttttagatggggttagtattttcccctacgtaatgtacatgtctttaggccacagtattaggagtttgatttttccctgccccaccctcaggtaggtggcagtggtcattgtagcttaatcagacccctgttaagttcctgggcatttcaaggtaaattcacgtcttccttctcacagaaattgaatagacctctcacacacttatttacctcccccaacaacctgtatccttggccctttctgattttctctgcttggtctctttctactcttgacagctattcttacctacttcccactaaacatgcccaattttttaattaaaaaaaaaagaattcctatatttccttccctattagaatcaaagtgtcactcactcagagtgtgaacatcctgatttacaccaaatccactggtcaaagaaatgaataaagggaaaaggaaaaatgtggaaggcatgcagggaaaaaaaaaaaaaaaaaagcccttttctgtaaaaatgtccatgcctacacttgctttagaccatcccatatcctcctgcctccatctcgagtctttgttcacattccacaccacaagacagtgagggaggactgtacttttcagtaccatacagaagggagagcctgttctaaagctgacgtgggtctcaatagtacatgagaagcacaattcccaaatgatctgggatctcctgtttataaatatattaccaaattcaagtgtgggttcttcttctatttccactgtaagattgagggtgttgaaaaaacagtagtccttgagcaaatctgtgaggaatcttgtcagaatgtgatctttcctgggactagtttagttgtgagaactacatctgcttgttctgggaataagggtctccccaggtcctgccctcaggtggccctggctgcaggacaggatttcaggtatcagaaactggtgtgtgagccaagcaaatagttatccatttataaaaaggatggtttgcagtgtgttataataattttatatctagcagggacaatgaaaaatggttatgtctacattattaaatgaatgaaactaatgctaaacagttaattttgcatttttatttttctgtgtttctaccaagtcagatcttaaaaatgggcagtatatgaagagctttagtttgtgggagtcatgttttcagtgatcaaaaatctctatattatttagaatataattgtcagtcttgttgtgttttgtagatttattgtttttaagccatagtttctagattacctacttttaaccctcaagtaaacttttccctatttttcagaaatctgtttgtgtttatttttagaaagtaaacatttagattccttttctggtactttttttctccatttctatcacacagatttgaagagatcagtatctatcattgtaaaatataactttattaaaatttgcaatctgtctttctataaattattattccctaaatgtgtattttatgttaatttaactacctgaatatttattttgtttaaataaggaggcagctgtctaagaatttttgttaatattactttgtaaattgcgtaatgtaatttattttacattatgtacatttcctttttaacgcacaaaatgtctatgtacaattaactacagatttgcaaataatgtcactaagctttattcagtcaatacagatggcatgtgaagatgtaatatgcttttttacattttcatatgggttatttgtaaataactatattgctgacaaacataaatacggaaatcattttcattctaatcatgtgtatctgtgttttgatttgcaccaattgcttcttaaatatggattaaaatttttttccagtgaatacctaaa

SEQ ID NO: 427341 - DNA, 241 bp, Homo sapiens
ctgttcatgaagtattttagtgatagaaacatagtgttcctagtcaaatttgctatctgtgtgtgtaacaactgtgcacacctataattaccttggcctttgcacatgagtgttacatgcgtaaaacattttacacacagaaaagccaacctgtgtgaaattttagaattttctttatagtgttcaaaaactttttcctaccaccttaatatatatttaactctttgctccaaaaaaaaaa

SEQ ID NO: 427342 - DNA, 474 bp, Homo sapiens
taacttatctgggtgcccatctggtttaaattgctcattttacattaatttaacaataatagctgttggtggtcatgttttccccaggagaagaagttgacagacagctgtgcagagatgccatcttccccatccctgtggcctgtgatgccccatgcccgaaagactgtgtgctcagcacatggtctacgtggtcctcctgctcacacacctgctcagggaaaacgacagaagggaaacagatacgagcacgatccattctggcctatgcgggtgaagaaggtgagtcgccagcttcagacgccatctaggttcgtttcaaaagttagtgtgcatcttttttgtgtagcctggaaaagatgatattctatgaaagtcaacaaccagaaattcagccatccaagatttaatatctgttgatgtgttgagcaatttgattctgtcccccaaaattaatcttgaaaatggatctct

SEQ ID NO: 427343 - DNA, 5282 bp, Homo sapiens
gagtggagcccctgctcaaaaacatgccatgacatggtgtcccctgcaggcactcgtgtaaggacacgaaccatcaggcagtttcccattggcagtgaaaaggagtgtccagaatttgaagaaaaagaaccctgtttgtctcaaggagatggagttgtcccctgtgccacgtatggctggagaactacagagtggactgagtgccgtgtggaccctttgctcagtcagcaggacaagaggcgcggcaaccagacggccctctgtggagggggcatccagacccgagaggtgtactgcgtgcaggccaacgaaaacctcctctcacaattaagtacccacaagaacaaagaagcctcaaagccaatggacttaaaattatgcactggacctatccctaatactacacagctgtgccacattccttgtccaactgaatgtgaagtttcaccttggtcagcttggggaccttgtacttatgaaaactgtaatgatcagcaagggaaaaaaggcttcaaactgaggaagcggcgcattaccaatgagcccactggaggctctggggtaaccggaaactgccctcacttactggaagccattccctgtgaagagcctgcctgttatgactggaaagcggtgagactgggagactgcgagccagataacggaaaggagtgtggtccaggcacgcaagttcaagaggttgtgtgcatcaacagtgatggagaagaagttgacagacagctgtgcagagatgccatcttccccatccctgtggcctgtgatgccccatgcccgaaagactgtgtgctcagcacatggtctacgtggtcctcctgctcacacacctgctcagggaaaacgacagaagggaaacagatacgagcacgatccattctggcctatgcgggtgaagaaggtggaattcgctgtccaaatagcagtgctttgcaagaagtacgaagctgtaatgagcatccttgcacagtgtaccactggcaaactggtccctggggccagtgcattgaggacacctcagtatcgtccttcaacacaactacgacttggaatggggaggcctcctgctctgtcggcatgcagacaagaaaagtcatctgtgtgcgagtcaatgtgggccaagtgggacccaaaaaatgtcctgaaagccttcgacctgaaactgtaaggccttgtctgcttccttgtaagaaggactgtattgtgaccccatatagtgactggacatcatgcccctcttcgtgtaaagaaggggactccagtatcaggaagcagtctaggcatcgggtcatcattcagctgccagccaacgggggccgagactgcacagatcccctctatgaagagaaggcctgtgaggcacctcaagcgtgccaaagctacaggtggaagactcacaaatggcgcagatgccaattagtcccttggagcgtgcaacaagacagccctggagcacaggaaggctgtgggcctgggcgacaggcaagagccattacttgtcgcaagcaagatggaggacaggctggaatccatgagtgcctacagtatgcaggccctgtgccagcccttacccaggcctgccagatcccctgccaggatgactgtcaattgaccagctggtccaagttttcttcatgcaatggagactgtggtgcagttaggaccagaaagcgcactcttgttggaaaaagtaaaaagaaggaaaaatgtaaaaattcccatttgtatcccctgattgagactcagtattgtccttgtgacaaatataatgcacaacctgtggggaactggtcagactgtattttaccagagggaaaagtggaagtgttgctgggaatgaaagtacaaggagacatcaaggaatgcggacaaggatatcgttaccaagcaatggcatgctacgatcaaaatggcaggcttgtggaaacatctagatgtaacagccatggttacattgaggaggcctgcatcatcccctgcccctcagactgcaagctcagtgagtggtccaactggtcgcgctgcagcaagtcctgtgggagtggtgtgaaggttcgttctaaatggctgcgtgaaaaaccatataatggaggaaggccttgccccaaactggaccatgtcaaccaggcacaggtgtatgaggttgtcccatgccacagtgactgcaaccagtacctatgggtcacagagccctggagcatctgcaaggtgacctttgtgaatatgcgggagaactgtggagagggcgtgcaaacccgaaaagtgagatgcatgcagaatacagcagatggcccttctgaacatgtagaggattacctctgtgacccagaagagatgcccctgggctctagagtgtgcaaattaccatgccctgaggactgtgtgatatctgaatggggtccatggacccaatgtgttttgccttgcaatcaaagcagtttccggcaaaggtcagctgatcccatcagacaaccagctgatgaaggaagatcttgccctaatgctgttgagaaagaaccctgtaacctgaacaaaaactgctaccactatgattataatgtaacagactggagtacatgtcagctgagtgagaaggcagtttgtggaaatggaataaaaacaaggatgttggattgtgttcgaagtgatggcaagtcagttgacctgaaatattgtgaagcgcttggcttggagaagaactggcagatgaacacgtcctgcatggtggaatgccctgtgaactgtcagctttctgattggtctccttggtcagaatgttctcaaacatgtggcctcacaggaaaaatgatccgaagacgaacagtgacccagccctttcaaggtgatggaagaccatgcccttccctgatggaccagtccaaaccctgcccagtgaagccttgttatcggtggcaatatggccagtggtctccatgccaagtgcaggaggcccagtgtggagaagggaccagaacaaggaacatttcttgtgtagtaagtgatgggtcagctgatgatttcagcaaagtggtggatgaggaattctgtgctgacattgaactcattatagatggtaataaaaatatggttctggaggaatcctgcagccagccttgcccaggtgactgttatttgaaggactggtcttcctggagcctgtgtcagctgacctgtgtgaatggtgaggatctaggctttggtggaatacaggtcagatccagaccggtgattatacaagaactagagaatcagcatctgtgcccagagcagatgttagaaacaaaatcatgttatgatggacagtgctatgaatataaatggatggccagtgcttggaagggctcttcccgaacagtgtggtgtcaaaggtcagatggtataaatgtaacagggggctgcttggtgatgagccagcctgatgccgacaggtcttgtaacccaccgtgtagtcaaccccactcgtactgtagcgagacaaaaacatgccattgtgaagaagggtacactgaagtcatgtcttctaacagcacccttgagcaatgcacacttatccccgtggtggtattacccaccatggaggacaaaagaggagatgtgaaaaccagtcgggctgtacatccaacccaaccctccagtaacccagcaggacggggaaggacctggtttctacagccatttgggccagatgggagactaaagacctgggtttacggtgtagcagctggggcatttgtgttactcatctttattgtctccatgatttatctagcttgcaaaaagccaaagaaaccccaaagaaggcaaaacaaccgactgaaacctttaaccttagcctatgatggagatgccgacatgtaacatataacttttcctggcaacaaccagtttcggctttctgacttcatagatgtccagaggccacaacaaatgtatccaaactgtgtggattaaaatatattttaatttttaaaaatggcatcataaagacaagagtgaaaatcatactgccactggagatatttaagacagtaccacttatatacagaccatcaaccgtgagaattataggagatttagctgaatacatgctgcattctgaaagttttatgtcatcttttctgaaatctaccgactgaaaaaccactttcatctctaaaaaataatggtggaattggccagttaggatgcctgatacaagaccgtctgcagtgttaatccataaaacttcctagcatgaagagtttctaccaagatctccacaatactatggtcaaattaacatgtgtactcagttgaatgacacacattatgtcagattatgtacttgctaataagcaattttaacaatgcataacaaataaactctaagctaagcagaaaatccactgaataaattcagcatcttggtggtcgatggtagattttattgacctgcatttcagagacaaagcctcttttttaagacttcttgtctctctccaaagtaagaatgctggacaagtactagtgtcttagaagaacgagtcctcaagttcagtattttatagtggtaattgtctggaaaactaatttacttgtgttaatacaatacgtttctactttccctgattttcaaactggttgcctgcatcttttttgctatatggaaggcacatttttgcactatattagtgcagcacgataggcgcttaaccagtattgccatagaaactgcctcttttcatgtgggatgaagacatctgtgccaagagtggcatgaagacatttgcaagttcttgtatcctgaagagagtaaagttcagtttggatggcagcaagatgaaatcagctattacacctgctgtacacacacttcctcatcactgcagccattgtgaaattgacaacatggcggtaatttaagtgttgaagtccctaaccccttaaccctctaaaaggtggattcctctagttggtttgtaattgttctttgaaggctgtttatgactagatttttatatttgttatctttgttaagaaaaaaaaagaaaaaaaaaggaactggatgtctttttaattttgagcagatggagaaaataaataatgtatcaatgacctttgtaactaaaggaaatcaaaattatatgttgatttttctttctctctgatttcccagtttcagattgaatgtctgtcttgcaggcagttatttcaaaatccatagtcttttagtttttcttatttgtcttattttgattgcattatttctcttatattgatgtttataa

SEQ ID NO: 427344 - DNA, 3040 bp, Homo sapiens
aagaaggtagtcctctaaagcaaaatctgagtgccactaaatggggagatggggctgttaagctgtccaaatcaacaagggtcatataaatggccttaaactttggggttgctttctgcaaaaagttgctgtgactcatgccatagacaaggttgagtgcctggacccaaaggcaatactgtaatgtaaagacatttatagtactaggcaaacagcaccccaggtactccaggccctcctggctggagagggctgtggcaatagaaaattagtgccaactgcagtgagtcagcctaggttaaatagagagtgtaagagtgctggacaggaacctccaccctcatgtcacatttcttcaatgtgacccttctggcccctctcctcctgacagcggaacaatgactgccccgataggtgaggctggaggaagaatcagtcctgtccttggcaagctcttcactatgacagtaaaggctctctgcctgctgccaaggcctgtgactttctaacctggcctcacgctgggtaagcttaaggtagaggtgcaggattagcaagcccacctggctaccaggccgacagctacatcctccaactgaccctgatcaatgaagagggattcatgtgtctgtctcagttggttccaaatgaaaccagggagcaggggagttaggaatcgaacaccagtcatgcctactggctctctgctcgagagccaataccctgtgccctccactcatctggatttacaggaactgtcatagtgttcagtattgggtggtgataagcccattggattgtccccttggggggatgagctaggggtgcaaggaacacctgatgagtagataagtggagctcatggtatttcctgaaagatgctaatctatttgccaaacttggtcttgaatgtactgggggcttcaaggtatgggtatatttttcttgtgtccttgcagttagcccccatgtcttatgtgtgtcctgaaaaaataagagcctgcccaagactttgggcctcttgacagaattaaccacttttatacatctgagttctcttggtaagttctttagcagtgttcaaagtctactagctcgcattagtttctgttgctgccaacagatctgaactaatgctaacagatccccctgagggattcttgatgggctgagcagctggctggagctagtactgactgacattcattgtgatgagggcagctttctggtacaggattctaagctctatgttttatatacattttcatctgtacttgcacctcactttacacaagaggaaactatgcaaagttagctggatcgctcaaggtcacttaggtaagttggcaagtccatgcttcccactcagctcctcaggtcagcaagtctacttctctgcctattttgtatactctctttaatatgtgcctagctttggaaagtctagaatgggtccctggtgcctttttactttgaagaaatcagtttctgcctctttttggaaaagaaaacaaagtgcaattgttttttactggaaagttacccaatagcatgaggtgaacaggacgtagttaggccttcctgtaaacagaaaatcatatcaaaacactatcttcccatctgtttctcaatgcctgctacttcttgtagatatttcatttcaggagagcagcagttaaacccgtggattttgtagttaggaacctgggttcaaaccctcttccactaattggctatgtctctggacaagtttttttttttttttttttttaaaccctttctgaactttcactttctatgtctacctcaaagaattgttgtgaggcttgagataatgcatttgtaaagggtctgccagataggaagatgctagttatggatttacaaggttgttaaggctgtaagagtctaaaacctacagtgaatcacaatgcatttacccccactgacttggacataagtgaaaactagccagaagtctctttttcaaattacttacaggttattcaatataaaatttttgtaatggataatcttatttatctaaactaaagcttcctgtttatacacactcctgttattctgggataagataaatgaccacagtaccttaatttctaggtgggtgcctgtgatggttcattgtaggtaaggacattttctctttttcagcagctgtgtaggtccagagcctctgggagaggaggggggtagcatgcacccagcaggggactgaactgggaaactcaaggttctttttactgtggggtagtgagctgcctttctgtgatcggtttccctagggatgttgctgttcccctccttgctattcgcagctacatacaacgtggccaaccccagtaggctgatcctatatatgatcagtgctggtgctgactctcaatagccccacccaagctggctataggtttacagatacattaattaggcaacctaaaatattgatgctggtgttggtgtgacataatgctatggccagaactgaaacttagagttataattcatgtattagggttctccagagggacagaattagtaggatatatgtatatatgaaagggaggttattagggagaactggctcccacagttagaaggcgaagtcgcacaataggccgtctgcaagctgggttagagagaagccagtagtggctcagcctgagttcaaaaacctcaaaactggggaagctgacagtgcagccagccttcagtctgtggccaaaggcccaagagcccctggcaaccaacccactggtgcaagtcctagattccaaaggctgaagaacctggagtctgatgtccaagagcaggaagagtggaagaaagccagaagactcagcaaacaaggtagacagtgtctaccaccacagtggccataccaaagaggctaccgattccttcctgctacctggatccctgaagttgccctggtctctgcaccttctaaacctagttcttaagagctttccattacatgagctgtctcaaagccctccaataaattctcagtgtaagcttc

SEQ ID NO: 427345 - DNA, 1550 bp, Homo sapiens
aagaaggtagtcctctaaagcaaaatctgagtgccactaaatggggagatggggctgttaagctgtccaaatcaacaagggtcatataaatggccttaaactttggggttgctttctgcaaaaagttgctgtgactcatgccatagacaaggttgagtgcctggacccaaaggcaatactgtaatgtaaagacatttatagtactaggcaaacagcaccccaggtactccaggccctcctggctggagagggctgtggcaatagaaaattagtgccaactgcagtgagtcagcctaggttaaatagagagtgtaagagtgctggacaggaacctccaccctcatgtcacatttcttcaatgtgacccttctggcccctctcctcctgacagcggaacaatgactgccccgataggtgaggctggaggaagaatcagtcctgtccttggcaagctcttcactatgacagtaaaggctctctgcctgctgccaaggcctgtgactttctaacctggcctcacgctgggtaagcttaaggtagaggtgcaggattagcaagcccacctggctaccaggccgacagctacatcctccaactgaccctgatcaatgaagagggattcatgtgtctgtctcagttggttccaaatgaaaccagggagcaggggagttaggaatcgaacaccagtcatgcctactggctctctgctcgagagccaataccctgtgccctccactcatctggatttacaggaactgtcatagtgttcagtattgggtggtgataagcccattggattgtccccttggggggatgagctaggggtgcaaggaacacctgatgagtagataagtggagctcatggtatttcctgaaagatgctaatctatttgccaaacttggtcttgaatgtactgggggcttcaaggtatgggtatatttttcttgtgtccttgcagttagcccccatgtcttatgtgtgtcctgaaaaaataagagcctgcccaagactttgggcctcttgacagaattaaccacttttatacatctgagttctcttggtaagttctttagcagtgttcaaagtctactagctcgcattagtttctgttgctgccaacagatctgaactaatgctaacagatccccctgagggattcttgatgggctgagcagctggctggagctagtactgactgacattcattgtgatgagggcagctttctggtacaggattctaagctctatgttttatatacattttcatctgtacttgcacctcactttacacaagaggaaactatgcaaagttagctggatcgctcaaggtcacttaggtaagttggcaagtccatgcttcccactcagctcctcaggtcagcaagtctacttctctgcctattttgtatactctcttacagccttaacaaccttgtaaatccataactagcatcttcctatctggcagaccctttacaaatgcattatctcaagcctcacaacaattctttgaggtagacatagaaagtgaaagttcagaaagggttta

SEQ ID NO: 427346 - DNA, 306 bp, Homo sapiens
tggacagctggacagcacagaggaggtggacagcacagaggatggtggacagcacagaggaggtggacagcacagaggaggtggacagcaagagcaggaagagtggaagaaagccagaagactcagcaaacaaggtagacagtgtctaccaccacagtggccataccaaagaggctaccgattccttcctgctacctggatccctgaagttgccctggtctctgcaccttctaaacctagttcttaagagctttccattacatgagctgtctcaaagccctccaataaattctcagtgtaagcttc

SEQ ID NO: 427347 - DNA, 2913 bp, Homo sapiens
aagaaggtagtcctctaaagcaaaatctgagtgccactaaatggggagatggggctgttaagctgtccaaatcaacaagggtcatataaatggccttaaactttggggttgctttctgcaaaaagttgctgtgactcatgccatagacaaggttgagtgcctggacccaaaggcaatactgtaatgtaaagacatttatagtactaggcaaacagcaccccaggtactccaggccctcctggctggagagggctgtggcaatagaaaattagtgccaactgcagtgagtcagcctaggttaaatagagagtgtaagagtgctggacaggaacctccaccctcatgtcacatttcttcaatgtgacccttctggcccctctcctcctgacagcggaacaatgactgccccgataggtgaggctggaggaagaatcagtcctgtccttggcaagctcttcactatgacagtaaaggctctctgcctgctgccaaggcctgtgactttctaacctggcctcacgctgggtaagcttaaggtagaggtgcaggattagcaagcccacctggctaccaggccgacagctacatcctccaactgaccctgatcaatgaagagggattcatgtgtctgtctcagttggttccaaatgaaaccagggagcaggggagttaggaatcgaacaccagtcatgcctactggctctctgctcgagagccaataccctgtgccctccactcatctggatttacaggaactgtcatagtgttcagtattgggtggtgataagcccattggattgtccccttggggggatgagctaggggtgcaaggaacacctgatgagtagataagtggagctcatggtatttcctgaaagatgctaatctatttgccaaacttggtcttgaatgtactgggggcttcaaggtatgggtatatttttcttgtgtccttgcagttagcccccatgtcttatgtgtgtcctgaaaaaataagagcctgcccaagactttgggcctcttgacagaattaaccacttttatacatctgagttctcttggtaagttctttagcagtgttcaaagtctactagctcgcattagtttctgttgctgccaacagatctgaactaatgctaacagatccccctgagggattcttgatgggctgagcagctggctggagctagtactgactgacattcattgtgatgagggcagctttctggtacaggattctaagctctatgttttatatacattttcatctgtacttgcacctcactttacacaagaggaaactatgcaaagttagctggatcgctcaaggtcacttaggtaagttggcaagtccatgcttcccactcagctcctcaggtcagcaagtctacttctctgcctattttgtatactctctttaatatgtgcctagctttggaaagtctagaatgggtccctggtgcctttttactttgaagaaatcagtttctgcctctttttggaaaagaaaacaaagtgcaattgttttttactggaaagttacccaatagcatgaggtgaacaggacgtagttaggccttcctgtaaacagaaaatcatatcaaaacactatcttcccatctgtttctcaatgcctgctacttcttgtagatatttcatttcaggagagcagcagttaaacccgtggattttgtagttaggaacctgggttcaaaccctcttccactaattggctatgtctctggacaagtttttttttttttttttttttaaaccctttctgaactttcactttctatgtctacctcaaagaattgttgtgaggcttgagataatgcatttgtaaagggtctgccagataggaagatgctagttatggatttacaaggttgttaaggctgtaagagtctaaaacctacagtgaatcacaatgcatttacccccactgacttggacataagtgaaaactagccagaagtctctttttcaaattacttacaggttattcaatataaaatttttgtaatggataatcttatttatctaaactaaagcttcctgtttatacacactcctgttattctgggataagataaatgaccacagtaccttaatttctaggtgggtgcctgtgatggttcattgtaggtaaggacattttctctttttcagcagctgtgtaggtccagagcctccttgctattcgcagctacatacaacgtggccaaccccagtaggctgatcctatatatgatcagtgctggtgctgactctcaatagccccacccaagctggctataggtttacagatacattaattaggcaacctaaaatattgatgctggtgttggtgtgacataatgctatggccagaactgaaacttagagttataattcatgtattagggttctccagagggacagaattagtaggatatatgtatatatgaaagggaggttattagggagaactggctcccacagttagaaggcgaagtcgcacaataggccgtctgcaagctgggttagagagaagccagtagtggctcagcctgagttcaaaaacctcaaaactggggaagctgacagtgcagccagccttcagtctgtggccaaaggcccaagagcccctggcaaccaacccactggtgcaagtcctagattccaaaggctgaagaacctggagtctgatgtccaagagcaggaagagtggaagaaagccagaagactcagcaaacaaggtagacagtgtctaccaccacagtggccataccaaagaggctaccgattccttcctgctacctggatccctgaagttgccctggtctctgcaccttctaaacctagttcttaagagctttccattacatgagctgtctcaaagccctccaataaattctcagtgtaagcttc

SEQ ID NO: 427348 - DNA, 3469 bp, Homo sapiens
aagaaggtagtcctctaaagcaaaatctgagtgccactaaatggggagatggggctgttaagctgtccaaatcaacaagggtcatataaatggccttaaactttggggttgctttctgcaaaaagttgctgtgactcatgccatagacaaggttgagtgcctggacccaaaggcaatactgtaatgtaaagacatttatagtactaggcaaacagcaccccaggtactccaggccctcctggctggagagggctgtggcaatagaaaattagtgccaactgcagtgagtcagcctaggttaaatagagagtgtaagagtgctggacaggaacctccaccctcatgtcacatttcttcaatgtgacccttctggcccctctcctcctgacagcggaacaatgactgccccgataggtgaggctggaggaagaatcagtcctgtccttggcaagctcttcactatgacagtaaaggctctctgcctgctgccaaggcctgtgactttctaacctggcctcacgctgggtaagcttaaggtagaggtgcaggattagcaagcccacctggctaccaggccgacagctacatcctccaactgaccctgatcaatgaagagggattcatgtgtctgtctcagttggttccaaatgaaaccagggagcaggggagttaggaatcgaacaccagtcatgcctactggctctctgctcgagagccaataccctgtgccctccactcatctggatttacaggaactgtcatagtgttcagtattgggtggtgataagcccattggattgtccccttggggggatgagctaggggtgcaaggaacacctgatgagtagataagtggagctcatggtatttcctgaaagatgctaatctatttgccaaacttggtcttgaatgtactgggggcttcaaggtatgggtatatttttcttgtgtccttgcagttagcccccatgtcttatgtgtgtcctgaaaaaataagagcctgcccaagactttgggcctcttgacagaattaaccacttttatacatctgagttctcttggtaagttctttagcagtgttcaaagtctactagctcgcattagtttctgttgctgccaacagatctgaactaatgctaacagatccccctgagggattcttgatgggctgagcagctggctggagctagtactgactgacattcattgtgatgagggcagctttctggtacaggattctaagctctatgttttatatacattttcatctgtacttgcacctcactttacacaagaggaaactatgcaaagttagctggatcgctcaaggtcacttaggtaagttggcaagtccatgcttcccactcagctcctcaggtcagcaagtctacttctctgcctattttgtatactctctttaatatgtgcctagctttggaaagtctagaatgggtccctggtgcctttttactttgaagaaatcagtttctgcctctttttggaaaagaaaacaaagtgcaattgttttttactggaaagttacccaatagcatgaggtgaacaggacgtagttaggccttcctgtaaacagaaaatcatatcaaaacactatcttcccatctgtttctcaatgcctgctacttcttgtagatatttcatttcaggagagcagcagttaaacccgtggattttgtagttaggaacctgggttcaaaccctcttccactaattggctatgtctctggacaagtttttttttttttttttttttaaaccctttctgaactttcactttctatgtctacctcaaagaattgttgtgaggcttgagataatgcatttgtaaagggtctgccagataggaagatgctagttatggatttacaaggttgttaaggctgtaagagtctaaaacctacagtgaatcacaatgcatttacccccactgacttggacataagtgaaaactagccagaagtctctttttcaaattacttacaggttattcaatataaaatttttgtaatggataatcttatttatctaaactaaagcttcctgtttatacacactcctgttattctgggataagataaatgaccacagtaccttaatttctaggtgggtgcctgtgatggttcattgtaggtaaggacattttctctttttcagcagctgtgtaggtccagagcctctgggagaggaggggggtagcatgcacccagcaggggactgaactgggaaactcaaggttctttttactgtggggtagtgagctgcctttctgtgatcggtttccctagggatgttgctgttcccctccttgctattcgcagctacatacaacgtggccaaccccagtaggctgatcctatatatgatcagtgctggtgctgactctcaatagccccacccaagctggctataggtttacagatacattaattaggcaacctaaaatattgatgctggtgttggtgtgacataatgctatggccagaactgaaacttagagttataattcatgtattagggttctccagagggacagaattagtaggatatatgtatatatgaaagggaggttattagggagaactggctcccacagttagaaggcgaagtcgcacaataggccgtctgcaagctgggttagagagaagccagtagtggctcagcctgagttcaaaaacctcaaaactggggaagctgacagtgcagccagccttcagtctgtggccaaaggcccaagagcccctggcaaccaacccactggtgcaagtcctagattccaaaggctgaagaacctggagtctgatgtccaagagcaggaagagtggaagaaagccagaagactcagcaaacaaggtagacagtgtctaccaccacagtggccataccaaagaggctaccgattccttcctgctacctggatccctgaagttgccctggtctctgcaccttctaaacctagttcttaagagctttccattacatgagctgtctcaaagccctccaataaattctcagtgtaagcttcaaaaaaaaaaaaaaaaaaaaaaaaaaaacaaacaacaaaaagaaacacaaaacccaaaaaaaaacaaacaaaaaaacaaaacaaaaacacgtgtgtgggggcggcgccgcgcggagccgcccgccgaaggagaggctgtttgctcaacagaccccacggtggagggcgggcgggggggcgaccaccaagaggagtagcggagagagaacggccgagaccaaggagggtgaccaagaagagaaaaacacggcggcgagaaaaaaacaggggcggggggtgtttccccccaaaaaaaaaaaaagcgccggggggaaacacaaggggggggtttcaacaaccacagccaaggagagagacgagcaggagaacccagggggggaacaacaaaaaggggagccccagaaggacgcgggaaaaaaaaaagcccag

SEQ ID NO: 427349 - DNA, 2937 bp, Homo sapiens
aagaaggtagtcctctaaagcaaaatctgagtgccactaaatggggagatggggctgttaagctgtccaaatcaacaagggtcatataaatggccttaaactttggggttgctttctgcaaaaagttgctgtgactcatgccatagacaaggttgagtgcctggacccaaaggcaatactgtaatgtaaagacatttatagtactaggcaaacagcaccccaggtactccaggccctcctggctggagagggctgtggcaatagaaaattagtgccaactgcagtgagtcagcctaggttaaatagagagtgtaagagtgctggacaggaacctccaccctcatgtcacatttcttcaatgtgacccttctggcccctctcctcctgacagcggaacaatgactgccccgataggtgaggctggaggaagaatcagtcctgtccttggcaagctcttcactatgacagtaaaggctctctgcctgctgccaaggcctgtgactttctaacctggcctcacgctgggtaagcttaaggtagaggtgcaggattagcaagcccacctggctaccaggccgacagctacatcctccaactgaccctgatcaatgaagagggattcatgtgtctgtctcagttggttccaaatgaaaccagggagcaggggagttaggaatcgaacaccagtcatgcctactggctctctgctcgagagccaataccctgtgccctccactcatctggatttacaggaactgtcatagtgttcagtattgggtggtgataagcccattggattgtccccttggggggatgagctaggggtgcaaggaacacctgatgagtagataagtggagctcatggtatttcctgaaagatgctaatctatttgccaaacttggtcttgaatgtactgggggcttcaaggtatgggtatatttttcttgtgtccttgcagttagcccccatgtcttatgtgtgtcctgaaaaaataagagcctgcccaagactttgggcctcttgacagaattaaccacttttatacatctgagttctcttggtaagttctttagcagtgttcaaagtctactagctcgcattagtttctgttgctgccaacagatctgaactaatgctaacagatccccctgagggattcttgatgggctgagcagctggctggagctagtactgactgacattcattgtgatgagggcagctttctggtacaggattctaagctctatgttttatatacattttcatctgtacttgcacctcactttacacaagaggaaactatgcaaagttagctggatcgctcaaggtcacttaggtaagttggcaagtccatgcttcccactcagctcctcaggtcagcaagtctacttctctgcctattttgtatactctctttaatatgtgcctagctttggaaagtctagaatgggtccctggtgcctttttactttgaagaaatcagtttctgcctctttttggaaaagaaaacaaagtgcaattgttttttactggaaagttacccaatagcatgaggtgaacaggacgtagttaggccttcctgtaaacagaaaatcatatcaaaacactatcttcccatctgtttctcaatgcctgctacttcttgtagatatttcatttcaggagagcagcagttaaacccgtggattttgtagttaggaacctgggttcaaaccctcttccactaattggctatgtctctggacaagtttttttttttttttttttttaaaccctttctgaactttcactttctatgtctacctcaaagaattgttgtgaggcttgagataatgcatttgtaaagggtctgccagataggaagatgctagttatggatttacaaggttgttaaggctgtaagagtctaaaacctacagtgaatcacaatgcatttacccccactgacttggacataagtgaaaactagccagaagtctctttttcaaattacttacaggttattcaatataaaatttttgtaatggataatcttatttatctaaactaaagcttcctgtttatacacactcctgttattctgggataagataaatgaccacagtaccttaatttctaggtgggtgcctgtgatggttcattgtaggtaaggacattttctctttttcagcagctgtgtaggtccagagcctctgggagaggaggggggtagcatgcacccagcaggggactgaactgggaaactcaaggttctttttactgtggggtagtgagctgcctttctgtgatcggtttccctagggatgttgctgttcccctccttgctattcgcagctacatacaacgtggccaaccccagtaggctgatcctatatatgatcagtgctggtgctgactctcaatagccccacccaagctggctataggtttacagatacattaattaggcaacctaaaatattgatgctggtgttggtgtgacataatgctatggccagaactgaaacttagagttataattcatgtattagggttctccagagggacagaattagtaggatatatgtatatatgaaagggaggttattagggagaactggctcccacagttagaaggcgaagtctaagagtgaagtaggtgtgacttgaactagattgcatgcttcctcctttgctcttaggaagaccagctttgcagtgacagcttgagtgggttctctgcagccctcagattatttttcctctggctccttggatgtagtcagttagcatcattagtacatctttggagggtggggcaggagtatatgagcatcctctctcacatggaacgctttcataaacttcagggatcccgtgttgccatggaggcatgccaaatgttccatatgtgggtgtcagtcagggaaacaagatcttaatgcaagtagaggat

SEQ ID NO: 427350 - DNA, 5354 bp, Homo sapiens
aagaaggtagtcctctaaagcaaaatctgagtgccactaaatggggagatggggctgttaagctgtccaaatcaacaagggtcatataaatggccttaaactttggggttgctttctgcaaaaagttgctgtgactcatgccatagacaaggttgagtgcctggacccaaaggcaatactgtaatgtaaagacatttatagtactaggcaaacagcaccccaggtactccaggccctcctggctggagagggctgtggcaatagaaaattagtgccaactgcagtgagtcagcctaggttaaatagagagtgtaagagtgctggacaggaacctccaccctcatgtcacatttcttcaatgtgacccttctggcccctctcctcctgacagcggaacaatgactgccccgataggtgaggctggaggaagaatcagtcctgtccttggcaagctcttcactatgacagtaaaggctctctgcctgctgccaaggcctgtgactttctaacctggcctcacgctgggtaagcttaaggtagaggtgcaggattagcaagcccacctggctaccaggccgacagctacatcctccaactgaccctgatcaatgaagagggattcatgtgtctgtctcagttggttccaaatgaaaccagggagcaggggagttaggaatcgaacaccagtcatgcctactggctctctgctcgagagccaataccctgtgccctccactcatctggatttacaggaactgtcatagtgttcagtattgggtggtgataagcccattggattgtccccttggggggatgagctaggggtgcaaggaacacctgatgagtagataagtggagctcatggtatttcctgaaagatgctaatctatttgccaaacttggtcttgaatgtactgggggcttcaaggtatgggtatatttttcttgtgtccttgcagttagcccccatgtcttatgtgtgtcctgaaaaaataagagcctgcccaagactttgggcctcttgacagaattaaccacttttatacatctgagttctcttggtaagttctttagcagtgttcaaagtctactagctcgcattagtttctgttgctgccaacagatctgaactaatgctaacagatccccctgagggattcttgatgggctgagcagctggctggagctagtactgactgacattcattgtgatgagggcagctttctggtacaggattctaagctctatgttttatatacattttcatctgtacttgcacctcactttacacaagaggaaactatgcaaagttagctggatcgctcaaggtcacttaggtaagttggcaagtccatgcttcccactcagctcctcaggtcagcaagtctacttctctgcctattttgtatactctctttaatatgtgcctagctttggaaagtctagaatgggtccctggtgcctttttactttgaagaaatcagtttctgcctctttttggaaaagaaaacaaagtgcaattgttttttactggaaagttacccaatagcatgaggtgaacaggacgtagttaggccttcctgtaaacagaaaatcatatcaaaacactatcttcccatctgtttctcaatgcctgctacttcttgtagatatttcatttcaggagagcagcagttaaacccgtggattttgtagttaggaacctgggttcaaaccctcttccactaattggctatgtctctggacaagtttttttttttttttttttttaaaccctttctgaactttcactttctatgtctacctcaaagaattgttgtgaggcttgagataatgcatttgtaaagggtctgccagataggaagatgctagttatggatttacaaggttgttaaggctgtaagagtctaaaacctacagtgaatcacaatgcatttacccccactgacttggacataagtgaaaactagccagaagtctctttttcaaattacttacaggttattcaatataaaatttttgtaatggataatcttatttatctaaactaaagcttcctgtttatacacactcctgttattctgggataagataaatgaccacagtaccttaatttctaggtgggtgcctgtgatggttcattgtaggtaaggacattttctctttttcagcagctgtgtaggtccagagcctctgggagaggaggggggtagcatgcacccagcaggggactgaactgggaaactcaaggttctttttactgtggggtagtgagctgcctttctgtgatcggtttccctagggatgttgctgttcccctccttgctattcgcagctacatacaacgtggccaaccccagtaggctgatcctatatatgatcagtgctggtgctgactctcaatagccccacccaagctggctataggtttacagatacattaattaggcaacctaaaatattgatgctggtgttggtgtgacataatgctatggccagaactgaaacttagagttataattcatgtattagggttctccagagggacagaattagtaggatatatgtatatatgaaagggaggttattagggagaactggctcccacagttagaaggcgaagtcgcacaataggccgtctgcaagctgggttagagagaagccagtagtggctcagcctgagttcaaaaacctcaaaactggggaagctgacagtgcagccagccttcagtctgtggccaaaggcccaagagcccctggcaaccaacccactggtgcaagtcctagattccaaaggctgaagaacctggagtctgatgtccaagagcaggaagagtggaagaaagccagaagactcagcaaacaaggtagacagtgtctaccaccacagtggccataccaaagaggctaccgattccttcctgctacctggatccctgaagttgccctggtctctgcaccttctaaacctagttcttaagagctttccattacatgagctgtctcaaagccctccaataaattctcagtgtaagcttctgttgcttgtggacagaaaattctgacagacctaccctataagtgttactgtcaggataacatgagaacgcacaacagtaagtggtcactaagtgttagctacggttattttgcccaaggtagcatggctagttgatgccggttgatggggcttaaacccagctccctcatcttccaggcctctgtactccctattccactaaactacctctcaggtttatttttttaaattcttactctgcaagtacataggaccacatttacctgggaaaacaagaataaaggctgctctgcattttttagaaacttttttgaaagggagatgggaatgcctgcacccccaagtccagaccaacacaatggttaattgagatgaataataaaggaaagactgttctgggcttcccagaatagcttggtccttaaattgtggcacaaacaacctcctgtcagagccagcctcctgccaggaagaggggtaggagactagaggccgtgtgtgcagccttgccctgaaggctagggtgacaatttggaggctgtccaaacaccctggcctctagagctggcctgtctatttgaaatgccggctctgatgctaatcggcgaccctcaggcaagttacttaaccttacatgcctcagttttctcatctggaaaatgagaaccctaggtttagggttgttagaaaagttaaatgagttaagacaagtgcctgggacacagtagcctcttgtgtgtgtttatcattatgtcctcagcaggtcgtagaagcagcttctcaggtgtgaggctggcgcgattatctggagtgggttgggttttctaggatggaccccctgctgcattttcctcattcatccaccagggcttaatggggaatcaaggaatccatgtgtaactgtataataactgtagccacactccaatgaccacctactagttgtccctggcactgcttatacatatgtccatcaaatcaatcctatgaagtagatactgtcttcattttatagatcagagacaattggggttcagagagctgatgtgattttcccagggtcacagagagtcccagattcaggcacaactcttgtattccaagacacaaccactacatgtccaaaggctgcccagagccaccgggcacggcaaattgtgacatatccctaaagaggctgagcacctggtcaggatctgatggctgacagtgtgtccagatgcagagctggagtgggggaggggaaggggggctccttgggacagagaaggctttctgtgctttctctgaagggagcagtctgaggaccaagggaacccggcaaacagcacctcaggtactccaggccctcctggctggagagggctgtggcaatggaaaattagtgccaactgcaatgagtcagcctcggttaaatagagagtgaagaatgctggacaggaacctccaccctcatgtcacatttcttcagtgtgacccttctggcccctctcctcctgacagcggaacaatgactgccccgataggtgaggctggaggaagaatcagtcctgtccttggcaagctcttcactatgacagtaaaggctctctgcctgctgccaaggcctgtgactttctaacctggcctcacgctgggtaagcttaaggtagaggtgcaggattagcaagcccacctggctaccaggccgacagctacatctttcaactgaccctgatcaacgaagagggacttgtgtctctcagttggttccaaatgaaaccagggagcaggggcgttaggaagctccaacaggatggtacttaatggggcatttgagtggagaggtaggtgacatagtgctttggagcccagggagggaaaggttctgctgaagttgaattcaagactgttctttcatcacaaacttgagtttcctggacatttgtttgcagaaacaaccgtagggttttgccttaacctcgtgggtttattattacctcatagggactttgcctcctgacagcagtttatgggtgttcattgtggcacttgagttttcttgcatacttgttagagaaaccaagtttgtcatcaacttcttatttaaccccctggctataacttcatggattatgttataattaagccatccagagtaaaatctgtttagattatcttggagtaagggggaaaaaatctgtaattttttctcctcaactagatatatacataaaaaatgattgtattgcttcatttaaaaaatataacgcaaaatctcttttccttctaagggcctttaatatgtaataacaagagctaatgttgaacaca

SEQ ID NO: 427351 - DNA, 1464 bp, Homo sapiens
gccgagtgcgggctgagaaggcggtggctgcagcagcagcggcggcggaaaccctaaagtccgagtccggactacgagtgcgtggcctcctaatccggatcctagtcctgagcgtgtctgtgtgcgagtggacggtcccggacgcgatgaccctgaacggcggcggcagcggagcgggcgggagccgcggtgggggccaggagcgcgagcgccgtcggggcagcacaccctggggccccgccccgccgctgcaccgccgcagcatgccggtggacgagcgcgacctgcaggcggcgctgaccccgggtgccctgacggcggccgcggccgggacggggacccagggtcccaggctggactggcccgaggactccgaggactcgctcagctcagggggcagcgactcagacgagagcgtttacaaggtgctgctgctgggggcgcccggcgtgggcaagagcgccctggcgcgcatcttcggcggtgtggaggacgggcctgaagcagaggcagcagggcacacctatgatcgctccattgtagtggacggagaagaggcatcactcatggtctacgacatttgggagcaggacgggggccgctggttgcccggccactgcatggccatgggggatgcctatgtcattgtgtactcagtgacggacaagggcagcttcgagaaggcctcagaactgcgggtccagctgcggcgtgcacggcaaacagatgatgtgcccatcatcctcgtgggcaacaagagcgacctggtgcgctctcgtgaggtctcggtggatgagggccgggcctgcgcggtggtctttgactgcaagttcattgagacatcagcggcattgcaccacaatgtccaggcgctgtttgaaggtgtcgtgcgccagatacgcctgcgcagggacagcaaagaagccaacgcacgacggcaagcaggcacccggaggcgagagagccttggcaaaaaggcgaagcgcttcttgggccgcatcgtagctcgtaacagccgcaagatggcctttcgcgccaaatccaagtcctgccacgacctctcggttctctaggtcccacccgctcccactatggtgggagacgaacggaagggttggtgggctggcccagccaactgccccgggtgcctcagagcaggctcagactctgggtccctcggagctgccagccgggcacccccaacctcatggtcatggacagatagacagtgctgccctgcgaagtggctctcaggggccagtgagggctgggcccacagagatgcatgcgcaggctcatatgcgtcccaagcagccgcagcgcagccgccgggcaggcctgcgtgccgggagaggactctgccttttttcacagcccgggtgtgcctgccctggagggaggctcttcagtgcggtagctatttgtttacatgcagatttttgtaataaaggctatttcctgata

SEQ ID NO: 427352 - DNA, 985 bp, Homo sapiens
tcatatgcgtccaagcagccgcagcgcctggcccagccaactgccccgggtgcctcagagcaggctcagactctgggtccctcggagctgccagccgggcacccccaacctcatggtcatggacagatagacagtgctgccctgcgaagtggctctcaggggccagtgagggctagcccaccagcccttccgttcgtctcccaccatagtgggagcgggtgggacctaaggatgacccgagtaggtcgtgcgcacggactcggctttggcgcgaccggccatcttgcgcgctgttccgagctacgatgctggcccacgcagcgcttcgcctttttgcccggctctctcgcctccggggtgcctgcttgccgcccgctgcgttggcttctttgctgtccctgcgccggcgcttctggcgcacgactccttccatcagcgcctggcaccgttgtggtgcaactgccgctgatgtctcagtgaccttgcgccagaggaccaccgcgcgcggcccggccctcgctccaccgagaaccgtcacgagagcgccccaggtcgccgcttgttgccacgaggctgatgggccctcatctgtttgcgcgcccgccgctcctggccccgccgtgctgcggctctccagcctgccctgtcgtcctgacctccacgagtgagctatggcctccccatggcctgcggtggccgtgcacctgcggccccccgtcctgctccgcgcgtgtcccgacagtcgcgatgctcctcctcccgccttccatgcgcgctcctcgggcctcgtggcctgcgtcggtccggtctccgcgctacgtgctgccggccgcctgctctcgggggcccaccccgcccttctacgccgcgtggcgcctcacgacgccgtcgctcgtcccgtggcgcgcccttcttcgctctcttcggcgcgccggcaccgcgccccccggccgccccgcgctgcgcccctgtcccgccgcgcgct

SEQ ID NO: 427353 - DNA, 963 bp, Homo sapiens
gccgagtgcgggctgagaaggcggtggctgcagcagcagcggcggcggaaaccctaaagtccgagtccggactacgagtgcgtggcctcctaatccggatcctagcctgcgtgccgggagaggactctgccttttttcacagcccgggtgtgcctgccctggagggaggctcttcagtgcggtagctatttgtttacatgcagatttttgtaataaaggctatttcctgataaaaaaaaaaaaaaaaaaaaaaaaaaaattttgtgggcggccgtcggcctgaaaaaagtttttaaacccttctgtttgggggcggggccccattgggtctagtaaaccactggcgccaaaagcgcggtagccacaagggcagacccgggatcagagcccatagggcttgggttctcccccaatataaaaaacgccgggcggaaaccaccgaggggttctaggaacacaactcccagattggcgagtcgggggccacatacgcggggtcttacacacaagaggtctccacggggaggccgatattaaaattaggcgcggccggggagggcgacaccaacggcgactcaagcaacacgcacacaagggagacaccccccacggcacaccgaataacatatacaatacagcaacgaccaaccgagaccaaaaatggcggcgagtaagaggaagcagcgaacggaacaaagaaaggaggaacgagagaaggaacgagaggagaggaagaagacacagagatagaacagaggaggcgggcgagcgaaaggaggagaggggagagaccagacgacaggcgccgagcaagcaggaacgaagtaggagcaccacagagcggcaccgaggtcaacgaatgtaggaacgaagcgaggacacagagcgaaaagacacagcaggagggaaaaagaagaggctgagagggaccgggccagaatcgaagacgtcagagacgcacat

SEQ ID NO: 427354 - DNA, 1516 bp, Homo sapiens
gccgagtgcgggctgagaaggcggtggctgcagcagcagcggcggcggaaaccctaaagtccgagtccggactacgagtgcgtggcctcctaatccggatcctagtcctgagcgtgtctgtgtgcgagtggacggtcccggacgcgatgaccctgaacggcggcggcagcggagcgggcgggagccgcggtgggggccaggagcgcgagcgccgtcggggcagcacaccctggggccccgccccgccgctgcaccgccgcagcatgccggtggacgagcgcgacctgcaggcggcgctgaccccgggtgccctgacggcggccgcggccgggacggggacccagggtcccaggctggactggcccgaggactccgaggactcgctcagctcagggggcagcgactcagacgagagcgtttacaaggtgctgctgctgggggcgcccggcgtgggcaagagcgccctggcgcgcatcttcggcggtgtggaggacgggcctgaagcagaggcagcagggcacacctatgatcgctccattgtagtggacggagaagaggcatcactcatggtctacgacatttgggagcaggacgggggccgctggttgcccggccactgcatggccatgggggatgcctatgtcattgtgtactcagtgacggacaagggcagcttcgagaaggcctcagaactgcgggtccagctgcggcgtgcacggcaaacagatgatgtgcccatcatcctcgtgggcaacaagagcgacctggtgcgctctcgtgaggtctcggtggatgagggccgggcctgcgcggtggtctttgactgcaagttcattgagacatcagcggcattgcaccacaatgtccaggcgctgtttgaaggtgtcgtgcgccagatacgcctgcgcagggacagcaaagaagccaacgcacgacggcaagcaggcacccggaggcgagagagccttggcaaaaaggcgaagcgcttcttgggccgcatcgtagctcgtaacagccgcaagatggcctttcgcgccaaatccaagtcctgccacgacctctcggttctctaggtcccacccgctcccactatggtgggagacgaacggaagggttggtgggctggcccagccaactgccccgggtgcctcagagcaggctcagactctgggtccctcggagctgccagccgggcacccccaacctcatggtcatggacagatagacagtgctgccctgcgaagtggctctcaggggccagtgagggctgggcccacagagatgcatgcgcaggctcatatgcgtcccaagcagccgcagcgcagccgccgggcaggcctgcgtgccgggagaggactctgccttttttcacagcccgggtgtgcctgccctggagggaggctcttcagtgcggtagctatttgtttacatgcagatttttgtaataaaggctatttcctgataaaaaaaagtcgacgcggccgcgaatttagtagtagtaggcggccgctctaga

SEQ ID NO: 427355 - DNA, 1317 bp, Homo sapiens
gccgagtgcgggctgagaaggcggtggctgcagcagcagcggcggcggaaaccctaaagtccgagtccggactacgagtgcgtggcctcctaatccggatcctagtcctgagcgtgtctgtgtgcgagtggacggtcccggacgcgatgaccctgaacggcggcggcagcggagcgggcgggagccgcggtgggggccaggagcgcgagcgccgtcggggcagcacaccctggggccccgccccgccgctgcaccgccgcagcatgccggtggacgagcgcgacctgcaggcggcgctgaccccgggtgccctgacggcggccgcggccgggacggggacccagggtcccaggctggactggcccgaggactccgaggactcgctcagctcagggggcagcgactcagacgagagcgtttacaaggtgctgctgctgggggcgcccggcgtgggcaagagcgccctggcgcgcatcttcggcggtgtggaggacgggcctgaagcagaggcagcagggcacacctatgatcgctccattgtagtggacggagaagaggcatcactcatggtctacgacatttgggagcaggacgggggccgctggttgcccggccactgcatggccatgggggatgcctatgtcattgtgtactcagtgacggacaagggcagcttcgagaaggcctcagaactgcgggtccagctgcggcgtgcacggcaaacagatgatgtgcccatcatcctcgtgggcaacaagagcgacctggtgcgctctcgtgaggtctcggtggatgagggccgggcctgcgcggtggtctttgactgcaagttcattgagacatcagcggcattgcaccacaatgtccaggcgctgtttgaaggtgtcgtgcgccagatacgcctgcgcagggacagcaaagaagccaacgcacgacggcaagcaggcacccggaggcgagagagccttggcaaaaaggcgaagcgcttcttgggccgcatcgtagctcgtaacagccgcaagatggcctttcgcgccaaatccaagtcctgccacgacctctcggttctctaggtcccacccgctcccactatggtgggagacgaacggaagggttggtggggggcccacagagatgcatgcgcaggctcatatgcgtcccaagcagccgcagcgcagccgccgggcaggcctgcgtgccgggagaggactctgccttttttcacagcccgggtgtgcctgccctggagggaggctcttcagtgcggtagctatttgtttacatgcagatttttgtaataaaggctatttcctgata

SEQ ID NO: 427356 - DNA, 1203 bp, Homo sapiens
gccgagtgcgggctgagaaggcggtggctgcagcagcagcggcggcggaaaccctaaagtccgagtccggactacgagtgcgtggcctcctaatccggatcctagtcctgagcgtgtctgtgtgcgagtggacggtcccggacgcgatgaccctgaacggcggcggcagcggagcgggcgggagccgcggtgggggccaggagcgcgagcgccgtcggggcagcacaccctggggccccgccccgccgctgcaccgccgcagcatgccggtggacgagcgcgacctgcaggcggcgctgaccccgggtgccctgacggcggccgcggccgggacggggacccagggtcccaggctggactggcccgaggactccgaggactcgctcagctcagggggcagcgactcagacgagagcgtttacaaggtgctgctgctgggggcgcccggcgtgggcaagagcgccctggcgcgcatcttcggcggtgtggaggacgggcctgaagcagaggcagcagggcacacctatgatcgctccattgtagtggacggagaagaggcatcactcatggtctacgacatttgggagcaggacgggggccgctggttgcccggccactgcatggccatgggggatgcctatgtcattgtgtactcagtgacggacaagggcagcttcgagaaggcctcagaactgcgggtccagctgcggcgtgcacggcaaacagatgatgtgcccatcatcctcgtgggcaacaagagcgacctggtgcgctctcgtgaggtctcggtggatgagggccgggcctgcgcggtggtctttgactgcaagttcattgagacatcagcggcattgcaccacaatgtccaggcgctgtttgaaggtgtcgtgcgccagatacgcctgcgcagggacagcaaagaagccaacgcacgacggccaacctcatggtcatggacagatagacagtgctgccctgcgaagtggctctcaggggccagtgagggctgggcccacagagatgcatgcgcaggctcatatgcgtcccaagcagccgcagcgcagccgccgggcaggcctgcgtgccgggagaggactctgccttttttcacagcccgggtgtgcctgccctggagggaggctcttcagtgcggtagctatttgtttacatgcagatttttgtaataaaggctatttcctgata

SEQ ID NO: 427357 - DNA, 1368 bp, Homo sapiens
gccgagtgcgggctgagaaggcggtggctgcagcagcagcggcggcggaaaccctaaagtccgagtccggactacgagtgcgtggcctcctaatccggatcctagtcctgagcgtgtctgtgtgcgagtggatcggtcccggacatcgatgtaccctgaacgtgcggcgagcagtcggacgtcgggcgtggcatgccgctggtggtgggcctaggacgcgctgaggcgctgtcggaggcgagcgacttcagacgatgatcgtctacatagggttgctgctgtctggtgggctgcccggcgttgtggcaagaagtctgccctggacgcgccatctttcgtgccgtgtgtggaggactgggtcctgtaagcctagacggctgactagtggctgcacctatgcatcgtctccatttgtacgtgggaccggaagacagaggcaatcactacatcgtgtctacgaacattttgtggaagcatggattggtgctgctcgcgtggtatgccccgtgccaagtagagttggccattggaggtgatcgccctatgtcattgtgtactcagtgacggacaagggcagcttcgagaaggcctcagaactgcgggtccagctgcggcgtgcacggcaaacagatgatgtgcccatcatcctcgtgggcaacaagagcgacctggtgcgctctcgtgaggtctcggtggatgagggccgggcctgcgcggtggtctttgactgcaagttcattgagacatcagcggcattgcaccacaatgtccaggcgctgtttgaaggtgtcgtgcgccagatacgcctgcgcagggacagcaaagaagccaacgcacgacggcaagcaggcacccggaggcgagagagccttggcaaaaaggcgaagcgcttcttgggccgcatcgtagctcgtaacagccgcaagatggcctttcgcgccaaatccaagtcctgccacgacctctcggttctctaggtcccacccgctcccactatggtgggagacgaacggaagggttggtgggctggcccagccaactgccccgggtgcctcagagcaggctcagactctgggtccctcggagctgccagccgggcacccccaacctcatggtcatggacagatagacagtgctgccctgcgaagtggctctcaggggccagtgagggctgggcccacagagatgcatgcgcaggctcatatgcgtcccaagcagccgcagcgcagccgccgggcaggcctgcgtgccgggagaggactctgccttttttcacagcccgggtgtgcctgccctggagggaggctcttcagtgcggtagctatttgtttacatgcagatttttgtaataaaggctatttcctgata

SEQ ID NO: 427358 - DNA, 1089 bp, Homo sapiens
gccgagtgcgggctgagaaggcggtggctgcagcagcagcggcggcggaaaccctaaagtccgagtccggactacgagtgcgtggcctcctaatccggatcctagtcctgagcgtgtctgtgtgcgagtggacggtcccggacgcgatgaccctgaacggcggcggcagcggagcgggcgggagccgcggtgggggccaggagcgcgagcgccgtcggggcagcacaccctggggccccgccccgccgctgcaccgccgcagcatgccggtggacgagcgcgacctgcaggcggcgctgaccccgggtgccctgacggcggccgcggccgggacggggacccagggtcccaggctggactggcccgaggactccgaggactcgctcagctcagggggcagcgactcagacgagagcgtttacaaggtgctgctgctgggggcgcccggcgtgggcaagagcgccctggcgcgcatcttcggcggtgtggaggacgggcctgaagcagaggcagcagggcacacctatgatcgctccattgtagtggacggagaagaggcatcactcatggtctacgacatttgggagcaggacgggggccgctggttgcccggccactgcatggccatgggggatgcctatgtcattgtgtactcagtgacggacaagggcagcttcgagaaggcctcagaactgcgggtccagctgcggcgtgcacggcaaacagatgatgtgcccatcatcctcgtgggcaacaagagcgacctggtgcgctctcgtgaggtctcggtggatgagggccgggcctgcgcggtggtctttgactgcaagttcattgagacatcagcggcattgcaccacaatgtccaggcgctgtttgaaggtgtcgtgcgccagatacgcctgcgcagggacagcaaagaagccaacgcacgacggcccgcagcgcagccgccgggcaggcctgcgtgccgggagaggactctgccttttttcacagcccgggtgtgcctgccctggagggaggctcttcagtgcggtagctatttgtttacatgcagatttttgtaataaaggctatttcctgata

SEQ ID NO: 427359 - DNA, 906 bp, Homo sapiens
gccgagtgcgggctgagaaggcggtggctgcagcagcagcggcggcggaaaccctaaagtccgagtccggactacgagtgcgtggcctcctaatccggatcctagtcctgagcgtgtctgtgtgcgagtggacggtcccggacgcgatgaccctgaacggcggcggcagcggagcgggcgggagccgcggtgggggccaggagcgcgagcgccgtcggggcagcacaccctggggccccgccccgccgctgcaccgccgcagcatgccggtggacgagcgcgacctgcaggcggcgctgaccccgggtgccctgacggcggccgcggccgggacggggacccagggtcccaggctggactggcccgaggactccgaggactcgctcagctcagggggcagcgactcagacgagagcgtttacaaggtgctgctgctgggggcgcccggcgtgggcaagagcgccatggcctttcgcgccaaatccaagtcctgccacgacctctcggttctctaggtcccacccgctcccactatggtgggagacgaacggaagggttggtgggctggcccagccaactgccccgggtgcctcagagcaggctcagactctgggtccctcggagctgccagccgggcacccccaacctcatggtcatggacagatagacagtgctgccctgcgaagtggctctcaggggccagtgagggctgggcccacagagatgcatgcgcaggctcatatgcgtcccaagcagccgcagcgcagccgccgggcaggcctgcgtgccgggagaggactctgccttttttcacagcccgggtgtgcctgccctggagggaggctcttcagtgcggtagctatttgtttacatgcagatttttgtaataaaggctatttcctgata

SEQ ID NO: 427360 - DNA, 830 bp, Homo sapiens
gccgagtgcgggctgagaaggcggtggctgcagcagcagcggcggcggaaaccctaaagtccgagtccggactacgagtgcgtggcctcctaatccggatcctagtcctgagcgtgtctgtgtgcgagtggacggtcccggacgcgatgaccctgaacggcggcggcagcggagcgggcgggagccgcggtgggggccaggagcgcgagcgccgtcggggcagcacaccctggggccccgccccgccgctgcaccgccgcagcatgccggtggacgagcgcgacctgcaggcggcgctgaccccgggtgccctgacggcggccgcggccgggacggggacccagggtcccaggctggactggcccgaggactccgaggactcgctcagctcagggggcagcgactcagacgagagcgtttacaaggtgctgctgctgggggcgcccggcgtgggcaagagcgccctggcgcgcatcttcggcggtgtggaggacgggcctgaagcagaggcagcagggcacacctatgatcgctccattgtagtggacggagaagaggcatcactccaacctcatggtcatggacagatagacagtgctgccctgcgaagtggctctcaggggccagtgagggctgggcccacagagatgcatgcgcaggctcatatgcgtcccaagcagccgcagcgcagccgccgggcaggcctgcgtgccgggagaggactctgccttttttcacagcccgggtgtgcctgccctggagggaggctcttcagtgcggtagctatttgtttacatgcagatttttgtaataaaggctatttcctgata

SEQ ID NO: 427361 - DNA, 868 bp, Homo sapiens
gccgagtgcgggctgagaaggcggtggctgcagcagcagcggcggcggaaaccctaaagtccgagtccggactacgagtgcgtggcctcctaatccggatcctagtcctgagcgtgtctgtgtgcgagtggacggtcccggacgcgatgaccctgaacggcggcggcagcggagcgggcgggagccgcggtgggggccaggagcgcgagcgccgtcggggcagcacaccctggggccccgccccgccgctgcaccgccgcagcatgccggtggacgagcgcgacctgcaggcggcgctgaccccgggtgccctgacggcggccgcggccgggacggggacccagggtcccaggctggactggcccgaggactccgaggactcgctcagctcagggggcagcgactcagacgagagcgtttacaaggtgctgctgctgggggcgcccggcgtgggcaagagcgccctggcgcgcatcttcggcggtgtggaggacgggcctgaagcagaggcagcagggcacacctatgatcgctccattgtagtggacggagaagaggcatcactcatggtctacgacatttgggagcaggacgggggccgctggttgcccggccactgcatggccatgggggatgcctatgtcattgtgtactcagtgacggacaagggcaggggcccacagagatgcatgcgcaggctcatatgcgtcccaagcagccgcagcgcagccgccgggcaggcctgcgtgccgggagaggactctgccttttttcacagcccgggtgtgcctgccctggagggaggctcttcagtgcggtagctatttgtttacatgcagatttttgtaataaaggctatttcctgata

SEQ ID NO: 427362 - DNA, 363 bp, Homo sapiens
gccgcagtgtgcctggattcgctggcccagccaactgccccgggtgcctcagagcaggctcagactctgggtccctcggagctgccagccgggcacccccaacctcatggtcatggacagatagacagtgctgccctgcgaagtggctctcaggggccagtgagggctgggcccacagagatgcatgcgcaggctcatatgcgtcccaagcagccgcagcgcagccgccgggcaggcctgcgtgccgggagaggactctgccttttttcacagcccgggtgtgcctgccctggagggaggctcttcagtgcggtagctatttgtttacatgcagatttttgtaataaaggctatttcctgata

SEQ ID NO: 427363 - DNA, 627 bp, Homo sapiens
gccgagtgcgggctgagaaggcggtggctgcagcagcagcggcggcggaaaccctaaagtccgagtccggactacgagtgcgtggcctcctaatccggatcctagtcctgagcgtgtctgtgtgcgagtggacggtcccggacgcgatgaccctgaacggcggcggcagcggagcgggcgggagccgcggtgggggccaggagcgcgagcgccgtcggggcagcacaccctggggccccgccccgccgctgcaccgccgcagcatgccggtggacgagcgcgacctgcaggcggcgctgaccccgggtgccctgacggcggccgcggccgggacggggacccagggtcccaggctggactggcccgaggactccgaggactcgctcagctcagggggcagcgactcagacgagagcgtttacaaggtgctgctgctgggggcgcccggcgtgggcaagagcgccctggcgcgcatcttcggcggtgtggaggacgggcctgaagcagaggcagcagggcacacctatgatcgctccattgtagtggacggagaagaggcatcactcccatgcagtgccgggcaaccagcggcccccgtcctgctcccaaatgtcgtagaccatgagt

SEQ ID NO: 427364 - DNA, 525 bp, Homo sapiens
aaaataaaatactaagttgtccaacatagttctcattttcctgtgtttactactgtcgtactttgtttaaatatcaggcttcaaattatttcaataaatggatctccttttgagggccactgttttgggggctccttaaatgcaggcactctgcctactgggtgacgcagcagtgcccagtaccctcagtacaggagctggggtctctgtgttttcggggaggaccttgcaaattctcgagtggcagcttccatgggtggccactgttggaggggactcctcattcacccaccctttgtttactggtgcctgcctttccccacccacacagggcccacagagatgcatgcgcaggctcatatgcgtcccaagcagccgcagcgcagccgccgggcaggcctgcgtgccgggagaggactctgccttttttcacagcccgggtgtgcctgccctggagggaggctcttcagtgcggtagctatttgtttacatgcagatttttgtaataaaggctatttcctgata

SEQ ID NO: 427365 - DNA, 1589 bp, Homo sapiens
gccgagtgcgggctgagaaggcggtggctgcagcagcagcggcggcggaaaccctaaagtccgagtccggactacgagtgcgtggcctcctaatccggatcctagtcctgagcgtgtctgtgtgcgagtggacggtcccggacgcgatgaccctgaacggcggcggcagcggagcgggcgggagccgcggtgggggccaggagcgcgagcgccgtcggggcagcacaccctggggccccgccccgccgctgcaccgccgcagcatgccggtggacgagcgcgacctgcaggcggcgctgaccccgggtgccctgacggcggccgcggccgggacggggacccagggtcccaggctggactggcccgaggactccgaggactcgctcagctcagggggcagcgactcagacgagagcgtttacaaggtgctgctgctgggggcgcccggcgtgggcaagagcgccctggcgcgcatcttcggcggtgtggaggacgggcctgaagcagaggcagcagggcacacctatgatcgctccattgtagtggacggagaagaggcatcactcatggtctacgacatttgggagcaggtagggtgcaagcagagacccagggcaggggagggaggagtgagttgggttagaggtctgggagtgccaggctcgtgtcgggggcatgaggactgttgggcagatgtgtgttgtgtgttctccaggacgggggccgctggttgcccggccactgcatggccatgggggatgcctatgtcattgtgtactcagtgacggacaagggcagcttcgagaaggcctcagaactgcgggtccagctgcggcgtgcacggcaaacagatgatgtgcccatcatcctcgtgggcaacaagagcgacctggtgcgctctcgtgaggtctcggtggatgagggccgggcctgcgcggtggtctttgactgcaagttcattgagacatcagcggcattgcaccacaatgtccaggcgctgtttgaaggtgtcgtgcgccagatacgcctgcgcagggacagcaaagaagccaacgcacgacggcaagcaggcacccggaggcgagagagccttggcaaaaaggcgaagcgcttcttgggccgcatcgtagctcgtaacagccgcaagatggcctttcgcgccaaatccaagtcctgccacgacctctcggttctctaggtcccacccgctcccactatggtgggagacgaacggaagggttggtgggctggcccagccaactgccccgggtgcctcagagcaggctcagactctgggtccctcggagctgccagccgggcacccccaacctcatggtcatggacagatagacagtgctgccctgcgaagtggctctcaggggccagtgagggctgggcccacagagatgcatgcgcaggctcatatgcgtcccaagcagccgcagcgcagccgccgggcaggcctgcgtgccgggagaggactctgccttttttcacagcccgggtgtgcctgccctggagggaggctcttcagtgcggtagctatttgtttacatgcagatttttgtaataaaggctatttcctgata

SEQ ID NO: 427366 - DNA, 5012 bp, Homo sapiens
cgcgcagcatgcccgccagcgccccgccgcgccgcccgcggccgccgccgccgtcgctgtcgctgctgctggtgctgctgggcctgggcggccgccgcctgcgtgcggagccgggcgacggcgcgcagacctgggcccgtgtctcgcggcctcctgcccccgaggccgcgggcctcttccagggcaccttccccgacggcttcctctgggccgtgggcagcgccgcctaccagaccgagggcggctggcagcagcacggcaagggtgcgtccatctgggacacgttcacccaccaccccctggcacccccgggagactcccggaacgccagtctgccgttgggcgccccgtcgccgctgcagcccgccaccggggacgtagccagcgacagctacaacaacgtcttccgcgacacggaggcgctgcgcgagctcggggtcactcactaccgcttctccatctcgtgggcgcgagtgctccccaatggcagcgcgggcgtccccaaccgcgaggggctgcgctactaccggcgcctgctggagcggctgcgggagctgggcgtgcagcccgtggtcaccctgtaccactgggacctgccccagcgcctgcaggacgcctacggcggctgggccaaccgcgccctggccgaccacttcagggattacgcggagctctgcttccgccacttcggcggtcaggtcaagtactggatcaccatcgacaacccctacgtggtggcctggcacggctacgccaccgggcgcctggcccccggcatccggggcagcccgcggctcgggtacctggtggcgcacaacctcctcctggctcatgccaaagtctggcatctctacaatacttctttccgtcccactcagggaggtcaggtgtccattgccctaagctctcactggatcaatcctcgaagaatgaccgaccacagcatcaaagaatgtcaaaaatctctggactttgtactaggttggtttgccaaacccgtatttattgatggtgactatcccgagagcatgaagaataacctttcatctattctgcctgattttactgaatctgagaaaaagttcatcaaaggaactgctgacttttttgctctttgctttggacccaccttgagttttcaacttttggaccctcacatgaagttccgccaattggaatctcccaacctgaggcaactgctttcctggattgaccttgaatttaaccatcctcaaatatttattgtggaaaatggctggtttgtctcagggaccaccaagagagatgatgccaaatatatgtattacctcaaaaagttcatcatggaaaccttaaaagccatcaagctggatggggtggatgtcatcgggtataccgcatggtccctcatggatggtttcgagtggcacagaggttacagcatcaggcgtggactcttctatgttgactttctaagccaggacaagatgttgttgccaaagtcttcagccttgttctaccaaaagctgatagagaaaaatggcttccctcctttacctgaaaatcagcccctagaagggacatttccctgtgactttgcttggggagttgttgacaactacattcaagtagataccactctgtctcagtttaccgacctgaatgtttacctgtgggatgtccaccacagtaaaaggcttattaaagtggatggggttgtgaccaagaagaggaaatcctactgtgttgactttgctgccatccagccccagatcgctttactccaggaaatgcacgttacacattttcgcttctccctggactgggccctgattctccctctgggtaaccagtcccaggtgaaccacaccatcctgcagtactatcgctgcatggccagcgagcttgtccgtgtcaacatcaccccagtggtggccctgtggcagcctatggccccgaaccaaggactgccgcgcctcctggccaggcagggcgcctgggagaacccctacactgccctggcctttgcagagtatgcccgactgtgctttcaagagctcggccatcacgtcaagctttggataacgatgaatgagccgtatacaaggaatatgacatacagtgctggccacaaccttctgaaggcccatgccctggcttggcatgtgtacaatgaaaagtttaggcatgctcagaatgggaaaatatccatagccttgcaggctgattggatagaacctgcctgccctttctcccaaaaggacaaagaggtggccgagagagttttggaatttgacattggctggctggctgagcccattttcggctctggagattatccatgggtgatgagggactggctgaaccaaagaaacaattttcttcttccttatttcactgaagatgaaaaaaagctaatccagggtacctttgactttttggctttaagccattataccaccatccttgtagactcagaaaaagaagatccaataaaatacaatgattacctagaagtgcaagaaatgaccgacatcacgtggctcaactcccccagtcaggtggcggtagtgccctgggggttgcgcaaagtgctgaactggctgaagttcaagtacggagacctccccatgtacataatatccaacggaatcgatgacgggctgcatgctgaggacgaccagctgagggtgtattatatgcagaattacataaacgaagctctcaaagcccacatactggatggtatcaatctttgcggatactttgcttattcgtttaacgaccgcacagctccgaggtttggcctctatcgttatgctgcagatcagtttgagcccaaggcatccatgaaacattacaggaaaattattgacagcaatggtttcccgggcccagaaactctggaaagattttgtccagaagaattcaccgtgtgtactgagtgcagtttttttcacacccgaaagtctttactggctttcatagcttttctattttttgcttctattatttctctctcccttatattttactactcgaagaaaggcagaagaagttacaaatagttctgaacatttttctattcattcattttgaaataattatgcagacacatcagctgttaaccatttgcacctctaagtgttgtgaaactgtaaatttcatacatttgacttctagaaaacatttttgtggcttatgacagaggttttgaaatgggcataggtgatcgtaaaatattgaataatgcgaatagtgcctgaatttgttctctttttgggtgattaaaaaactgacaggcactataatttctgtaacacactaacaaaagcatgaaaaataggaaccacaccaatgcaacatttgtgcagaaatttgaatgacaagattaggaatattttcttctgcacccacttctaaatttaatgtttttctggaagtagtaattgcaagagttcgaatagaaagttatgtaccaagtaaccatttctcagctgccataataatgcctagtggcttcccctctgtcaaatctagtttcctatggaaaagaagatggcagatacaggagagacgacagagggtcctaggctggaatgttcctttcgaaagcaatgcttctatcaaatactagtattaatttatgtatctggttaatgacatacttggagagcaaattatggaaatgtgtattttatatgatttttgaggtcctgtctaaaccctgtgtccctgagggatctgtctcactggcatcttgttgagggccttgcacataggaaacttttgataagtatctgcggaaaaacaaacatgaatcctgtgatattgggctcttcaggaagcataaagcaattgtgaaatacagtataccgcagtggctctaggtggaggaaaggaggaaaaagtgcttattatgtgcaacattatgattaatctgattatacaccatttttgagcagatcttggaatgaatgacatgacctttccctagagaataaggatgaaataatcactcattctatgaacagtgacactactttctattctttagctgtactgtaatttctttgagttgatagttttacaaattcttaataggttcaaaagcaatctggtctgaataacactggatttgtttctgtgatctctgaggtctattttatgtttttgctgctacttctgtggaagtagctttgaactagttttactttgaactttcacgctgaaacatgctagtgatatctagaaagggctaattaggtctcatcctttaatgccccttaaataagtcttgctgattttcagacagggaagtctctctattacactggagctgttttatagataagtcaatattgtatcaggcaagataaaccaatgtcataacaggcattgccaacctcactgacacagggtcatagtgtataataatatactgtactatataatatatcatctttagaggtatgattttttcatgaaagataagcttttggtaatattcattttaaagtggacttattaaaattggatgctagagaatcaagtttattttatgtatatatttttctgattataagagtaatatatgttcattgtaaaaatttttaaaacacagaaactatatgcaaagaaaaaataaaaattatctataatctcagaacccagaaatagccactattaacatttcctacgtattttattttacatagatcatattgtatatagttagtatctttattaatttttattatgaaactttcctttgtcattattagtcttcaaaagcatgatttttaatagttgttgagtattccaccacaggaatgtatcacaacttaaccgttcccgtttgttagactagtttcttattaatgttgatgaatgttgtttaaaaataattttgttgctacatttactttaatttccttgactgtaaagagaagtaattttgctccttgataaagtattatattaataataaatctgcctgcaactttttgccttctttcataatcataaaaaaa

SEQ ID NO: 427367 - DNA, 5054 bp, Homo sapiens
  misc_feature (4963)..(4963): n is a, c, g, or t
cgcgcagcatgcccgccagcgccccgccgcgccgcccgcggccgccgccgccgtcgctgtcgctgctgctggtgctgctgggcctgggcggccgccgcctgcgtgcggagccgggcgacggcgcgcagacctgggcccgtgtctcgcggcctcctgcccccgaggccgcgggcctcttccagggcaccttccccgacggcttcctctgggccgtgggcagcgccgcctaccagaccgagggcggctggcagcagcacggcaagggtgcgtccatctgggacacgttcacccaccaccccctggcacccccgggagactcccggaacgccagtctgccgttgggcgccccgtcgccgctgcagcccgccaccggggacgtagccagcgacagctacaacaacgtcttccgcgacacggaggcgctgcgcgagctcggggtcactcactaccgcttctccatctcgtgggcgcgagtgctccccaatggcagcgcgggcgtccccaaccgcgaggggctgcgctactaccggcgcctgctggagcggctgcgggagctgggcgtgcagcccgtggtcaccctgtaccactgggacctgccccagcgcctgcaggacgcctacggcggctgggccaaccgcgccctggccgaccacttcagggattacgcggagctctgcttccgccacttcggcggtcaggtcaagtactggatcaccatcgacaacccctacgtggtggcctggcacggctacgccaccgggcgcctggcccccggcatccggggcagcccgcggctcgggtacctggtggcgcacaacctcctcctggctcatgccaaagtctggcatctctacaatacttctttccgtcccactcagggaggtcaggtgtccattgccctaagctctcactggatcaatcctcgaagaatgaccgaccacagcatcaaagaatgtcaaaaatctctggactttgtactaggttggtttgccaaacccgtatttattgatggtgactatcccgagagcatgaagaataacctttcatctattctgcctgattttactgaatctgagaaaaagttcatcaaaggaactgctgacttttttgctctttgctttggacccaccttgagttttcaacttttggaccctcacatgaagttccgccaattggaatctcccaacctgaggcaactgctttcctggattgaccttgaatttaaccatcctcaaatatttattgtggaaaatggctggtttgtctcagggaccaccaagagagatgatgccaaatatatgtattacctcaaaaagttcatcatggaaaccttaaaagccatcaagctggatggggtggatgtcatcgggtataccgcatggtccctcatggatggtttcgagtggcacagaggttacagcatcaggcgtggactcttctatgttgactttctaagccaggacaagatgttgttgccaaagtcttcagccttgttctaccaaaagctgatagagaaaaatggcttccctcctttacctgaaaatcagcccctagaagggacatttccctgtgactttgcttggggagttgttgacaactacattcaagtagataccactctgtctcagtttaccgacctgaatgtttacctgtgggatgtccaccacagtaaaaggcttattaaagtggatggggttgtgaccaagaagaggaaatcctactgtgttgactttgctgccatccagccccagatcgctttactccaggaaatgcacgttacacattttcgcttctccctggactgggccctgattctccctctgggtaaccagtcccaggtgaaccacaccatcctgcagtactatcgctgcatggccagcgagcttgtccgtgtcaacatcaccccagtggtggccctgtggcagcctatggccccgaaccaaggactgccgcgcctcctggccaggcagggcgcctgggagaacccctacactgccctggcctttgcagagtatgcccgactgtgctttcaagagctcggccatcacgtcaagctttggataacgatgaatgagccgtatacaaggaatatgacatacagtgctggccacaaccttctgaaggcccatgccctggcttggcatgtgtacaatgaaaagtttaggcatgctcagaatgggaaaatatccatagccttgcaggctgattggatagaacctgcctgccctttctcccaaaaggacaaagaggtggccgagagagttttggaatttgacattggctggctggctgagcccattttcggctctggagattatccatgggtgatgagggactggctgaaccaaagaaacaattttcttcttccttatttcactgaagatgaaaaaaagctaatccagggtacctttgactttttggctttaagccattataccaccatccttgtagactcagaaaaagaagatccaataaaatacaatgattacctagaagtgcaagaaatgaccgacatcacgtggctcaactcccccagtcaggtggcggtagtgccctgggggttgcgcaaagtgctgaactggctgaagttcaagtacggagacctccccatgtacataatatccaacggaatcgatgacgggctgcatgctgaggacgaccagctgagggtgtattatatgcagaattacataaacgaagctctcaaagcccacatactggatggtatcaatctttgcggatactttgcttattcgtttaacgaccgcacagctccgaggtttggcctctatcgttatgctgcagatcagtttgagcccaaggcatccatgaaacattacaggaaaattattgacagcaatggtttcccgggcccagaaactctggaaagattttgtccagaagaattcaccgtgtgtactgagtgcagtttttttcacacccgaaagtctttactggctttcatagcttttctattttttgcttctattatttctctctcccttatattttactactcgaagaaaggcagaagaagttacaaatagttctgaacatttttctattcattcattttgaaataattatgcagacacatcagctgttaaccatttgcacctctaagtgttgtgaaactgtaaatttcatacatttgacttctagaaaacatttttgtggcttatgacagaggttttgaaatgggcataggtgatcgtaaaatattgaataatgcgaatagtgcctgaatttgttctctttttgggtgattaaaaaactgacaggcactataatttctgtaacacactaacaaaagcatgaaaaataggaaccacaccaatgcaacatttgtgcagaaatttgaatgacaagattaggaatattttcttctgcacccacttctaaatttaatgtttttctggaagtagtaattgcaagagttcgaatagaaagttatgtaccaagtaaccatttctcagctgccataataatgcctagtggcttcccctctgtcaaatctagtttcctatggaaaagaagatggcagatacaggagagacgacagagggtcctaggctggaatgttcctttcgaaagcaatgcttctatcaaatactagtattaatttatgtatctggttaatgacatacttggagagcaaattatggaaatgtgtattttatatgatttttgaggtcctgtctaaaccctgtgtccctgagggatctgtctcactggcatcttgttgagggccttgcacataggaaacttttgataagtatctgcggaaaaacaaacatgaatcctgtgatattgggctcttcaggaagcataaagcaattgtgaaatacagtataccgcagtggctctaggtggaggaaaggaggaaaaagtgcttattatgtgcaacattatgattaatctgattatacaccatttttgagcagatcttggaatgaatgacatgacctttccctagagaataaggatgaaataatcactcattctatgaacagtgacactactttctattctttagctgtactgtaatttctttgagttgatagttttacaaattcttaataggttcaaaagcaatctggtctgaataacactggatttgtttctgtgatctctgaggtctattttatgtttttgctgctacttctgtggaagtagctttgaactagttttactttgaactttcacgctgaaacatgctagtgatatctagaaagggctaattaggtctcatcctttaatgccccttaaataagtcttgctgattttcagacagggaagtctctctattacactggagctgttttatagataagtcaatattgtatcaggcaagataaaccaatgtcataacaggcattgccaacctcactgacacagggtcatagtgtataataatatactgtactatataatatatcatctttagaggtatgattttttcatgaaagataagcttttggtaatattcattttaaagtggacttattaaaattggatgctagagaatcaagtttattttatgtatatatttttctgattataagagtaatatatgttcattgtaaaaatttttaaaacacagaaactatatgcaaagaaaaaataaaaattatctataatctcagaacccagaaatagccactattaacatttcctacgtattttattttacatagatcatattgtatatagttagtatctttattaatttttattatgaaactttcctttgtcattattagtcttcaaaagcatgatttttaatagttgttgagtattccaccacaggaatgtatcacaacttaaccgttcccgtttgttagactagtttcttattaatgttgatgaatgttgtttaaaaataattttgttgctacatttactttaatttccttgactgtaaagagaagtaattttgctccttgataaagtattatattanagtttcataataaaaattaataaagatactaactatatacaatatgatctatgtaaaataagtcgacgcggccgcgaatttagtagtagta

SEQ ID NO: 427368 - DNA, 1447 bp, Homo sapiens
tttctttttctcttggagctgagctataagacaacaggactgaacagggagccaactgtttctttgaacagtaaatcaggaacaccaatggaccaaaatgaacacagtcactggggaccacatgcaaagggccaatgtgccagcagatctgagctgagaatcatcctggtgggcaaaacaggaactggcaaaagtgctgcagggaacagcatcctcaggaagcaagcatttgaatcgaagctgggttcccagaccttgactaagacttgcagcaaaagtcagggaagctggggaaatagagagattgtcattattgacacaccagatatgttttcttggaaggaccactgtgaagctctgtacaaagaggtgcagaggtgctacttgctgtctgcaccaggaccccatgtgctgctcctggtgactcagctgggccgctatacctcacaggaccagcaggctgcacagagggtgaaggagatctttggagaggatgccatgggacacacaattgtcctctttacccacaaggaagacctcaatggtggctccctgatggattacatgcacgactcagataacaaagccctaagcaagctggtggcagcatgtggtgggcgaatctgtgcctttaataaccgtgctgaagggagcaatcaggatgaccaagtgaaggaactaatggactgtattgaggatctgttgatggagaaaaatggtgatcactataccaatgggttgtacagcctaatacagaggtctaaatgtggacctgtgggatcagatgaaagagtaaaggaattcaaacagagccttataaagtacatggaaactcaaagaagttacacagccttggctgaagcaaactgcctaaaaggagccttaatcaaaacacaactgtgtgttttattttgtattcagttgtttctcagattgataattctgtggctttgcatactgcacagcatgtgcaatttgttttgttgcttactctttagtatgtgcaatttattctgcagtttgctgtttattatacccaaaaagttaatgatatttttgagaacagttattagactagaacgcaagactcctaggttatagttacagatcccagttattatttactcactatcatttagtgggtgaatcacagtaatttccctgtaaaatgtggtacctgaagtcatatttgagattctatgaaatgtttaaatctgaacatcactccaattattaatgaaccaaatcatacgataagttactgtttgcattgaaatataatatcaaagccttttgaaatctgtaaacataaaattcctctcattttcaaatatctaaagccagttttatgttcctaaaatctcattttcttctttctagtactactatttctactgaatataatgaaaatggcaataaaataatattacataaactgtaaaaaaaa

SEQ ID NO: 427369 - DNA, 1332 bp, Homo sapiens
tttctttttctcttggagctgagctataagacaacaggactgaacagggagccaactgtttctttgaacagtaaatcaggaacaccaatggaccaaaatgaacacagtcactggggaccacatgcaaagggccaatgtgccagcagatctgagctgagaatcatcctggtgggcaaaacaggaactggcaaaagtgctgcagggaacagcatcctcaggaagcaagcatttgaatcgaagctgggttcccagaccttgactaagacttgcagcaaaagtcagggaagctggggaaatagagagattgtcattattgacacaccagatatgttttcttggaaggaccactgtgaagctctgtacaaagaggtgcagaggtgctacttgctgtctgcaccaggaccccatgtgctgctcctggtgactcagctgggccgctatacctcacaggaccagcaggctgcacagagggtgaaggagatctttggagaggatgccatgggacacacaattgtcctctttacccacaaggaagacctcaatggtggctccctgatggattacatgcacgactcagataacaaagccctaagcaagctggtggcagcatgtggtgggcgaatctgtgcctttaataaccgtgctgaagggagcaatcaggatgaccaagtgaaggaactaatggactgtattgaggatctgttgatggagaaaaatggtgatcactataccaatgggttgtacagcctaatacagaggtctaaatgtggacctgtgggatcagatgaaagagtaaaggaattcaaacagagccttataaagtacatggaaactcaaagaagttacacagccttggctgaagcaaactgcctaaaaggagccttaatcaaaacacaactgtgtgttttattttgtattcagttgtttctcagattgataattctgtggctttgcatactgcacagcatgtgcaatttgttttgttgcttactctttagtatgtgcaatttattctgcagtttgctgtttattatacccaaaaagttaatgatatttttgagaacagttattagactagaacgcaagactcctaggttatagttacagatcccagttattatttactcactatcatttagtgggtgaatcacagtaatttccctgtaaaatgtggtacctgaagtcatatttgagattctatgaaatgtttaaatctgaacatcactccaattattaatgaaccaaatcatacgataagttactgtttgcattgaaatataatatcaaagccttttgaaatctgtaaacataaaattcctctcattttcaaat

SEQ ID NO: 427370 - DNA, 330 bp, Homo sapiens
tttctttttctcttggagctgagctataagacaacaggactgaacagggagccaactgtttctttgaacagtaaatcaggaacaccaatggaccaaaatgaacacagtcactggggcgagaggaaggttaaacgtgcaatttggctgcctctaagcaagctccagcgcggtgtatcaggagctgcttggctgctgttttcagaatatagaaatgtgtaatgtaatgcctgcttccttttaagtacaagtgtccattgcatgtctactgtgaggccataatttcactggcctacagaaaataagattaaatgtccataaattttggccaat

SEQ ID NO: 427371 - DNA, 480 bp, Homo sapiens
tttctttttctcttggagctgagctataagacaacaggactgaacagggagccaactgtttctttgaacagtaaatcaggaacaccaatggaccaaaatgaacacagtcactgggggaatctggaagctaaaccccagagttgctacaagagacattggctcctgtgagtccaggtggcttctataactgctcaagatgccatctccttgccctgggacctccctaggtgacagtttgcagtgttccatgaattgctgcatagacttccactaggtggaaggcccaacattgtccctctggcaagcgaagttttccattcttctgagtagactagtgtcccagtgaggcccatggcagtcctgtgagcccgagaggtcatttgaaccagctaagaacaagaccactggtgggcattgcagcacctaaccctaaatcatatcattgctaggaggagtaaattaggtaatgcaggtaaacca

SEQ ID NO: 427372 - DNA, 1565 bp, Homo sapiens
gcaatatcaccattcgtcatgacgctcgggcacaggaagataaatgaactgtggtccataggctgtactctactgagatctctgtgtcaatgagcatacgtgtcttgagcatcatcgacctagataagaggaacggcccggtgttcatctgaacgtttatagatcaaagataccacgcatgtgagatcatagaagtgtacactaccacgtgcgaatcgtagtcaaccagagtagctcacagaggcgcaacttgtgatatcagattatgaccctcgaaatcatcctggtgggcaaaacaggaactggcaaaagtgctgcagggaacagcatcctcaggaagcaagcatttgaatcgaagctgggttcccagaccttgactaagacttgcagcaaaagtcagggaagctggggaaatagagagattgtcattattgacacaccagatatgttttcttggaaggaccactgtgaagctctgtacaaagaggtgcagaggtgctacttgctgtctgcaccaggaccccatgtgctgctcctggtgactcagctgggccgctatacctcacaggaccagcaggctgcacagagggtgaaggagatctttggagaggatgccatgggacacacaattgtcctctttacccacaaggaagacctcaatggtggctccctgatggattacatgcacgactcagataacaaagccctaagcaagctggtggcagcatgtggtgggcgaatctgtgcctttaataaccgtgctgaagggagcaatcaggatgaccaagtgaaggaactaatggactgtattgaggatctgttgatggagaaaaatggtgatcactataccaatgggttgtacagcctaatacagaggtctaaatgtggacctgtgggatcagatgaaagagtaaaggaattcaaacagagccttataaagtacatggaaactcaaagaagttacacagccttggctgaagcaaactgcctaaaaggagccttaatcaaaacacaactgtgtgttttattttgtattcagttgtttctcagattgataattctgtggctttgcatactgcacagcatgtgcaatttgttttgttgcttactctttagtatgtgcaatttattctgcagtttgctgtttattatacccaaaaagttaatgatatttttgagaacagttattagactagaacgcaagactcctaggttatagttacagatcccagttattatttactcactatcatttagtgggtgaatcacagtaatttccctgtaaaatgtggtacctgaagtcatatttgagattctatgaaatgtttaaatctgaacatcactccaattattaatgaaccaaatcatacgataagttactgtttgcattgaaatataatatcaaagccttttgaaatctgtaaacataaaattcctctcattttcaaatatctaaagccagttttatgttcctaaaatctcattttcttctttctagtactactatttctactgaatataatgaaaatggcaataaaataatattacataaactgtaaaaaaaa

SEQ ID NO: 427373 - DNA, 303 bp, Homo sapiens
gaactgaaaaataagtttcttgtctctctgtttctcaggaacaccaatggaccaaaatgaacacagtcactggggtaagaaggtgacttcacgtgtgtgtgtgtgtgtgtgtgtgtgtgtgtgtgtgtgtgtgtgtgtgtgtttggctcttctgatgatgttggggcaaaataaacaagggtgaaggatcttattctaactcccacagctaccaccaccagcagctgaaaattgtggggttttgttttctttgtttgtttgtttgtttgtttgttttgagacagtgtctctctctgtcaccca

SEQ ID NO: 427374 - DNA, 1356 bp, Homo sapiens
gcggccgcggcagggctgggcctgcgactacccgaggaggctgacctccagcccgggcgcccggttcagcgccgccccggccggcgccggtgcctgccaggcactcagggaggcgggggcgcagtggaggaggcggcgccatcgcgaagcgagcgcctcgcccgcactcagccttgccaccccgcccgcagtccaggctggactgggcggcatttgccgaggctcctcggccaggccccgtccgcccgagccgcgctgagacccgggcagcggccgcgtggagaggaggtggcagcggcccgggaggccggagccaagccagcgacccaccatggagacccgctacaacctgaagagtccggctgttaaacgtttaatgaaagaagcggcagaattgaaagatccaacagatcattaccatgcgcagcctttagaggataacctttttgaatggcacttcacggttagagggcccccagactccgattttgatggaggagtttatcacgggcggatagtactgccaccagagtatcccatgaaaccaccaagcattattctcctaacggctaatggtcgatttgaagtgggcaagaaaatctgtttgagcatctcaggccatcatcctgaaacttggcagccttcgtggagtataaggacagcattattagccatcattgggtttatgccaacaaaaggagagggagccataggttctctagattacactcctgaggaaagaagagcacttgccaaaaaatcacaagatttctgttgtgaaggatgtggctctgccatgaaggatgtcctgttgcctttaaaatctggaagcgattcaagccaagctgaccaagaagccaaagaactggctaggcaaataagctttaaggcagaagtcaattcatctggaaagactatctctgagtcagacttaaaccactctttttcactaactgatttacaagatgatatacctacaacattccagggtgctacggccagtacatcgtacggactccagaattcctcagcagcatcctttcatcaacctacccaacctgtagctaagaatacctccatgagccctcgacagcgccgggcccagcagcagagtcagagaaggttgtctacttcaccagatgtaatccagggccaccagccaagagacaaccacactgatcatggtgggtcagctgtactgattgtcatcctgactttggcattggcagctcttatattccgacgaatatatctggcaaacgaatacatatttgactttgagttataatatggttttgtgacttatgagctgtgactcaactgcttcattaaacattctgcattgggtataatcta

SEQ ID NO: 427375 - DNA, 4517 bp, Homo sapiens
gcggccgcggcagggctgggcctgcgactacccgaggaggctgacctccagcccgggcgcccggttcagcgccgccccggccggcgccggtgcctgccaggcactcagggaggcgggggcgcagtggaggaggcggcgccatcgcgaagcgagcgcctcgcccgcactcagccttgccaccccgcccgcagtccaggctggactgggcggcatttgccgaggctcctcggccaggccccgtccgcccgagccgcgctgagacccgggcagcggccgcgtggagaggaggtggcagcggcccgggaggccggagccaagccagcgacccaccatggagacccgctacaacctgaagagtccggctgttaaacgtttaatgaaagaagcggcagaattgaaagatccaacagatcattaccatgcgcagcctttagaggataacctttttgaatggcacttcacggttagagggcccccagactccgattttgatggaggagtttatcacgggcggatagtactgccaccagagtatcccatgaaaccaccaagcattattctcctaacggctaatggtcgatttgaagtgggcaagaaaatctgtttgagcatctcaggccatcatcctgaaacttggcagccttcgtggagtataaggacagcattattagccatcattgggtttatgccaacaaaaggagagggagccataggttctctagattacactcctgaggaaagaagagcacttgccaaaaaatcacaagatttctgttgtgaaggatgtggctctgccatgaaggatgtcctgttgcctttaaaatctggaagcgattcaagccaagctgaccaagaagccaaagaactggctaggcaaataagctttaaggcagaagtcaattcatctggaaagactatctctgagtcagacttaaaccactctttttcactaactgatttacaagatgatatacctacaacattccagggtgctacggccagtacatcgtacggactccagaattcctcagcagcatcctttcatcaacctacccaacctgtagctaagaatacctccatgagccctcgacagcgccgggcccagcagcagagtcagagaaggttgtctacttcaccagatgtaatccagggccaccagccaagagacaaccacactgatcatggtgggtcagctgtactgattgtcatcctgactttggcattggcagctcttatattccgacgaatatatctggcaaacgaatacatatttgactttgagttataatatggttttgtgacttatgagctgtgactcaactgcttcattaaacattctgcattgggtataatctaagaattgtttacaaaaagattattttgtatttacccttcattcctttttttgatccttgtaagtttagtataaatatatctagacattcagactgtgtctagcagttacgtcctgcttaaagggactagaagtcaaagttccttgtctcactatttgatctgctttgcagggaaataacttgttttttctcatgtttcatcttctttttatgtaaatttgtaatactttcctatattgccctttgaaatttttggataaaagatgatgttttaagttccaatgagtattactagttactcaataccacttattgagtactctgtttctacgtatgtagaatgtatagggatagaagagttgaaaagggaaagcaaaactcctcaagtagcttccttaaaatgtcattcataggagatgtactggaattgctcattctgtgactttatttgtgtcctaaacattcttcagtgaaaataattttatttcagtcaaacatttatgaggaaatgagatcacatctttgtcactggatgctacttgaagagggagtactttgtaaccactttgatatgctgttatcaccaccccctgccctctgctgccataatcacacaaatttaaaaagaaagaaaacagtcttccatagatttttaaggaagaaagggcccaagccaggagatcgcttggttttcttccagaagttaaatggggggatctgaagatttgaatgtttggtctgctttgaaatgtatgtcttttgggatgtattatatgcctagctttataatcagtataaattttaattattccaggaatatgcataatattgaaatatttcatgtcctattttaatagaaaacctcagggcccaagtaacagtgatagaagttagaaaaacctttacttagaattgtccacctagtcagagcccaagaaagaattttcagtggaaaaatcaatatataacttagtgctagctagcgccacagactctagtagataatattatcatcataatggctggtgaaaccatataatcacagaaaaacattgccttcagcatgttcagttcgcagcactgagggcactcttgagggtgttgttaatgaagatttaatttttaaatacaggtggttccaagctttcaaataggttatgctccaaaagtgttatttgtaagttaatttttttacaagtcaaacaatgttggaagtggtatttaggttctagatcggtccacgaaagttagcccatatgtatatcttgaatagtataggggagggtattcataaagtccttatgtggttttaactaagtgaaattatggacaagagaaataattgtaaaatcgtcttaaaggaaaatttaatttttactcctgtttatgggacattcgttctattaactgtcagacacaatttctgttttcatctgagagccagttttcctttatttctacatctaaaataagaacatattgtacactattatataatacagaattgtcttaaactttaataaattcgcattttaaaggtgtttacagattattttttatatctgtagctgaatttgttaaagtctaaaaagctcaaggactttatgaagatctcattatatgaggaaaatcataggttaccattttataactctattgccataagaaaatacactctaaaatcttgatttgaaacatattagaaaccttgattcagtgctcagtggtctcctagtaagaagtcaccgacggtagcgtcatatgagaagaaagaaatccccaccacctcaacctctgctgagattgtgtgctaggaacagccttccctccgtttcccctcagtcaaacttgagccagcctctggatcgatgtgatcttattgcatgtttccatggggtgtacctatactttaagccaatcctgctgcattcactgctaagttaaataaaaagccaagaagattttgcactgtgcagatcctttgctatctgacttgcatctcttcccccacctgtcagctagccacctgcttgtttgtgttgggatattttttagcacctgaagcaccatctgaaaggggcaccattttcttcttccctttgatctcacatatgctccctaaaaatccttaagttgtcaatctgatccccagtgtgaggttaatgagcaaaattggtctttggggccctttttgtccaagccccactgaaaggcctcttcagaaaactattatctttaaagccctactttaactccttaattccagcatacagctaaaactggatgtatattctggcaagtaaaggctgaggactcctctttaatcctcagatctagataactcatgacattttatttgaccaacatagcacatgatgagatatcaaggtaattaaaatagcatgcttgaaaaaaaaatacgtaatctgtttcacctgtaactgtttaagccaataaacttttcaaaatttatgtaatgtggggcttttatgtagcactttacgttttcatgctgcttattgttttattctactgaaaaaaatgaatttcaagattctcaacttttttaatttcaaaaattgtttattgttttgactataggaatacaaaatttcctattttgggagaataagaactctttttgtcatttttggctatgaataaactttctggtcttttgagaccacccatttttatagatcagaatcagaaaacaggtaaacctcactcacacatttggactcatttgaacaaaaatctaggccaaaatactgaaaagcctatgtgtttttttaattggaagtatatgtaaggttaatgcatttagtgaacgtgactaacaaagactaatgtgcacattaacagatgtactttttaaggttttatgggaggctgtgcattgctcaaaagctgttgggaacgccttctgaacagttgccttcagaactagtttgagctgctcaataaaaccagtgactttactcataccttgtttttgaccaaaggttgtattctttacatcatccagtcttgtctctcatccattctacctcctagaatatttctctctcatctttccacttccctaactaggcactatatcctatttagctattaactcctccaaattggtgcacacgaataacctcctaacaggtctct

SEQ ID NO: 427376 - DNA, 3827 bp, Homo sapiens
gcggccgcggcagggctgggcctgcgactacccgaggaggctgacctccagcccgggcgcccggttcagcgccgccccggccggcgccggtgcctgccaggcactcagggaggcgggggcgcagtggaggaggcggcgccatcgcgaagcgagcgcctcgcccgcactcagccttgccaccccgcccgcagtccaggctggactgggcggcatttgccgaggctcctcggccaggccccgtccgcccgagccgcgctgagacccgggcagcggccgcgtggagaggaggtggcagcggcccgggaggccggagccaagccagcgacccaccatggagacccgctacaacctgaagagtccggctgttaaacgtttaatgaaagaagcggcagaattgaaagatccaacagatcattaccatgcgcagcctttagaggataacctttttgaatggcacttcacggttagagggcccccagactccgattttgatggaggagtttatcacgggcggatagtactgccaccagagtatcccatgaaaccaccaagcattattctcctaacggctaatggtcgatttgaagtgggcaagaaaatctgtttgagcatctcaggccatcatcctgaaacttggcagccttcgtggagtataaggacagcattattagccatcattgggtttatgccaacaaaaggagagggagccataggttctctagattacactcctgaggaaagaagagcacttgccaaaaaatcacaagatttctgttgtgaaggatgtggctctgccatgaaggatgtcctgttgcctttaaaatctggaagcgattcaagccaagctgaccaagaagccaaagaactggctaggcaaataagctttaaggcagaagtcaattcatctggaaagactatctctgagtcagacttaaaccactctttttcactaactgatttacaagatgatatacctacaacattccagggtgctacggccagtacatcgtacggactccagaattcctcagcagcatcctttcatcaacctacccaacctgtagctaagaatacctccatgagccctcgacagcgccgggcccagcagcagagtcagagaaggttgtctacttcaccagatgtaatccagggccaccagccaagagacaaccacactgatcatggtgggtcagctgtactgattgtcatcctgactttggcattggcagctcttatattccgacgaatatatctggcaaacgaatacatatttgactttgagttataatatggttttgtgacttatgagctgtgactcaactgcttcattaaacattctgcattgggtataatctaagaattgtttacaaaaagattattttgtatttacccttcattcctttttttgatccttgtaagtttagtataaatatatctagacattcagactgtgtctagcagttacgtcctgcttaaagggactagaagtcaaagttccttgtctcactatttgatctgctttgcagggaaataacttgttttttctcatgtttcatcttctttttatgtaaatttgtaatactttcctatattgccctttgaaatttttggataaaagatgatgttttaagttccaatgagtattactagttactcaataccacttattgagtactctgtttctacgtatgtagaatgtatagggatagaagagttgaaaagggaaagcaaaactcctcaagtagcttccttaaaatgtcattcataggagatgtactggaattgctcattctgtgactttatttgtgtcctaaacattcttcagtgaaaataattttatttcagtcaaacatttatgaggaaatgagatcacatctttgtcactggatgctacttgaagagggagtactttgtaaccactttgatatgctgttatcaccaccccctgccctctgctgccataatcacacaaatttaaaaagaaagaaaacagtcttccatagatttttaaggaagaaagggcccaagccaggagatcgcttggttttcttccagaagttaaatggggggatctgaagatttgaatgtttggtctgctttgaaatgtatgtcttttgggatgtattatatgcctagctttataatcagtataaattttaattattccaggaatatgcataatattgaaatatttcatgtcctattttaatagaaaacctcagggcccaagtaacagtgatagaagttagaaaaacctttacttagaattgtccacctagtcagagcccaagaaagaattttcagtggaaaaatcaatatataacttagtgctagctagcgccacagactctagtagataatattatcatcataatggctggtgaaaccatataatcacagaaaaacattgccttcagcatgttcagttcgcagcactgagggcactcttgagggtgttgttaatgaagatttaatttttaaatacaggtggttccaagctttcaaataggttatgctccaaaagtgttatttgtaagttaatttttttacaagtcaaacaatgttggaagtggtatttaggttctagatcggtccacgaaagttagcccatatgtatatcttgaatagtataggggagggtattcataaagtccttatgtggttttaactaagtgaaattatggacaagagaaataattgtaaaatcgtcttaaaggaaaatttaatttttactcctgtttatgggacattcgttctattaactgtcagacacaatttctgttttcatctgagagccagttttcctttatttctacatctaaaataagaacatattgtacactattatataatacagaattgtcttaaactttaataaattcgcattttaaaggtgtttacagattattttttatatctgtagctgaatttgttaaagtctaaaaagctcaaggactttatgaagatctcattatatgaggaaaatcataggttaccattttataactctattgccataagaaaatacactctaaaatcttgatttgaaacatattagaaaccttgattcagtgctcagtggtctcctagtaagaagtcaccgacggtagcgtcatatgagaagaaagaaatccccaccacctcaacctctgctgagattgtgtgctaggaacagccttccctccgtttcccctcagtcaaacttgagccagcctctggatcgatgtgatcttattgcatgtttccatggggtgtacctatactttaagccaatcctgctgcattcactgctaagttaaataaaaagccaagaagattttgcactgtgcagatcctttgctatctgacttgcatctcttcccccacctgtcagctagccacctgcttgtttgtgttgggatattttttagcacctgaagcaccatctgaaaggggcaccattttcttcttccctttgatctcacatatgctccctaaaaatccttaagttgtcaatctgatccccagtgtgaggttaatgagcaaaattggtctttggggccctttttgtccaagccccactgaaaggcctcttcagaaaactattatctttaaagccctactttaactccttaattccagcatacagctaaaactggatgtatattctggcaagtaaaggctgaggactcctctttaatcctcagatctagataactcatgacattttatttgaccaacatagcacatgatgagatatcaaggtaattaaaatagcatgcttgaaaaaaaaatacgtaatctgtttcacctgtaactgtttaagccaataaacttttcaaaattta

SEQ ID NO: 427377 - DNA, 2896 bp, Homo sapiens
gcggccgcggcagggctgggcctgcgactacccgaggaggctgacctccagcccgggcgcccggttcagcgccgccccggccggcgccggtgcctgccaggcactcagggaggcgggggcgcagtggaggaggcggcgccatcgcgaagcgagcgcctcgcccgcactcagccttgccaccccgcccgcagtccaggctggactgggcggcatttgccgaggctcctcggccaggccccgtccgcccgagccgcgctgagacccgggcagcggccgcgtggagaggaggtggcagcggcccgggaggccggagccaagccagcgacccaccatggagacccgctacaacctgaagagtccggctgttaaacgtttaatgaaagaagcggcagaattgaaagatccaacagatcattaccatgcgcagcctttagaggataacctttttgaatggcacttcacggttagagggcccccagactccgattttgatggaggagtttatcacgggcggatagtactgccaccagagtatcccatgaaaccaccaagcattattctcctaacggctaatggtcgatttgaagtgggcaagaaaatctgtttgagcatctcaggccatcatcctgaaacttggcagccttcgtggagtataaggacagcattattagccatcattgggtttatgccaacaaaaggagagggagccataggttctctagattacactcctgaggaaagaagagcacttgccaaaaaatcacaagatttctgttgtgaaggatgtggctctgccatgaaggatgtcctgttgcctttaaaatctggaagcgattcaagccaagctgaccaagaagccaaagaactggctaggcaaataagctttaaggcagaagtcaattcatctggaaagactatctctgagtcagacttaaaccactctttttcactaactgatttacaagatgatatacctacaacattccagggtgctacggccagtacatcgtacggactccagaattcctcagcagcatcctttcatcaacctacccaacctgtagctaagaatacctccatgagccctcgacagcgccgggcccagcagcagagtcagagaaggttgtctacttcaccagatgtaatccagggccaccagccaagagacaaccacactgatcatggtgggtcagctgtactgattgtcatcctgactttggcattggcagctcttatattccgacgaatatatctggcaaacgaatacatatttgactttgagttataatatggttttgtgacttatgagctgtgactcaactgcttcattaaacattctgcattgggtataatctaagaattgtttacaaaaagattattttgtatttacccttcattcctttttttgatccttgtaagtttagtataaatatatctagacattcagactgtgtctagcagttacgtcctgcttaaagggactagaagtcaaagttccttgtctcactatttgatctgctttgcagggaaataacttgttttttctcatgtttcatcttctttttatgtaaatttgtaatactttcctatattgccctttgaaatttttggataaaagatgatgttttaagttccaatgagtattactagttactcaataccacttattgagtactctgtttctacgtatgtagaatgtatagggatagaagagttgaaaagggaaagcaaaactcctcaagtagcttccttaaaatgtcattcataggagatgtactggaattgctcattctgtgactttatttgtgtcctaaacattcttcagtgaaaataattttatttcagtcaaacatttatgaggaaatgagatcacatctttgtcactggatgctacttgaagagggagtactttgtaaccactttgatatgctgttatcaccaccccctgccctctgctgccataatcacacaaatttaaaaagaaagaaaacagtcttccatagatttttaaggaagaaagggcccaagccaggagatcgcttggttttcttccagaagttaaatggggggatctgaagatttgaatgtttggtctgctttgaaatgtatgtcttttgggatgtattatatgcctagctttataatcagtataaattttaattattccaggaatatgcataatattgaaatatttcatgtcctattttaatagaaaacctcagggcccaagtaacagtgatagaagttagaaaaacctttacttagaattgtccacctagtcagagcccaagaaagaattttcagtggaaaaatcaatatataacttagtgctagctagcgccacagactctagtagataatattatcatcataatggctggtgaaaccatataatcacagaaaaacattgccttcagcatgttcagttcgcagcactgagggcactcttgagggtgttgttaatgaagatttaatttttaaatacaggtggttccaagctttcaaataggttatgctccaaaagtgttatttgtaagttaatttttttacaagtcaaacaatgttggaagtggtatttaggttctagatcggtccacgaaagttagcccatatgtatatcttgaatagtataggggagggtattcataaagtccttatgtggttttaactaagtgaaattatggacaagagaaataattgtaaaatcgtcttaaaggaaaatttaatttttactcctgtttatgggacattcgttctattaactgtcagacacaatttctgttttcatctgagagccagttttcctttatttctacatctaaaataagaacatattgtacactattatataatacagaattgtcttaaactttaataaattcgcattttaaaggtg

SEQ ID NO: 427378 - DNA, 4436 bp, Homo sapiens
gcggccgcggcagggctgggcctgcgactacccgaggaggctgacctccagcccgggcgcccggttcagcgccgccccggccggcgccggtgcctgccaggcactcagggaggcgggggcgcagtggaggaggcggcgccatcgcgaagcgagcgcctcgcccgcactcagccttgccaccccgggcagcggccgcgtggagaggaggtggcagcggcccgggaggccggagccaagccagcgacccaccatggagacccgctacaacctgaagagtccggctgttaaacgtttaatgaaagaagcggcagaattgaaagatccaacagatcattaccatgcgcagcctttagaggataacctttttgaatggcacttcacggttagagggcccccagactccgattttgatggaggagtttatcacgggcggatagtactgccaccagagtatcccatgaaaccaccaagcattattctcctaacggctaatggtcgatttgaagtgggcaagaaaatctgtttgagcatctcaggccatcatcctgaaacttggcagccttcgtggagtataaggacagcattattagccatcattgggtttatgccaacaaaaggagagggagccataggttctctagattacactcctgaggaaagaagagcacttgccaaaaaatcacaagatttctgttgtgaaggatgtggctctgccatgaaggatgtcctgttgcctttaaaatctggaagcgattcaagccaagctgaccaagaagccaaagaactggctaggcaaataagctttaaggcagaagtcaattcatctggaaagactatctctgagtcagacttaaaccactctttttcactaactgatttacaagatgatatacctacaacattccagggtgctacggccagtacatcgtacggactccagaattcctcagcagcatcctttcatcaacctacccaacctgtagctaagaatacctccatgagccctcgacagcgccgggcccagcagcagagtcagagaaggttgtctacttcaccagatgtaatccagggccaccagccaagagacaaccacactgatcatggtgggtcagctgtactgattgtcatcctgactttggcattggcagctcttatattccgacgaatatatctggcaaacgaatacatatttgactttgagttataatatggttttgtgacttatgagctgtgactcaactgcttcattaaacattctgcattgggtataatctaagaattgtttacaaaaagattattttgtatttacccttcattcctttttttgatccttgtaagtttagtataaatatatctagacattcagactgtgtctagcagttacgtcctgcttaaagggactagaagtcaaagttccttgtctcactatttgatctgctttgcagggaaataacttgttttttctcatgtttcatcttctttttatgtaaatttgtaatactttcctatattgccctttgaaatttttggataaaagatgatgttttaagttccaatgagtattactagttactcaataccacttattgagtactctgtttctacgtatgtagaatgtatagggatagaagagttgaaaagggaaagcaaaactcctcaagtagcttccttaaaatgtcattcataggagatgtactggaattgctcattctgtgactttatttgtgtcctaaacattcttcagtgaaaataattttatttcagtcaaacatttatgaggaaatgagatcacatctttgtcactggatgctacttgaagagggagtactttgtaaccactttgatatgctgttatcaccaccccctgccctctgctgccataatcacacaaatttaaaaagaaagaaaacagtcttccatagatttttaaggaagaaagggcccaagccaggagatcgcttggttttcttccagaagttaaatggggggatctgaagatttgaatgtttggtctgctttgaaatgtatgtcttttgggatgtattatatgcctagctttataatcagtataaattttaattattccaggaatatgcataatattgaaatatttcatgtcctattttaatagaaaacctcagggcccaagtaacagtgatagaagttagaaaaacctttacttagaattgtccacctagtcagagcccaagaaagaattttcagtggaaaaatcaatatataacttagtgctagctagcgccacagactctagtagataatattatcatcataatggctggtgaaaccatataatcacagaaaaacattgccttcagcatgttcagttcgcagcactgagggcactcttgagggtgttgttaatgaagatttaatttttaaatacaggtggttccaagctttcaaataggttatgctccaaaagtgttatttgtaagttaatttttttacaagtcaaacaatgttggaagtggtatttaggttctagatcggtccacgaaagttagcccatatgtatatcttgaatagtataggggagggtattcataaagtccttatgtggttttaactaagtgaaattatggacaagagaaataattgtaaaatcgtcttaaaggaaaatttaatttttactcctgtttatgggacattcgttctattaactgtcagacacaatttctgttttcatctgagagccagttttcctttatttctacatctaaaataagaacatattgtacactattatataatacagaattgtcttaaactttaataaattcgcattttaaaggtgtttacagattattttttatatctgtagctgaatttgttaaagtctaaaaagctcaaggactttatgaagatctcattatatgaggaaaatcataggttaccattttataactctattgccataagaaaatacactctaaaatcttgatttgaaacatattagaaaccttgattcagtgctcagtggtctcctagtaagaagtcaccgacggtagcgtcatatgagaagaaagaaatccccaccacctcaacctctgctgagattgtgtgctaggaacagccttccctccgtttcccctcagtcaaacttgagccagcctctggatcgatgtgatcttattgcatgtttccatggggtgtacctatactttaagccaatcctgctgcattcactgctaagttaaataaaaagccaagaagattttgcactgtgcagatcctttgctatctgacttgcatctcttcccccacctgtcagctagccacctgcttgtttgtgttgggatattttttagcacctgaagcaccatctgaaaggggcaccattttcttcttccctttgatctcacatatgctccctaaaaatccttaagttgtcaatctgatccccagtgtgaggttaatgagcaaaattggtctttggggccctttttgtccaagccccactgaaaggcctcttcagaaaactattatctttaaagccctactttaactccttaattccagcatacagctaaaactggatgtatattctggcaagtaaaggctgaggactcctctttaatcctcagatctagataactcatgacattttatttgaccaacatagcacatgatgagatatcaaggtaattaaaatagcatgcttgaaaaaaaaatacgtaatctgtttcacctgtaactgtttaagccaataaacttttcaaaatttatgtaatgtggggcttttatgtagcactttacgttttcatgctgcttattgttttattctactgaaaaaaatgaatttcaagattctcaacttttttaatttcaaaaattgtttattgttttgactataggaatacaaaatttcctattttgggagaataagaactctttttgtcatttttggctatgaataaactttctggtcttttgagaccacccatttttatagatcagaatcagaaaacaggtaaacctcactcacacatttggactcatttgaacaaaaatctaggccaaaatactgaaaagcctatgtgtttttttaattggaagtatatgtaaggttaatgcatttagtgaacgtgactaacaaagactaatgtgcacattaacagatgtactttttaaggttttatgggaggctgtgcattgctcaaaagctgttgggaacgccttctgaacagttgccttcagaactagtttgagctgctcaataaaaccagtgactttactcataccttgtttttgaccaaaggttgtattctttacatcatccagtcttgtctctcatccattctacctcctagaatatttctctctcatctttccacttccctaactaggcactatatcctatttagctattaactcctccaaattggtgcacacgaataacctcctaacaggtctct

SEQ ID NO: 427379 - DNA, 4547 bp, Homo sapiens
gcggccgcggcagggctgggcctgcgactacccgaggaggctgacctccagcccgggcgcccggttcagcgccgccccggccggcgccggtgcctgccaggcactcagggaggcgggggcgcagtggaggaggcggcgccatcgcgaagcgagcgcctcgcccgcactcagccttgccaccccgcccgcagtccaggctggactgggcggcatttgccgaggctcctcggccaggccccgtccgcccgagccgcgctgagacccgggcagcggccgcgtggagaggaggtggcagcggcccgggaggccggagccaagccagcgacccaccatggagacccgctacaacctgaagagtccggctgttaaacgtttaatgaaagaagcggcagaattgaaagatccaacagatcattaccatgcgcagcctttagaggataacctttttgaatggcacttcacggttagagggcccccagactccgattttgatggaggagtttatcacgggcggatagtactgccaccagagtatcccatgaaaccaccaagcattattctcctaacggctaatggtcgatttgaagtgggcaagaaaatctgtttgagcatctcaggccatcatcctgaaacttggcagccttcgtggagtataaggacagcattattagccatcattgggtttatgccaacaaaaggagagggagccataggttctctagattacactcctgaggaaagaagagcacttgccaaaaaatcacaagatttctgttgtgaaggatgtggctctgccatgaaggatgtcctgttgcctttaaaatctggaagcgattcaagccaagctgaccaagaagccaaagaactggctaggcaaataagctttaaggcagaagtcaattcatctggaaagactatctctgagtcagacttaaaccactctttttcactaactgatttacaagatgatatacctacaacattccagggtgctacggccagtacatcgtttcaaacaaagtttcttaaaatttcctagtacggactccagaattcctcagcagcatcctttcatcaacctacccaacctgtagctaagaatacctccatgagccctcgacagcgccgggcccagcagcagagtcagagaaggttgtctacttcaccagatgtaatccagggccaccagccaagagacaaccacactgatcatggtgggtcagctgtactgattgtcatcctgactttggcattggcagctcttatattccgacgaatatatctggcaaacgaatacatatttgactttgagttataatatggttttgtgacttatgagctgtgactcaactgcttcattaaacattctgcattgggtataatctaagaattgtttacaaaaagattattttgtatttacccttcattcctttttttgatccttgtaagtttagtataaatatatctagacattcagactgtgtctagcagttacgtcctgcttaaagggactagaagtcaaagttccttgtctcactatttgatctgctttgcagggaaataacttgttttttctcatgtttcatcttctttttatgtaaatttgtaatactttcctatattgccctttgaaatttttggataaaagatgatgttttaagttccaatgagtattactagttactcaataccacttattgagtactctgtttctacgtatgtagaatgtatagggatagaagagttgaaaagggaaagcaaaactcctcaagtagcttccttaaaatgtcattcataggagatgtactggaattgctcattctgtgactttatttgtgtcctaaacattcttcagtgaaaataattttatttcagtcaaacatttatgaggaaatgagatcacatctttgtcactggatgctacttgaagagggagtactttgtaaccactttgatatgctgttatcaccaccccctgccctctgctgccataatcacacaaatttaaaaagaaagaaaacagtcttccatagatttttaaggaagaaagggcccaagccaggagatcgcttggttttcttccagaagttaaatggggggatctgaagatttgaatgtttggtctgctttgaaatgtatgtcttttgggatgtattatatgcctagctttataatcagtataaattttaattattccaggaatatgcataatattgaaatatttcatgtcctattttaatagaaaacctcagggcccaagtaacagtgatagaagttagaaaaacctttacttagaattgtccacctagtcagagcccaagaaagaattttcagtggaaaaatcaatatataacttagtgctagctagcgccacagactctagtagataatattatcatcataatggctggtgaaaccatataatcacagaaaaacattgccttcagcatgttcagttcgcagcactgagggcactcttgagggtgttgttaatgaagatttaatttttaaatacaggtggttccaagctttcaaataggttatgctccaaaagtgttatttgtaagttaatttttttacaagtcaaacaatgttggaagtggtatttaggttctagatcggtccacgaaagttagcccatatgtatatcttgaatagtataggggagggtattcataaagtccttatgtggttttaactaagtgaaattatggacaagagaaataattgtaaaatcgtcttaaaggaaaatttaatttttactcctgtttatgggacattcgttctattaactgtcagacacaatttctgttttcatctgagagccagttttcctttatttctacatctaaaataagaacatattgtacactattatataatacagaattgtcttaaactttaataaattcgcattttaaaggtgtttacagattattttttatatctgtagctgaatttgttaaagtctaaaaagctcaaggactttatgaagatctcattatatgaggaaaatcataggttaccattttataactctattgccataagaaaatacactctaaaatcttgatttgaaacatattagaaaccttgattcagtgctcagtggtctcctagtaagaagtcaccgacggtagcgtcatatgagaagaaagaaatccccaccacctcaacctctgctgagattgtgtgctaggaacagccttccctccgtttcccctcagtcaaacttgagccagcctctggatcgatgtgatcttattgcatgtttccatggggtgtacctatactttaagccaatcctgctgcattcactgctaagttaaataaaaagccaagaagattttgcactgtgcagatcctttgctatctgacttgcatctcttcccccacctgtcagctagccacctgcttgtttgtgttgggatattttttagcacctgaagcaccatctgaaaggggcaccattttcttcttccctttgatctcacatatgctccctaaaaatccttaagttgtcaatctgatccccagtgtgaggttaatgagcaaaattggtctttggggccctttttgtccaagccccactgaaaggcctcttcagaaaactattatctttaaagccctactttaactccttaattccagcatacagctaaaactggatgtatattctggcaagtaaaggctgaggactcctctttaatcctcagatctagataactcatgacattttatttgaccaacatagcacatgatgagatatcaaggtaattaaaatagcatgcttgaaaaaaaaatacgtaatctgtttcacctgtaactgtttaagccaataaacttttcaaaatttatgtaatgtggggcttttatgtagcactttacgttttcatgctgcttattgttttattctactgaaaaaaatgaatttcaagattctcaacttttttaatttcaaaaattgtttattgttttgactataggaatacaaaatttcctattttgggagaataagaactctttttgtcatttttggctatgaataaactttctggtcttttgagaccacccatttttatagatcagaatcagaaaacaggtaaacctcactcacacatttggactcatttgaacaaaaatctaggccaaaatactgaaaagcctatgtgtttttttaattggaagtatatgtaaggttaatgcatttagtgaacgtgactaacaaagactaatgtgcacattaacagatgtactttttaaggttttatgggaggctgtgcattgctcaaaagctgttgggaacgccttctgaacagttgccttcagaactagtttgagctgctcaataaaaccagtgactttactcataccttgtttttgaccaaaggttgtattctttacatcatccagtcttgtctctcatccattctacctcctagaatatttctctctcatctttccacttccctaactaggcactatatcctatttagctattaactcctccaaattggtgcacacgaataacctcctaacaggtctct

SEQ ID NO: 427380 - DNA, 4443 bp, Homo sapiens
gcggccgcggcagggctgggcctgcgactacccgaggaggctgacctccagcccgggcgcccggttcagcgccgccccggccggcgccggtgcctgccaggcactcagggaggcgggggcgcagtggaggaggcggcgccatcgcgaagcgagcgcctcgcccgcactcagccttgccaccccgcccgcagtccaggctggactgggcggcatttgccgaggctcctcggccaggccccgtccgcccgagccgcgctgagacccgggcagcggccgcgtggagaggaggtggcagcggcccgggaggccggagccaagccagcgacccaccatggagacccgctacaacctgaagagtccgggataacctttttgaatggcacttcacggttagagggcccccagactccgattttgatggaggagtttatcacgggcggatagtactgccaccagagtatcccatgaaaccaccaagcattattctcctaacggctaatggtcgatttgaagtgggcaagaaaatctgtttgagcatctcaggccatcatcctgaaacttggcagccttcgtggagtataaggacagcattattagccatcattgggtttatgccaacaaaaggagagggagccataggttctctagattacactcctgaggaaagaagagcacttgccaaaaaatcacaagatttctgttgtgaaggatgtggctctgccatgaaggatgtcctgttgcctttaaaatctggaagcgattcaagccaagctgaccaagaagccaaagaactggctaggcaaataagctttaaggcagaagtcaattcatctggaaagactatctctgagtcagacttaaaccactctttttcactaactgatttacaagatgatatacctacaacattccagggtgctacggccagtacatcgtacggactccagaattcctcagcagcatcctttcatcaacctacccaacctgtagctaagaatacctccatgagccctcgacagcgccgggcccagcagcagagtcagagaaggttgtctacttcaccagatgtaatccagggccaccagccaagagacaaccacactgatcatggtgggtcagctgtactgattgtcatcctgactttggcattggcagctcttatattccgacgaatatatctggcaaacgaatacatatttgactttgagttataatatggttttgtgacttatgagctgtgactcaactgcttcattaaacattctgcattgggtataatctaagaattgtttacaaaaagattattttgtatttacccttcattcctttttttgatccttgtaagtttagtataaatatatctagacattcagactgtgtctagcagttacgtcctgcttaaagggactagaagtcaaagttccttgtctcactatttgatctgctttgcagggaaataacttgttttttctcatgtttcatcttctttttatgtaaatttgtaatactttcctatattgccctttgaaatttttggataaaagatgatgttttaagttccaatgagtattactagttactcaataccacttattgagtactctgtttctacgtatgtagaatgtatagggatagaagagttgaaaagggaaagcaaaactcctcaagtagcttccttaaaatgtcattcataggagatgtactggaattgctcattctgtgactttatttgtgtcctaaacattcttcagtgaaaataattttatttcagtcaaacatttatgaggaaatgagatcacatctttgtcactggatgctacttgaagagggagtactttgtaaccactttgatatgctgttatcaccaccccctgccctctgctgccataatcacacaaatttaaaaagaaagaaaacagtcttccatagatttttaaggaagaaagggcccaagccaggagatcgcttggttttcttccagaagttaaatggggggatctgaagatttgaatgtttggtctgctttgaaatgtatgtcttttgggatgtattatatgcctagctttataatcagtataaattttaattattccaggaatatgcataatattgaaatatttcatgtcctattttaatagaaaacctcagggcccaagtaacagtgatagaagttagaaaaacctttacttagaattgtccacctagtcagagcccaagaaagaattttcagtggaaaaatcaatatataacttagtgctagctagcgccacagactctagtagataatattatcatcataatggctggtgaaaccatataatcacagaaaaacattgccttcagcatgttcagttcgcagcactgagggcactcttgagggtgttgttaatgaagatttaatttttaaatacaggtggttccaagctttcaaataggttatgctccaaaagtgttatttgtaagttaatttttttacaagtcaaacaatgttggaagtggtatttaggttctagatcggtccacgaaagttagcccatatgtatatcttgaatagtataggggagggtattcataaagtccttatgtggttttaactaagtgaaattatggacaagagaaataattgtaaaatcgtcttaaaggaaaatttaatttttactcctgtttatgggacattcgttctattaactgtcagacacaatttctgttttcatctgagagccagttttcctttatttctacatctaaaataagaacatattgtacactattatataatacagaattgtcttaaactttaataaattcgcattttaaaggtgtttacagattattttttatatctgtagctgaatttgttaaagtctaaaaagctcaaggactttatgaagatctcattatatgaggaaaatcataggttaccattttataactctattgccataagaaaatacactctaaaatcttgatttgaaacatattagaaaccttgattcagtgctcagtggtctcctagtaagaagtcaccgacggtagcgtcatatgagaagaaagaaatccccaccacctcaacctctgctgagattgtgtgctaggaacagccttccctccgtttcccctcagtcaaacttgagccagcctctggatcgatgtgatcttattgcatgtttccatggggtgtacctatactttaagccaatcctgctgcattcactgctaagttaaataaaaagccaagaagattttgcactgtgcagatcctttgctatctgacttgcatctcttcccccacctgtcagctagccacctgcttgtttgtgttgggatattttttagcacctgaagcaccatctgaaaggggcaccattttcttcttccctttgatctcacatatgctccctaaaaatccttaagttgtcaatctgatccccagtgtgaggttaatgagcaaaattggtctttggggccctttttgtccaagccccactgaaaggcctcttcagaaaactattatctttaaagccctactttaactccttaattccagcatacagctaaaactggatgtatattctggcaagtaaaggctgaggactcctctttaatcctcagatctagataactcatgacattttatttgaccaacatagcacatgatgagatatcaaggtaattaaaatagcatgcttgaaaaaaaaatacgtaatctgtttcacctgtaactgtttaagccaataaacttttcaaaatttatgtaatgtggggcttttatgtagcactttacgttttcatgctgcttattgttttattctactgaaaaaaatgaatttcaagattctcaacttttttaatttcaaaaattgtttattgttttgactataggaatacaaaatttcctattttgggagaataagaactctttttgtcatttttggctatgaataaactttctggtcttttgagaccacccatttttatagatcagaatcagaaaacaggtaaacctcactcacacatttggactcatttgaacaaaaatctaggccaaaatactgaaaagcctatgtgtttttttaattggaagtatatgtaaggttaatgcatttagtgaacgtgactaacaaagactaatgtgcacattaacagatgtactttttaaggttttatgggaggctgtgcattgctcaaaagctgttgggaacgccttctgaacagttgccttcagaactagtttgagctgctcaataaaaccagtgactttactcataccttgtttttgaccaaaggttgtattctttacatcatccagtcttgtctctcatccattctacctcctagaatatttctctctcatctttccacttccctaactaggcactatatcctatttagctattaactcctccaaattggtgcacacgaataacctcctaacaggtctct

SEQ ID NO: 427381 - DNA, 4261 bp, Homo sapiens
tgaaccaagaatgcttcatctggagaatttcaaagagacaaccaaccacctgttgtcgagggccattcaccaccctaagtgttaatgtatctctggtttcctaaagctgttaaacgtttaatgaaagaagcggcagaattgaaagatccaacagatcattaccatgcgcagcctttagaggataacctttttgaatggcacttcacggttagagggcccccagactccgattttgatggaggagtttatcacgggcggatagtactgccaccagagtatcccatgaaaccaccaagcattattctcctaacggctaatggtcgatttgaagtgggcaagaaaatctgtttgagcatctcaggccatcatcctgaaacttggcagccttcgtggagtataaggacagcattattagccatcattgggtttatgccaacaaaaggagagggagccataggttctctagattacactcctgaggaaagaagagcacttgccaaaaaatcacaagatttctgttgtgaaggatgtggctctgccatgaaggatgtcctgttgcctttaaaatctggaagcgattcaagccaagctgaccaagaagccaaagaactggctaggcaaataagctttaaggcagaagtcaattcatctggaaagactatctctgagtcagacttaaaccactctttttcactaactgatttacaagatgatatacctacaacattccagggtgctacggccagtacatcgtacggactccagaattcctcagcagcatcctttcatcaacctacccaacctgtagctaagaatacctccatgagccctcgacagcgccgggcccagcagcagagtcagagaaggttgtctacttcaccagatgtaatccagggccaccagccaagagacaaccacactgatcatggtgggtcagctgtactgattgtcatcctgactttggcattggcagctcttatattccgacgaatatatctggcaaacgaatacatatttgactttgagttataatatggttttgtgacttatgagctgtgactcaactgcttcattaaacattctgcattgggtataatctaagaattgtttacaaaaagattattttgtatttacccttcattcctttttttgatccttgtaagtttagtataaatatatctagacattcagactgtgtctagcagttacgtcctgcttaaagggactagaagtcaaagttccttgtctcactatttgatctgctttgcagggaaataacttgttttttctcatgtttcatcttctttttatgtaaatttgtaatactttcctatattgccctttgaaatttttggataaaagatgatgttttaagttccaatgagtattactagttactcaataccacttattgagtactctgtttctacgtatgtagaatgtatagggatagaagagttgaaaagggaaagcaaaactcctcaagtagcttccttaaaatgtcattcataggagatgtactggaattgctcattctgtgactttatttgtgtcctaaacattcttcagtgaaaataattttatttcagtcaaacatttatgaggaaatgagatcacatctttgtcactggatgctacttgaagagggagtactttgtaaccactttgatatgctgttatcaccaccccctgccctctgctgccataatcacacaaatttaaaaagaaagaaaacagtcttccatagatttttaaggaagaaagggcccaagccaggagatcgcttggttttcttccagaagttaaatggggggatctgaagatttgaatgtttggtctgctttgaaatgtatgtcttttgggatgtattatatgcctagctttataatcagtataaattttaattattccaggaatatgcataatattgaaatatttcatgtcctattttaatagaaaacctcagggcccaagtaacagtgatagaagttagaaaaacctttacttagaattgtccacctagtcagagcccaagaaagaattttcagtggaaaaatcaatatataacttagtgctagctagcgccacagactctagtagataatattatcatcataatggctggtgaaaccatataatcacagaaaaacattgccttcagcatgttcagttcgcagcactgagggcactcttgagggtgttgttaatgaagatttaatttttaaatacaggtggttccaagctttcaaataggttatgctccaaaagtgttatttgtaagttaatttttttacaagtcaaacaatgttggaagtggtatttaggttctagatcggtccacgaaagttagcccatatgtatatcttgaatagtataggggagggtattcataaagtccttatgtggttttaactaagtgaaattatggacaagagaaataattgtaaaatcgtcttaaaggaaaatttaatttttactcctgtttatgggacattcgttctattaactgtcagacacaatttctgttttcatctgagagccagttttcctttatttctacatctaaaataagaacatattgtacactattatataatacagaattgtcttaaactttaataaattcgcattttaaaggtgtttacagattattttttatatctgtagctgaatttgttaaagtctaaaaagctcaaggactttatgaagatctcattatatgaggaaaatcataggttaccattttataactctattgccataagaaaatacactctaaaatcttgatttgaaacatattagaaaccttgattcagtgctcagtggtctcctagtaagaagtcaccgacggtagcgtcatatgagaagaaagaaatccccaccacctcaacctctgctgagattgtgtgctaggaacagccttccctccgtttcccctcagtcaaacttgagccagcctctggatcgatgtgatcttattgcatgtttccatggggtgtacctatactttaagccaatcctgctgcattcactgctaagttaaataaaaagccaagaagattttgcactgtgcagatcctttgctatctgacttgcatctcttcccccacctgtcagctagccacctgcttgtttgtgttgggatattttttagcacctgaagcaccatctgaaaggggcaccattttcttcttccctttgatctcacatatgctccctaaaaatccttaagttgtcaatctgatccccagtgtgaggttaatgagcaaaattggtctttggggccctttttgtccaagccccactgaaaggcctcttcagaaaactattatctttaaagccctactttaactccttaattccagcatacagctaaaactggatgtatattctggcaagtaaaggctgaggactcctctttaatcctcagatctagataactcatgacattttatttgaccaacatagcacatgatgagatatcaaggtaattaaaatagcatgcttgaaaaaaaaatacgtaatctgtttcacctgtaactgtttaagccaataaacttttcaaaatttatgtaatgtggggcttttatgtagcactttacgttttcatgctgcttattgttttattctactgaaaaaaatgaatttcaagattctcaacttttttaatttcaaaaattgtttattgttttgactataggaatacaaaatttcctattttgggagaataagaactctttttgtcatttttggctatgaataaactttctggtcttttgagaccacccatttttatagatcagaatcagaaaacaggtaaacctcactcacacatttggactcatttgaacaaaaatctaggccaaaatactgaaaagcctatgtgtttttttaattggaagtatatgtaaggttaatgcatttagtgaacgtgactaacaaagactaatgtgcacattaacagatgtactttttaaggttttatgggaggctgtgcattgctcaaaagctgttgggaacgccttctgaacagttgccttcagaactagtttgagctgctcaataaaaccagtgactttactcataccttgtttttgaccaaaggttgtattctttacatcatccagtcttgtctctcatccattctacctcctagaatatttctctctcatctttccacttccctaactaggcactatatcctatttagctattaactcctccaaattggtgcacacgaataacctcctaacaggtctct

SEQ ID NO: 427382 - DNA, 4665 bp, Homo sapiens
gcggccgcggcagggctgggcctgcgactacccgaggaggctgacctccagcccgggcgcccggttcagcgccgccccggccggcgccggtgcctgccaggcactcagggaggcgggggcgcagtggaggaggcggcgccatcgcgaagcgagcgcctcgcccgcactcagccttgccaccccgcccgcagtccaggctggactgggcggcatttgccgaggctcctcggccaggccccgtccgcccgagccgcgctgagacccgggcagcggccgcgtggagaggaggtggcagcggcccgggaggccggagccaagccagcgacccaccatggagacccgctacaacctgaagagtccggctgttaaacgtttaatgaaagaagcggcagaattgaaagatccaacagatcattaccatgcgcagcctttagaggataacctttttgaatggcacttcacggttagagggcccccagactccgattttgatggaggagtttatcacgggcggatagtactgccaccagagtatcccatgaaaccaccaagcattattctcctaacggctaatggtcgatttgaagtgggcaagaaaatctgtttgagcatctcaggccatcatcctgaaacttggcagccttcgtggagtagtaagtgttaatttatagtgaatataaatctcataacttcagtcaattcatagttatgaagtataatactctgattttttctttttccagaataaacccagttgcttttacaaagcaatttagattgatatttacttttttatttcagtaaggacagcattattagccatcattgggtttatgccaacaaaaggagagggagccataggttctctagattacactcctgaggaaagaagagcacttgccaaaaaatcacaagatttctgttgtgaaggatgtggctctgccatgaaggatgtcctgttgcctttaaaatctggaagcgattcaagccaagctgaccaagaagccaaagaactggctaggcaaataagctttaaggcagaagtcaattcatctggaaagactatctctgagtcagacttaaaccactctttttcactaactgatttacaagatgatatacctacaacattccagggtgctacggccagtacatcgtacggactccagaattcctcagcagcatcctttcatcaacctacccaacctgtagctaagaatacctccatgagccctcgacagcgccgggcccagcagcagagtcagagaaggttgtctacttcaccagatgtaatccagggccaccagccaagagacaaccacactgatcatggtgggtcagctgtactgattgtcatcctgactttggcattggcagctcttatattccgacgaatatatctggcaaacgaatacatatttgactttgagttataatatggttttgtgacttatgagctgtgactcaactgcttcattaaacattctgcattgggtataatctaagaattgtttacaaaaagattattttgtatttacccttcattcctttttttgatccttgtaagtttagtataaatatatctagacattcagactgtgtctagcagttacgtcctgcttaaagggactagaagtcaaagttccttgtctcactatttgatctgctttgcagggaaataacttgttttttctcatgtttcatcttctttttatgtaaatttgtaatactttcctatattgccctttgaaatttttggataaaagatgatgttttaagttccaatgagtattactagttactcaataccacttattgagtactctgtttctacgtatgtagaatgtatagggatagaagagttgaaaagggaaagcaaaactcctcaagtagcttccttaaaatgtcattcataggagatgtactggaattgctcattctgtgactttatttgtgtcctaaacattcttcagtgaaaataattttatttcagtcaaacatttatgaggaaatgagatcacatctttgtcactggatgctacttgaagagggagtactttgtaaccactttgatatgctgttatcaccaccccctgccctctgctgccataatcacacaaatttaaaaagaaagaaaacagtcttccatagatttttaaggaagaaagggcccaagccaggagatcgcttggttttcttccagaagttaaatggggggatctgaagatttgaatgtttggtctgctttgaaatgtatgtcttttgggatgtattatatgcctagctttataatcagtataaattttaattattccaggaatatgcataatattgaaatatttcatgtcctattttaatagaaaacctcagggcccaagtaacagtgatagaagttagaaaaacctttacttagaattgtccacctagtcagagcccaagaaagaattttcagtggaaaaatcaatatataacttagtgctagctagcgccacagactctagtagataatattatcatcataatggctggtgaaaccatataatcacagaaaaacattgccttcagcatgttcagttcgcagcactgagggcactcttgagggtgttgttaatgaagatttaatttttaaatacaggtggttccaagctttcaaataggttatgctccaaaagtgttatttgtaagttaatttttttacaagtcaaacaatgttggaagtggtatttaggttctagatcggtccacgaaagttagcccatatgtatatcttgaatagtataggggagggtattcataaagtccttatgtggttttaactaagtgaaattatggacaagagaaataattgtaaaatcgtcttaaaggaaaatttaatttttactcctgtttatgggacattcgttctattaactgtcagacacaatttctgttttcatctgagagccagttttcctttatttctacatctaaaataagaacatattgtacactattatataatacagaattgtcttaaactttaataaattcgcattttaaaggtgtttacagattattttttatatctgtagctgaatttgttaaagtctaaaaagctcaaggactttatgaagatctcattatatgaggaaaatcataggttaccattttataactctattgccataagaaaatacactctaaaatcttgatttgaaacatattagaaaccttgattcagtgctcagtggtctcctagtaagaagtcaccgacggtagcgtcatatgagaagaaagaaatccccaccacctcaacctctgctgagattgtgtgctaggaacagccttccctccgtttcccctcagtcaaacttgagccagcctctggatcgatgtgatcttattgcatgtttccatggggtgtacctatactttaagccaatcctgctgcattcactgctaagttaaataaaaagccaagaagattttgcactgtgcagatcctttgctatctgacttgcatctcttcccccacctgtcagctagccacctgcttgtttgtgttgggatattttttagcacctgaagcaccatctgaaaggggcaccattttcttcttccctttgatctcacatatgctccctaaaaatccttaagttgtcaatctgatccccagtgtgaggttaatgagcaaaattggtctttggggccctttttgtccaagccccactgaaaggcctcttcagaaaactattatctttaaagccctactttaactccttaattccagcatacagctaaaactggatgtatattctggcaagtaaaggctgaggactcctctttaatcctcagatctagataactcatgacattttatttgaccaacatagcacatgatgagatatcaaggtaattaaaatagcatgcttgaaaaaaaaatacgtaatctgtttcacctgtaactgtttaagccaataaacttttcaaaatttatgtaatgtggggcttttatgtagcactttacgttttcatgctgcttattgttttattctactgaaaaaaatgaatttcaagattctcaacttttttaatttcaaaaattgtttattgttttgactataggaatacaaaatttcctattttgggagaataagaactctttttgtcatttttggctatgaataaactttctggtcttttgagaccacccatttttatagatcagaatcagaaaacaggtaaacctcactcacacatttggactcatttgaacaaaaatctaggccaaaatactgaaaagcctatgtgtttttttaattggaagtatatgtaaggttaatgcatttagtgaacgtgactaacaaagactaatgtgcacattaacagatgtactttttaaggttttatgggaggctgtgcattgctcaaaagctgttgggaacgccttctgaacagttgccttcagaactagtttgagctgctcaataaaaccagtgactttactcataccttgtttttgaccaaaggttgtattctttacatcatccagtcttgtctctcatccattctacctcctagaatatttctctctcatctttccacttccctaactaggcactatatcctatttagctattaactcctccaaattggtgcacacgaataacctcctaacaggtctct

SEQ ID NO: 427383 - DNA, 3522 bp, Homo sapiens
gcacgagccgttaggagaataatgcttggtggtttcatgggatactctggtggcagtactatccgcccgtgataaactcctccatgagccctcgacagcgccgggcccagcagcagagtcagagaaggttgtctacttcaccagatgtaatccagggccaccagccaagagacaaccacactgatcatggtgggtcagctgtactgattgtcatcctgactttggcattggcagctcttatattccgacgaatatatctggcaaacgaatacatatttgactttgagttataatatggttttgtgacttatgagctgtgactcaactgcttcattaaacattctgcattgggtataatctaagaattgtttacaaaaagattattttgtatttacccttcattcctttttttgatccttgtaagtttagtataaatatatctagacattcagactgtgtctagcagttacgtcctgcttaaagggactagaagtcaaagttccttgtctcactatttgatctgctttgcagggaaataacttgttttttctcatgtttcatcttctttttatgtaaatttgtaatactttcctatattgccctttgaaatttttggataaaagatgatgttttaagttccaatgagtattactagttactcaataccacttattgagtactctgtttctacgtatgtagaatgtatagggatagaagagttgaaaagggaaagcaaaactcctcaagtagcttccttaaaatgtcattcataggagatgtactggaattgctcattctgtgactttatttgtgtcctaaacattcttcagtgaaaataattttatttcagtcaaacatttatgaggaaatgagatcacatctttgtcactggatgctacttgaagagggagtactttgtaaccactttgatatgctgttatcaccaccccctgccctctgctgccataatcacacaaatttaaaaagaaagaaaacagtcttccatagatttttaaggaagaaagggcccaagccaggagatcgcttggttttcttccagaagttaaatggggggatctgaagatttgaatgtttggtctgctttgaaatgtatgtcttttgggatgtattatatgcctagctttataatcagtataaattttaattattccaggaatatgcataatattgaaatatttcatgtcctattttaatagaaaacctcagggcccaagtaacagtgatagaagttagaaaaacctttacttagaattgtccacctagtcagagcccaagaaagaattttcagtggaaaaatcaatatataacttagtgctagctagcgccacagactctagtagataatattatcatcataatggctggtgaaaccatataatcacagaaaaacattgccttcagcatgttcagttcgcagcactgagggcactcttgagggtgttgttaatgaagatttaatttttaaatacaggtggttccaagctttcaaataggttatgctccaaaagtgttatttgtaagttaatttttttacaagtcaaacaatgttggaagtggtatttaggttctagatcggtccacgaaagttagcccatatgtatatcttgaatagtataggggagggtattcataaagtccttatgtggttttaactaagtgaaattatggacaagagaaataattgtaaaatcgtcttaaaggaaaatttaatttttactcctgtttatgggacattcgttctattaactgtcagacacaatttctgttttcatctgagagccagttttcctttatttctacatctaaaataagaacatattgtacactattatataatacagaattgtcttaaactttaataaattcgcattttaaaggtgtttacagattattttttatatctgtagctgaatttgttaaagtctaaaaagctcaaggactttatgaagatctcattatatgaggaaaatcataggttaccattttataactctattgccataagaaaatacactctaaaatcttgatttgaaacatattagaaaccttgattcagtgctcagtggtctcctagtaagaagtcaccgacggtagcgtcatatgagaagaaagaaatccccaccacctcaacctctgctgagattgtgtgctaggaacagccttccctccgtttcccctcagtcaaacttgagccagcctctggatcgatgtgatcttattgcatgtttccatggggtgtacctatactttaagccaatcctgctgcattcactgctaagttaaataaaaagccaagaagattttgcactgtgcagatcctttgctatctgacttgcatctcttcccccacctgtcagctagccacctgcttgtttgtgttgggatattttttagcacctgaagcaccatctgaaaggggcaccattttcttcttccctttgatctcacatatgctccctaaaaatccttaagttgtcaatctgatccccagtgtgaggttaatgagcaaaattggtctttggggccctttttgtccaagccccactgaaaggcctcttcagaaaactattatctttaaagccctactttaactccttaattccagcatacagctaaaactggatgtatattctggcaagtaaaggctgaggactcctctttaatcctcagatctagataactcatgacattttatttgaccaacatagcacatgatgagatatcaaggtaattaaaatagcatgcttgaaaaaaaaatacgtaatctgtttcacctgtaactgtttaagccaataaacttttcaaaatttatgtaatgtggggcttttatgtagcactttacgttttcatgctgcttattgttttattctactgaaaaaaatgaatttcaagattctcaacttttttaatttcaaaaattgtttattgttttgactataggaatacaaaatttcctattttgggagaataagaactctttttgtcatttttggctatgaataaactttctggtcttttgagaccacccatttttatagatcagaatcagaaaacaggtaaacctcactcacacatttggactcatttgaacaaaaatctaggccaaaatactgaaaagcctatgtgtttttttaattggaagtatatgtaaggttaatgcatttagtgaacgtgactaacaaagactaatgtgcacattaacagatgtactttttaaggttttatgggaggctgtgcattgctcaaaagctgttgggaacgccttctgaacagttgccttcagaactagtttgagctgctcaataaaaccagtgactttactcataccttgtttttgaccaaaggttgtattctttacatcatccagtcttgtctctcatccattctacctcctagaatatttctctctcatctttccacttccctaactaggcactatatcctatttagctattaactcctccaaattggtgcacacgaataacctcctaacaggtctct

SEQ ID NO: 427384 - DNA, 3313 bp, Homo sapiens
aatatgtattcgtttgccagatatattataactcaaagtcaaatatgtattcgtttgccagatatatttgactttgagttataatatggttttgtgacttatgagctgtgactcaactgcttcattaaacattctgcattgggtataatctaagaattgtttacaaaaagattattttgtatttacccttcattcctttttttgatccttgtaagtttagtataaatatatctagacattcagactgtgtctagcagttacgtcctgcttaaagggactagaagtcaaagttccttgtctcactatttgatctgctttgcagggaaataacttgttttttctcatgtttcatcttctttttatgtaaatttgtaatactttcctatattgccctttgaaatttttggataaaagatgatgttttaagttccaatgagtattactagttactcaataccacttattgagtactctgtttctacgtatgtagaatgtatagggatagaagagttgaaaagggaaagcaaaactcctcaagtagcttccttaaaatgtcattcataggagatgtactggaattgctcattctgtgactttatttgtgtcctaaacattcttcagtgaaaataattttatttcagtcaaacatttatgaggaaatgagatcacatctttgtcactggatgctacttgaagagggagtactttgtaaccactttgatatgctgttatcaccaccccctgccctctgctgccataatcacacaaatttaaaaagaaagaaaacagtcttccatagatttttaaggaagaaagggcccaagccaggagatcgcttggttttcttccagaagttaaatggggggatctgaagatttgaatgtttggtctgctttgaaatgtatgtcttttgggatgtattatatgcctagctttataatcagtataaattttaattattccaggaatatgcataatattgaaatatttcatgtcctattttaatagaaaacctcagggcccaagtaacagtgatagaagttagaaaaacctttacttagaattgtccacctagtcagagcccaagaaagaattttcagtggaaaaatcaatatataacttagtgctagctagcgccacagactctagtagataatattatcatcataatggctggtgaaaccatataatcacagaaaaacattgccttcagcatgttcagttcgcagcactgagggcactcttgagggtgttgttaatgaagatttaatttttaaatacaggtggttccaagctttcaaataggttatgctccaaaagtgttatttgtaagttaatttttttacaagtcaaacaatgttggaagtggtatttaggttctagatcggtccacgaaagttagcccatatgtatatcttgaatagtataggggagggtattcataaagtccttatgtggttttaactaagtgaaattatggacaagagaaataattgtaaaatcgtcttaaaggaaaatttaatttttactcctgtttatgggacattcgttctattaactgtcagacacaatttctgttttcatctgagagccagttttcctttatttctacatctaaaataagaacatattgtacactattatataatacagaattgtcttaaactttaataaattcgcattttaaaggtgtttacagattattttttatatctgtagctgaatttgttaaagtctaaaaagctcaaggactttatgaagatctcattatatgaggaaaatcataggttaccattttataactctattgccataagaaaatacactctaaaatcttgatttgaaacatattagaaaccttgattcagtgctcagtggtctcctagtaagaagtcaccgacggtagcgtcatatgagaagaaagaaatccccaccacctcaacctctgctgagattgtgtgctaggaacagccttccctccgtttcccctcagtcaaacttgagccagcctctggatcgatgtgatcttattgcatgtttccatggggtgtacctatactttaagccaatcctgctgcattcactgctaagttaaataaaaagccaagaagattttgcactgtgcagatcctttgctatctgacttgcatctcttcccccacctgtcagctagccacctgcttgtttgtgttgggatattttttagcacctgaagcaccatctgaaaggggcaccattttcttcttccctttgatctcacatatgctccctaaaaatccttaagttgtcaatctgatccccagtgtgaggttaatgagcaaaattggtctttggggccctttttgtccaagccccactgaaaggcctcttcagaaaactattatctttaaagccctactttaactccttaattccagcatacagctaaaactggatgtatattctggcaagtaaaggctgaggactcctctttaatcctcagatctagataactcatgacattttatttgaccaacatagcacatgatgagatatcaaggtaattaaaatagcatgcttgaaaaaaaaatacgtaatctgtttcacctgtaactgtttaagccaataaacttttcaaaatttatgtaatgtggggcttttatgtagcactttacgttttcatgctgcttattgttttattctactgaaaaaaatgaatttcaagattctcaacttttttaatttcaaaaattgtttattgttttgactataggaatacaaaatttcctattttgggagaataagaactctttttgtcatttttggctatgaataaactttctggtcttttgagaccacccatttttatagatcagaatcagaaaacaggtaaacctcactcacacatttggactcatttgaacaaaaatctaggccaaaatactgaaaagcctatgtgtttttttaattggaagtatatgtaaggttaatgcatttagtgaacgtgactaacaaagactaatgtgcacattaacagatgtactttttaaggttttatgggaggctgtgcattgctcaaaagctgttgggaacgccttctgaacagttgccttcagaactagtttgagctgctcaataaaaccagtgactttactcataccttgtttttgaccaaaggttgtattctttacatcatccagtcttgtctctcatccattctacctcctagaatatttctctctcatctttccacttccctaactaggcactatatcctatttagctattaactcctccaaattggtgcacacgaataacctcctaacaggtctct

SEQ ID NO: 427385 - DNA, 1236 bp, Homo sapiens
gcggccgcggcagggctgggcctgcgactacccgaggaggctgacctccagcccgggcgcccggttcagcgccgccccggccggcgccggtgcctgccaggcactcagggaggcgggggcgcagtggaggaggcggcgccatcgcgaagcgagcgcctcgcccgcactcagccttgccaccccgcccgcagtccaggctggactgggcggcatttgccgaggctcctcggccaggccccgtccgcccgagccgcgctgagacccgggcagcggccgcgtggagaggaggtggcagcggcccgggaggccggagccaagccagcgacccaccatggagacccgctacaacctgaagagtccggctgttaaacgtttaatgaaagaagcggcagaattgaaagatccaacagatcattaccatgcgcagcctttagaggataacctttttgaatggcacttcacggttagagggcccccagactccgattttgatggaggagtttatcacgggcggatagtactgccaccagagtatcccatgaaaccaccaagcattattctcctaacggctaatggtcgatttgaagtgggcaagaaaatctgtttgagcatctcaggccatcatcctgaaacttggcagccttcgtggagtataaggacagcattattagccatcattgggtttatgccaacaaaaggagagggagccataggttctctagattacactcctgaggaaagaagagcacttgccaaaaaatcacaagatttctgttgtgaaggatgtggctctgccatgaaggatgtcctgttgcctttaaaatctggaagcgattcaagccaagctgaccaagaagccaaagaactggctaggcaaataagctttaagtacggactccagaattcctcagcagcatcctttcatcaacctacccaacctgtagctaagaatacctccatgagccctcgacagcgccgggcccagcagcagagtcagagaaggttgtctacttcaccagatgtaatccagggccaccagccaagagacaaccacactgatcatggtgggtcagctgtactgattgtcatcctgactttggcattggcagctcttatattccgacgaatatatctggcaaacgaatacatatttgactttgagttataatatggttttgtgacttatgagctgtgactcaactgcttcattaaacattctgcattgggtataatcta

SEQ ID NO: 427386 - DNA, 1148 bp, Homo sapiens
gcggccgcggcagggctgggcctgcgactacccgaggaggctgacctccagcccgggcgcccggttcagcgccgccccggccggcgccggtgcctgccaggcactcagggaggcgggggcgcagtggaggaggcggcgccatcgcgaagcgagcgcctcgcccgcactcagccttgccaccccgcccgcagtccaggctggactgggcggcatttgccgaggctcctcggccaggccccgtccgcccgagccgcgctgagacccgggcagcggccgcgtggagaggaggtggcagcggcccgggaggccggagccaagccagcgacccaccatggagacccgctacaacctgaagagtccggctgttaaacgtttaatgaaagaagcggcagaattgaaagatccaacagatcattaccatgcgcagcctttagaggataacctttttgaatggcacttcacggttagagggcccccagactccgattttgatggaggagtttatcacgggcggatagtactgccaccagagtatcccatgaaaccaccaagcattattctcctaacggctaatggtcgatttgaagtgggcaagaaaatctgtttgagcatctcaggccatcatcctgaaacttggcagccttcgtggagtataaggacagcattattagccatcattgggtttatgccaacaaaaggagagggagccataggttctctagattacactcctgaggaaagaagagcacttgccaaaaagtaagttttgcatttcattcttcttgaggtctgaatagtattcagggtaatggctattaggaggtagggcctacctcttactatgtgacttattttctgagtgactgtagctacaggatcttatctcagttttgctcttttaggaattcagttgtaataatttccttggagtgaccagaatctaagtaatttatttaatgctatctagtcttaaaaagtagttgatactatttcactatttttaaaaaattcagtgggagatatattctcctggaaaacaataccagtcatttgtttccactatggcattatagatggaaaagaaccagagcaattatttgtagctttccacaagattacaaacctcttgagggccaagaggtaatcca

SEQ ID NO: 427387 - DNA, 1296 bp, Homo sapiens
gcggccgcggcagggctgggcctgcgactacccgaggaggctgacctccagcccgggcgcccggttcagcgccgccccggccggcgccggtgcctgccaggcactcagggaggcgggggcgcagtggaggaggcggcgccatcgcgaagcgagcgcctcgcccgcactcagccttgccaccccgcccgcagtccaggctggactgggcggcatttgccgaggctcctcggccaggccccgtccgcccgagccgcgctgagacccgggcagcggccgcgtggagaggaggtggcagcggcccgggaggccggagccaagccagcgacccaccatggagacccgctacaacctgaagagtccggctgttaaacgtttaatgaaagaagcggcagaattgaaagatccaacagatcattaccatgcgcagcctttagaggataacctttttgaatggcacttcacggttagagggcccccagactccgattttgatggaggagtttatcacgggcggatagtactgccaccagagtatcccatgaaaccaccaagcattattctcctaacggctaatggtcgatttgaagtgggcaagaaaatctgtttgagcatctcaggccatcatcctgaaacttggcagccttcgtggagtagtaagtgttaatttatagtgaatataaatctcataacttcagtcaattcatagttatgaagtataatactctgattttttctttttccagaataaacccagttgcttttacaaagcaatttagattgatatttacttttttatttcagtaaggacagcattattagccatcattgggtttatgccaacaaaaggagagggagccataggttctctagattacactcctgaggaaagaagagcacttgccaaaaagtaagttttgcatttcattcttcttgaggtctgaatagtattcagggtaatggctattaggaggtagggcctacctcttactatgtgacttattttctgagtgactgtagctacaggatcttatctcagttttgctcttttaggaattcagttgtaataatttccttggagtgaccagaatctaagtaatttatttaatgctatctagtcttaaaaagtagttgatactatttcactatttttaaaaaattcagtgggagatatattctcctggaaaacaataccagtcatttgtttccactatggcattatagatggaaaagaaccagagcaattatttgtagctttccacaagattacaaacctcttgagggccaagaggtaatcca

SEQ ID NO: 427388 - DNA, 3963 bp, Homo sapiens
ccctctcggggccgcgcgggtgcccgggcggcggcggcgacgcgacgtcgcgaggaggaggaggcggcgggggtccaggaggccggccagcgcatggaggaggaggccatgaacggcgaccggactgagagcgactggcaggggctggtgagcgagtacctggtgtgtaagaggaagctggagagtaagaaggaagccctgctgatcctctccaaggagctggacacctgtcaacaggaaagggaccagtacaaactcatggccaatcagctccgggagcgccaccagtcactgaagaagaagtaccgagagctgattgatggagatccatcacttcctcctgaaaaaaggaaacaggctaatcttgcacaactattgagagattctcaggaccgaaataaacatctgggagaagaaattaaagaacttcagcaaaggcttggagaagtccagggcgacaacaagctcttgaggatgacgattgccaaacaaaggctcggagacgaagcaatcggcgtgcgacactttgcagcccatgagcgtgaagacttggtgcagcagctagagcgagctaaggaacagattgagtctctggagcacgacctgcaggcttctgtggacgagcttcaggatgttaaagaagaacggtcttcctaccaggacaaagtggagaggctcaaccaggagctgaaccatatcctgagtgggcacgagaaccgcatcattgacgtggacgccctgtgtatggagaacaggtaccttcaagagagattaaagcaactccatgaagaggtcaacctcttgaaatcaaacattgccaaatacaagaatgctctggagagacggaaaaactcgaagggccagggtaaatccagcagcagtgctctgacaggagtcctgtctgcaaagcaagttcaggatctgctatctgaggatcatggatgcagcctcccagctactccgcagtccatttctgacctgaaatctctggcaacagccctgttggaaacaatccacgagaaaaacatggtcattcagcaccagaggcaaaccaacaaaatcctagggaatcgggtggctgagctggaaaaaaaattaagaactctggaagtttctggtttgtggagtcttccagggggcaaggacaccatactgttcagcgaccccactcttcctagtggacagaggtcgagatccccactgctgaagtttgtcgagcagcccactgagaacaaagcagatcccaaggatggggaggctcagaagcaagaagaagatgaaagttgtgccgctgctgaggcgttgacagcgcctgaggatgctgggaggcccgctgtcaactccccagcaaatcagagccgcgggaaccaatgcaagctctttcatccttcattaccccagttaccttctgaggaagaagtaaacagccttgggagggaaataattaaactgacaaaggaacaggcagctgcagaactggaagaggtcagaagagagagtcccatagaaggtcagaggagtgagacggggccagccccgccaggcctggccatccagggggagctccctaaatctcacctggactccttcgaggccagccggccagcagccaaagcttccacaccggaagacggcaaagggatcccagagggcggaggcatgaggagcaccgtgaaaacctgaaggggagagggatctgacacaatgacacattgaaagccccagagagggtcaagaatgaagcatcggaatggtgcgctcacgtcgccttctcctgaaatacctccgagtctgcaagtgagaaaacgcgctgatcctgttgcaaactgtgaatattctgatgatgccagtacagtttgatttattaaatgtaggtcctcaagcttctcagtgtcatctcttttctgccagagagtgctactgtgaacagggccaggcccaggaatcgtgtccaccatatggctggttttcagcatccgtctttctgtcagcttttgttttatcagagataagatgtttttgtattagcatttaatgttgtcaatcaaaattatgggaagagctagaaactgatggggtttttaatcaggtccccatcttggtcaaggttaggcagctggagaggaaggtataattgagcaaaacgtgtccagaggacccatggctgcaccccatcaagtcagggcccaggaggactgcctggcatgggtgtgcttggcattgtgcccacagcactgctgtcgtggtacagactggcagttggaaggggccttaagccggctgagaagtttgggcttctgggttgaaatccacggccccggttgaggcctgtgtgctgagtgccagagctggagttttctagcttgtaaatctggagaattaactgatctgaagtgactgggaggggtgagcataaaagccggggaacaggactcccagtggtggtctggttttttttgtgagatgagatgagagctaccacctggaaatgctcattctctgcattcagcctgtctcacatacaggattgtatggccatttcaggtttgggaaagatctacctgctgggagccagtctagtttcctgcaccacctggaacttccaaacccttcactccttcaacagaatgttgaggctgcctcatttgtgccaccaagtacgggaatcttaaagacagaaacagagctcatgaccttttatgggaaagagagaggaaaacaaaacaacttcacaacagcatggcaaggggggatgtggaaccaaggacatgatacagggatgggaaaggagggcatgctcaattctagctggttctttcctttcagataaaaatgagcttttctagttggcatccggcactgcagaaaactaaaagtcatccagccatagctttttccttccctggaaagcctgagactagatcccaaagctcagaatgcctctgagaaccagaatcactcctttgagaggcgctccttgcaggaaaaagagaggctcccagagtggtagcctctcagtgaaaatgcatcctaaaaattcaatgtttataccaggctcatgacactaagatgtgacatctggacacgaggggtcagccacgtggatacatccctcccagattgcatctccaggaatcactctgctagcagaatgggcgccccatcccttactatgctgctcctcctcaaagtgcagcccagaaggacccaggcctttgatgcacattgggtgggtctcccactactttagttgaaatgggagcatgctggagtcggcgttctgttgcttctggtgagaaggacatcccattgacccctggccaccaggtccagtattccatccttccttctgtcccagcctatcgccctccccaccaggcccacccccacaacttctcctcaagggaggttgctcccgcagctggagggcttgcacagaccagcagtcacagaaatcattcttcctgctgtactgggccttaactgcctgcaaatgtccagcactactgcataggatgccagagccaccgaaggaaaacacagccaagtttaataataataaaaggaaaaatctcagcctgcagaactctggttttgacccaccatcggccagatgcacatcttcagggcctgttgagcaccttctgaaaagcagggctcgtaatagactccagcacattccatcagagtcaggaaaactgcggtgagtcccagagaatctagggtgcagggcagggagcaggagtcataaggagtgataacctaaactgtgtgtagtcagcggggagggtcttatgttatcaggtgaaatgagagccagtaagttagttgatcctgtcacagatataaccctgataacaccccatagatacgcgacacgtgtgtcctgcccctgctttccccatccaacatggttcttctgttccacagacattaaaggggctttctgcaattaaaaaaagc

SEQ ID NO: 427389 - DNA, 3176 bp, Homo sapiens
ccctctcggggccgcgcgggtgcccgggcggcggcggcgacgcgacgtcgcgaggaggaggaggcggcgggggtccaggaggccggccagcgcatggaggaggaggccatgaacggcgaccggactgagagcgactggcaggggctggtgagcgagtacctggtgtgtaagaggaagctggagagtaagaaggaagccctgctgatcctctccaaggagctggacacctgtcaacaggaaagggaccagtacaaactcatggccaatcagctccgggagcgccaccagtcactgaagaagaagtaccgagagctgattgatggagatccatcacttcctcctgaaaaaaggaaacaggctaatcttgcacaactattgagagattctcaggaccgaaataaacatctgggagaagaaattaaagaacttcagcaaaggcttggagaagtccagggcgacaacaaggggaggctcagaagcaagaagaagatgaaagttgtgccgctgctgaggcgttgacagcgcctgaggatgctgggaggcccgctgtcaactccccagcaaatcagagccgcgggaaccaatgcaagctctttcatccttcattaccccagttaccttctgaggaagaagtaaacagccttgggagggaaataattaaactgacaaaggaacaggcagctgcagaactggaagaggtcagaagagagagtcccatagaaggtcagaggagtgagacggggccagccccgccaggcctggccatccagggggagctccctaaatctcacctggactccttcgaggccagccggccagcagccaaagcttccacaccggaagacggcaaagggatcccagagggcggaggcatgaggagcaccgtgaaaacctgaaggggagagggatctgacacaatgacacattgaaagccccagagagggtcaagaatgaagcatcggaatggtgcgctcacgtcgccttctcctgaaatacctccgagtctgcaagtgagaaaacgcgctgatcctgttgcaaactgtgaatattctgatgatgccagtacagtttgatttattaaatgtaggtcctcaagcttctcagtgtcatctcttttctgccagagagtgctactgtgaacagggccaggcccaggaatcgtgtccaccatatggctggttttcagcatccgtctttctgtcagcttttgttttatcagagataagatgtttttgtattagcatttaatgttgtcaatcaaaattatgggaagagctagaaactgatggggtttttaatcaggtccccatcttggtcaaggttaggcagctggagaggaaggtataattgagcaaaacgtgtccagaggacccatggctgcaccccatcaagtcagggcccaggaggactgcctggcatgggtgtgcttggcattgtgcccacagcactgctgtcgtggtacagactggcagttggaaggggccttaagccggctgagaagtttgggcttctgggttgaaatccacggccccggttgaggcctgtgtgctgagtgccagagctggagttttctagcttgtaaatctggagaattaactgatctgaagtgactgggaggggtgagcataaaagccggggaacaggactcccagtggtggtctggttttttttgtgagatgagatgagagctaccacctggaaatgctcattctctgcattcagcctgtctcacatacaggattgtatggccatttcaggtttgggaaagatctacctgctgggagccagtctagtttcctgcaccacctggaacttccaaacccttcactccttcaacagaatgttgaggctgcctcatttgtgccaccaagtacgggaatcttaaagacagaaacagagctcatgaccttttatgggaaagagagaggaaaacaaaacaacttcacaacagcatggcaaggggggatgtggaaccaaggacatgatacagggatgggaaaggagggcatgctcaattctagctggttctttcctttcagataaaaatgagcttttctagttggcatccggcactgcagaaaactaaaagtcatccagccatagctttttccttccctggaaagcctgagactagatcccaaagctcagaatgcctctgagaaccagaatcactcctttgagaggcgctccttgcaggaaaaagagaggctcccagagtggtagcctctcagtgaaaatgcatcctaaaaattcaatgtttataccaggctcatgacactaagatgtgacatctggacacgaggggtcagccacgtggatacatccctcccagattgcatctccaggaatcactctgctagcagaatgggcgccccatcccttactatgctgctcctcctcaaagtgcagcccagaaggacccaggcctttgatgcacattgggtgggtctcccactactttagttgaaatgggagcatgctggagtcggcgttctgttgcttctggtgagaaggacatcccattgacccctggccaccaggtccagtattccatccttccttctgtcccagcctatcgccctccccaccaggcccacccccacaacttctcctcaagggaggttgctcccgcagctggagggcttgcacagaccagcagtcacagaaatcattcttcctgctgtactgggccttaactgcctgcaaatgtccagcactactgcataggatgccagagccaccgaaggaaaacacagccaagtttaataataataaaaggaaaaatctcagcctgcagaactctggttttgacccaccatcggccagatgcacatcttcagggcctgttgagcaccttctgaaaagcagggctcgtaatagactccagcacattccatcagagtcaggaaaactgcggtgagtcccagagaatctagggtgcagggcagggagcaggagtcataaggagtgataacctaaactgtgtgtagtcagcggggagggtcttatgttatcaggtgaaatgagagccagtaagttagttgatcctgtcacagatataaccctgataacaccccatagatacgcgacacgtgtgtcctgcccctgctttccccatccaacatggttcttctgttccacagacattaaaggggctttctgcaattaaaaaaagc

SEQ ID NO: 427390 - DNA, 2283 bp, Homo sapiens
ccctctcggggccgcgcgggtgcccgggcggcggcggcgacgcgacgtcgcgaggaggaggaggcggcgggggtccaggaggccggccagcgcatggaggaggaggccatgaacggcgaccggactgagagcgactggcaggggctggtgagcgagtacctggtgtgtaagaggaagctggagagtaagaaggaagccctgctgatcctctccaaggagctggacacctgtcaacaggaaagggaccagtacaaactcatggccaatcagctccgggagcgccaccagtcactgaagaagaagtaccgagagctgattgatggagatccatcacttcctcctgaaaaaaggaaacaggctaatcttgcacaactattgagagattctcaggaccgaaataaacatctgggagaagaaattaaagaacttcagcaaaggcttggagaagtccagggcgacaacaagctcttgaggatgacgattgccaaacaaaggctcggagacgaagcaatcggcgtgcgacactttgcagcccatgagcgtgaagacttggtgcagcagctagagcgagctaaggaacagattgagtctctggagcacgacctgcaggcttctgtggacgagcttcaggatgttaaagaagaacggtcttcctaccaggacaaagtggagaggctcaaccaggagctgaaccatatcctgagtgggcacgagaaccgcatcattgacgtggacgccctgtgtatggagaacaggtaccttcaagagagattaaagcaactccatgaagaggtcaacctcttgaaatcaaacattgccaaatacaagaatgctctggagagacggaaaaactcgaagggccagggtaaatccagcagcagtgctctgacaggagtcctgtctgcaaagcaagttcaggatctgctatctgaggatcatggatgcagcctcccagctactccgcagtccatttctgacctgaaatctctggcaacagccctgttggaaacaatccacgagaaaaacatggtcattcagcaccagaggcaaaccaacaaaatcctagggaatcgggtggctgagctggaaaaaaaattaagaactctggaagtttctggtttgtggagtcttccagggggcaaggacaccatactgttcagcgaccccactcttcctagtggacagaggtcgagatccccactgctgaagtttgtcgagcagcccactgagaacaaagcagatcccaaggatggggaggctcagaagcaagaagaagatgaaagttgtgccgctgctgaggcgttgacagcgcctgaggatgctgggaggcccgctgtcaactccccagcaaatcagagccgcgggaaccaatgcaagctctttcatccttcattaccccagttaccttctgaggaagaagtaaacagccttgggagggaaataattaaactgacaaaggaacaggcagctgcagaactggaagaggtcagaagagagagtcccatagaaggtcagaggagtgagacggggccagccccgccaggcctggccatccagggggagctccctaaatctcacctggactccttcgaggccagccggccagcagccaaagcttccacaccggaagacggcaaagggatcccagagggcggaggcatgaggagcaccgtgaaaacctgaaggggagagggatctgacacaatgacacattgaaagccccagagagggtcaagaatgaagcatcggaatggtgcgctcacgtcgccttctcctgaaatacctccgagtctgcaagtgagaaaacgcgctgatcctgttgcaaactgtgaatattctgatgatgccagtacagtttgatttattaaatgtaggtcctcaaaaaaaaaaaaaaaaaaaaaaaaaaaaaaaaaaaaaaaaaaaaaaaaaaaaaaaaacctcgagtttttttttttttggagacagagtctaactctgttgcccaggctggagtgcaggggcaccatctaagctcactgcaacctttgcctcctgggttcaagtgatgctgtgcctcagcctccagagtagctgggattacaggcgtgtgccaccacgtccagctaatttttgcatttttagtagagacaaggtttcaccatgttggccaggctggtctcaaactcctgacctcaagagatccatccaccttggcctcccaaaatgctgagattacaggcgtgagccaccattcccggcctcttccaatattatttcatttactcagcaaataataattgaggg

SEQ ID NO: 427391 - DNA, 333 bp, Homo sapiens
gtaggtggccaaactcttgtgttggggggtgggcgcgaaggaagtgggacgaggctaccagaagtgaatgtcaaccagctggaacgacggacctgcagggaaggtgagacccctcaaatcaagaaggaaacttattaaactagaatggtgcttctgctttatatcagcatcttggctatcagctggagccaagcaaggaaagggtaccagccatactgaatgcttactctgagctacacactgagtagtatgtatttcatggatgagttccataaaataatcgcctgggtgacttgacccacctctcctccagctcttcttttaggggagaaa

SEQ ID NO: 427392 - DNA, 3293 bp, Homo sapiens
  misc_feature (57)..(57): n is a, c, g, or t
  misc_feature (69)..(69): n is a, c, g, or t
  misc_feature (83)..(83): n is a, c, g, or t
cccgggacaggtaacaggagctgggcatatcgggggggggtgagaagcggagtcatngacgtggacgcncgtgtatggagaanaggtaccttcaagagagattaaagcaactccatgaagaggtcaacctcttgaaatcaaacattgccaaatacaagaatgctctggagagacggaaaaactcgaagggccagggtaaatccagcagcagtgctctgacaggagtcctgtctgcaaagcaagttcaggatctgctatctgaggatcatggatgcagcctcccagctactccgcagtccatttctgacctgaaatctctggcaacagccctgttggaaacaatccacgagaaaaacatggtcattcagcaccagaggcaaaccaacaaaatcctagggaatcgggtggctgagctggaaaaaaaattaagaactctggaagtttctggtttgtggagtcttccagggggcaaggacaccatactgttcagcgaccccactcttcctagtggacagaggtcgagatccccactgctgaagtttgtcgagcagcccactgagaacaaagcagatcccaaggatggggaggctcagaagcaagaagaagatgaaagttgtgccgctgctgaggcgttgacagcgcctgaggatgctgggaggcccgctgtcaactccccagcaaatcagagccgcgggaaccaatgcaagctctttcatccttcattaccccagttaccttctgaggaagaagtaaacagccttgggagggaaataattaaactgacaaaggaacaggcagctgcagaactggaagaggtcagaagagagagtcccatagaaggtcagaggagtgagacggggccagccccgccaggcctggccatccagggggagctccctaaatctcacctggactccttcgaggccagccggccagcagccaaagcttccacaccggaagacggcaaagggatcccagagggcggaggcatgaggagcaccgtgaaaacctgaaggggagagggatctgacacaatgacacattgaaagccccagagagggtcaagaatgaagcatcggaatggtgcgctcacgtcgccttctcctgaaatacctccgagtctgcaagtgagaaaacgcgctgatcctgttgcaaactgtgaatattctgatgatgccagtacagtttgatttattaaatgtaggtcctcaagcttctcagtgtcatctcttttctgccagagagtgctactgtgaacagggccaggcccaggaatcgtgtccaccatatggctggttttcagcatccgtctttctgtcagcttttgttttatcagagataagatgtttttgtattagcatttaatgttgtcaatcaaaattatgggaagagctagaaactgatggggtttttaatcaggtccccatcttggtcaaggttaggcagctggagaggaaggtataattgagcaaaacgtgtccagaggacccatggctgcaccccatcaagtcagggcccaggaggactgcctggcatgggtgtgcttggcattgtgcccacagcactgctgtcgtggtacagactggcagttggaaggggccttaagccggctgagaagtttgggcttctgggttgaaatccacggccccggttgaggcctgtgtgctgagtgccagagctggagttttctagcttgtaaatctggagaattaactgatctgaagtgactgggaggggtgagcataaaagccggggaacaggactcccagtggtggtctggttttttttgtgagatgagatgagagctaccacctggaaatgctcattctctgcattcagcctgtctcacatacaggattgtatggccatttcaggtttgggaaagatctacctgctgggagccagtctagtttcctgcaccacctggaacttccaaacccttcactccttcaacagaatgttgaggctgcctcatttgtgccaccaagtacgggaatcttaaagacagaaacagagctcatgaccttttatgggaaagagagaggaaaacaaaacaacttcacaacagcatggcaaggggggatgtggaaccaaggacatgatacagggatgggaaaggagggcatgctcaattctagctggttctttcctttcagataaaaatgagcttttctagttggcatccggcactgcagaaaactaaaagtcatccagccatagctttttccttccctggaaagcctgagactagatcccaaagctcagaatgcctctgagaaccagaatcactcctttgagaggcgctccttgcaggaaaaagagaggctcccagagtggtagcctctcagtgaaaatgcatcctaaaaattcaatgtttataccaggctcatgacactaagatgtgacatctggacacgaggggtcagccacgtggatacatccctcccagattgcatctccaggaatcactctgctagcagaatgggcgccccatcccttactatgctgctcctcctcaaagtgcagcccagaaggacccaggcctttgatgcacattgggtgggtctcccactactttagttgaaatgggagcatgctggagtcggcgttctgttgcttctggtgagaaggacatcccattgacccctggccaccaggtccagtattccatccttccttctgtcccagcctatcgccctccccaccaggcccacccccacaacttctcctcaagggaggttgctcccgcagctggagggcttgcacagaccagcagtcacagaaatcattcttcctgctgtactgggccttaactgcctgcaaatgtccagcactactgcataggatgccagagccaccgaaggaaaacacagccaagtttaataataataaaaggaaaaatctcagcctgcagaactctggttttgacccaccatcggccagatgcacatcttcagggcctgttgagcaccttctgaaaagcagggctcgtaatagactccagcacattccatcagagtcaggaaaactgcggtgagtcccagagaatctagggtgcagggcagggagcaggagtcataaggagtgataacctaaactgtgtgtagtcagcggggagggtcttatgttatcaggtgaaatgagagccagtaagttagttgatcctgtcacagatataaccctgataacaccccatagatacgcgacacgtgtgtcctgcccctgctttccccatccaacatggttcttctgttccacagacattaaaggggctttctgcaattaaaaaaagc

SEQ ID NO: 427393 - DNA, 1882 bp, Homo sapiens
ccctctcggggccgcgcgggtgcccgggcggcggcggcgacgcgacgtcgcgaggaggaggaggcggcgggggtccaggaggccggccagcgcatggaggaggaggccatgaacggcgaccggactgagagcgactggcaggggctggtgagcgagtacctggtgtgtaagaggaagctggagagtaagaaggaagccctgctgatcctctccaaggagctggacacctgtcaacaggaaagggaccagtacaaactcatggccaatcagctccgggagcgccaccagtcactgaagaagaagtaccgagagctgattgatggagatccatcacttcctcctgaaaaaaggaaacaggctaatcttgcacaactattgagagattctcaggaccgaaataaacatctgggagaagaaattaaagaacttcagcaaaggcttggagaagtccagggcgacaacaagctcttgaggatgacgattgccaaacaaaggctcggagacgaagcaatcggcgtgcgacactttgcagcccatgagcgtgaagacttggtgcagcagctagagcgagctaaggaacagattgagtctctggagcacgacctgcaggcttctgtggacgagcttcaggatgttaaagaagaacggtcttcctaccaggacaaagtggagaggctcaaccaggagctgaaccatatcctgagtgggcacgagaaccgcatcattgacgtggacgccctgtgtatggagaacaggtaccttcaagagagattaaagcaactccatgaagaggtcaacctcttgaaatcaaacattgccaaatacaagaatgctctggagagacggaaaaactcgaagggccagggtaaatccagcagcagtgctctgacaggagtcctgtctgcaaagcaagttcaggatctgctatctgaggatcatggatgcagcctcccagctactccgcagtccatttctgacctgaaatctctggcaacagccctgttggaaacaatccacgagaaaaacatggtcattcagcaccagaggcaaaccaacaaaatcctagggaatcgggtggctgagctggaaaaaaaattaagaactctggaagtttctggtttgtggagtcttccagggggcaaggacaccatactgttcagcgaccccactcttcctagtggacagaggtcgagatccccactgctgaagtttgtcgagcagcccactgagaacaaagcagatcccaaggatggggaggctcagaagcaagaagaagatgaaagttgtgccgctgctgaggcgttgacagcgcctgaggatgctgggaggcccgctgtcaactccccagcaaatcagagccgcgggaaccaatgcaagctctttcatccttcattaccccagttaccttctgaggaagaagtaaacagccttgggagggaaataattaaactgacaaaggaacaggcagctgcagaactggaagaggtcagaagagagagtcccatagaaggtcagaggagtgagacggggccagccccgccaggcctggccatccagggggagctccctaaatctcacctggactccttcgaggccagccggccagcagccaaagcttccacaccggaagacggcaaagggatcccagagggcggaggcatgaggagcaccgtgaaaacctgaaggggagagggatctgacacaatgacacattgaaagccccagagagggtcaagaatgaagcatcggaatggtgcgctcacgtcgccttctcctgaaatacctccgagtctgcaagtgagaaaacgcgctgatcctgttgcaaactgtgaatattctgatgatgccagtacagtttgatttattaaatgtaggtcctcaa

SEQ ID NO: 427394 - DNA, 524 bp, Homo sapiens
agaggttaaaaagataacagatggactgcatgcccttcaagaagcaagtaataaagatgctgaagctctggccgcgcacagcagcacttcaatgctgtttccgctggcctgtccagtaatgaagatggagcagaagcaactcttgctggtcaaatgatggcctgtaaaaatgatataagtaaagctcagacagaagccaaacaggctcagatgaagttgaagcatgctcagctgaggaattaaaagaaatgcaagataaagttataaagcttcaggaagaattgtctgagaatgataaaaaaataaaagcacttaatcatgaaatagaagaattggaaaaaagaaaagataaggaaactggaggtatacttcgatctttagaagatgctcttgcagaggctcagcgagttaatactaaatctcaaagcgcatttgatctcaagaagaaaaatctggcatgtgaggaaagcaaacgcaaagagctggaaaaaaatatggttgaggtaagtgagcttaatgtgcca

SEQ ID NO: 427395 - DNA, 6442 bp, Homo sapiens
ggcgccgaaattcaaaggaataaatagttccggcgcgggtgttgagagcggtgtggtaggtgttgtagccgctatggtgaagttcgctttgtagcggccccggctagagagttggcctgttccctgcctttgtgacccggaggagcttttggggtgcgtcaagcccctggcctgaggcagcgaactggtttgtggcctgtttgattcctgtcagaggtttgctgacccaagacagtatcgaaaatgcatattaagtcaattattctagagggattcaagtcctatgctcagaggaccgaagtcaatggttttgaccccctcttcaatgctatcactggcttaaatggtagtgggaaatccaacatattggactccatctgctttttgctgggcatctccaacctgtctcaggttcgggcttctaatttacaagatttagtttacaaaaatgggcaggctggtattaccaaagcctctgtgtcaatcacttttgataattctgacaaaaagcaaagtcctttaggatttgaggttcatgatgaaatcacagtaacaaggcaggtggttattggtggtagaaataaatatttaatcaatggagtcaatgccaacaacaccagagtacaggatctcttctgttctgttggccttaatgttaacaaccctcactttctcatcatgcagggccgaattacaaaagtattgaatatgaaacctccagagattttatccatgatagaagaagcagctggaaccaggatgtatgaatacaaaaaaatagctgcacagaaaactatagaaaaaaaggaggctaagctgaaagaaattaagacgatacttgaagaagagattactccaaccattcaaaaattaaaagaggaaagatcgtcctacttggagtaccaaaaagtaatgagagaaatagaacatttgagtcgtttatatattgcttatcagtttttgctggctgaagataccaaagtacgctcagctgaggaattaaaagaaatgcaagataaagttataaagcttcaggaagaattgtctgagaatgataaaaaaataaaagcacttaatcatgaaatagaagaattggaaaaaagaaaagataaggaaactggaggtatacttcgatctttagaagatgctcttgcagaggctcagcgagttaatactaaatctcaaagcgcatttgatctcaagaagaaaaatctggcatgtgaggaaagcaaacgcaaagagctggaaaaaaatatggttgaggactcaaaaactttagcagcaaaggaaaaagaggttaaaaagataacagatggactgcatgcccttcaagaagcaagtaataaagatgctgaagctctggcagctgcacagcagcacttcaatgctgtttccgctggcctgtccagtaatgaagatggagcagaagcaactcttgctggtcaaatgatggcctgtaaaaatgatataagtaaagctcagacagaagccaaacaggctcagatgaagttgaagcatgctcaacaggaattaaagaataaacaagctgaagttaagaagatggatagtggctacaggaaggatcaagaagctctagaagctgtaaaaagacttaaagaaaaacttgaagctgaaatgaaaaagctaaattatgaagaaaataaagaggaaagccttttggaaaagcgcaggcagctgtctcgtgatattggtagattgaaagaaacatatgaagctctattagccagatttcccaatcttcgatttgcatacaaggatccagagaagaactggaatagaaattgtgtgaaaggacttgtggcttctctgattagtgtgaaagacacttctgcaaccacagctttagaattagtggctggagaacgactctacaatgttgtagtagacacagaagttactggtaaaaagctactagaaaggggggaactgaaacgtcgatacactataattccactcaataaaatttcagccagatgtattgcaccagaaactctgagagttgctcagaatcttgttggccctgacaacgttcatgtggctctttccttggttgaatataaaccagaacttcagaaagcaatggagtttgtctttggaacaacatttgtttgtgacaatatggataatgccaaaaaagtggcctttgataagaggataatgactagaactgtaactctcggaggtgatgtgtttgatcctcatgggacattgagtggaggtgctcgatcccaggcagcttccattttaaccaagtttcaagaactcaaagatgttcaggatgaactgagaatcaaagagaatgagctgcgggctctagaagaggaattagcaggtcttaaaaacactgctgaaaagtatcgccaactaaaacagcagtgggagatgaaaactgaagaggcagatttattacaaaccaagctccagcaaagctcatatcacaagcaacaagaagaattagatgcccttaaaaaaaccattgaggaaagtgaggagactttgaaaaacactaaagaaatccaaagaaaagcagaagaaaaatatgaagtattggaaaataaaatgaaaaatgcagaagctgaaagagagcgagaactgaaagatgctcagaaaaaactggattgtgccaaaacaaaggcagatgcatctagcaagaagatgaaagaaaaacaacaggaagttgaagctatcactctggaactggaagagctcaagagagagcatacatcttacaaacaacagcttgaagctgtaaatgaagctatcaaatcctatgaaagtcagattgaagtaatggcagctgaggtggctaaaaataaggagtcagtaaataaagctcaagaagaggtgaccaagcaaaaagaggtgataacagcccaagacactgtaattaaagctaaatatgcagaagtggcaaaacacaaggagcaaaacaatgattctcagcttaaaattaaggaattagaccacaacatcagcaaacataaacgggaggctgaagatggtgctgcaaaggtatccaaaatgttgaaagattatgactggattaatgcagagagacacctctttggccaacccaatagtgcctatgatttcaaaactaacaaccctaaagaagctggtcagagacttcagaagttgcaagaaatgaaggagaaactaggaagaaatgtcaatatgagagctatgaatgtattgacagaagctgaagagcgatacaatgacttgatgaagaagaagagaattgtagaaaatgacaaatccaaaattcttacaactatagaagaccttgaccagaagaaaaaccaagccctaaatattgcatggcaaaaggtgaacaaggactttgggtctattttttctactcttttgcctggtgctaatgctatgcttgcaccaccagagggtcaaactgttttggatggtctggagttcaaggttgccttgggaaatacctggaaagaaaacctaactgaacttagtggtggtcagaggtctttagtggccttgtcattaatactgtccatgcttctcttcaaacctgctccaatttatatccttgatgaggtagatgcagccttggatctttctcatacccaaaacattggacagatgctgcgtactcatttcacacattctcagttcattgtggtgtcactaaaagaaggtatgttcaacaatgcaaacgttcttttcaaaaccaagtttgtggatggtgtttctacagtagccagatttactcaatgtcaaaatggaaagatttcaaaggaagcaaaatccaaggcaaaaccacccaaaggagcacatgtggaagtttaaactacaaagttatttcttcatcttgacctgtttttttaaatgtaaacttttaaggacttgagataactaatttgtttatatacaaaaattaatgttactgtgttacttaacccatgttttctctttatataatcacttatcgcttacaaatgagcatatattcctcatctcttaactagtctaattatggtccaattattgtggttgtgattttatgcatatcatcaaatgtttttttcttatgcgggtcttttatatattagggatcctgagatacccgattctatatgtaaaagctaatatacaaaaaagcagattaaattacatgataaatgtagctgatcatcagtgtttaattgatttaattcctaaggcaatattaatgtgttttctaaagtcattcaggtaaggaagaattataaatcaggtaactggaccaacaaagggaacacatataaagctattatgcatgcatggagccgtttgaggctagttttttaaggccacaactccagacccctgatttagactgagataggaaacagatcttgaaagaatccttattttaatgatacatgaatatcatgttcctatacgcttaataattggtctctacgttttaatgatacatgaatatcatgttcctatacgcttaataattggtctctacgactttaatgtttttgtttttttaagctgtgtaagtatttttaaatcaaagcttaggaggtgtgttgcgtggtactatctgctgcaaatttatctgaagtttgttaatattttccaagatttttgtcagccttttcataatccagtcattaacaacctattggtaaacaagaatgtaggtgccagtagactaaaccaaatttatttttccctgagtctgatatatatatgtataaatataaataactcaatccatctgttccaccaaaataactcaaaagttggatgattatttgtcttccgctttccagttcaaagggatgaaattcctttagaacttgaaagatgacactagcgaacaccatgagaatactgtctacagtttttggtacgtcatcactagaacagtgaccccaaactgaatcatgaaaggtctgacatgatgtaatctgatcttccatgtgttattttggccccacatctcttcttgattttttagtcttatttccttagtgttattatcatacttcccctgatatatggccgtacttcctggccctgggcttgacatttcccacccttcattctccatacatatgagatgtcagaaaacatgcagtaattgatattatgggacacattggaaaggattgaatctggaattagttctgtccactgtggaggggagaggaaataatgctgtaaatgttgagttacagaaagtccaatgtcaaatatagtttttttgtttcctttcaaatgtattacagactgtgccaaaacagttaccaattcacactgtcaatattaaagtataccatagtatacaaattagtcagtacttgctgttaattttaatatttctgatttaacagttagttattaagtggtacttcattgctgttttagccaacgttttaaaaataatttgggagtttgactattttggcttacgtactcatttccttttctctgctaaaaatgttttgcttgtgtgcgttcctgatttttgtcttgtataatcttgatctttgaaaaccctcaaacatgtattaaattgttgtaactttttttcattagagggaagacattaaggggattggggacatttgtttcacacatctgcagtaatatgagttaactaatatttaacaagctctttctttacattagctgctgttctcatttgtatgtattgtcatatttaatcctcagagtaacctagtgaggtaaatactgttgttgtcagcatggtgtaatcgaggaattgagtgagttgagcagaaaagttaggaaacttgctcagggtgataatacagttaggagtgtcagggcccatggacaaatcttgtcagtctccagaacctaagatatactacgtcactgacagcttgaacatttgtatttattgtacagaataaatttaagaaaaatacctgtatgagcagtatgtacaacgtgaatgttaccttaaagaagaacctcaaccatgtgaagagaggattcattgtggtggtggcggttttggcatttcaagtaagctcacagcaaatgcaaagcaaagacatgaaattttctcttccaatagggtggcataatctaaaggccaacattcccacagatgataaatatagattctgagcaaaatactagaaacaactacctgagagttcaggaaactgaagaaaaactagaaagattttggatgggagataaaatacggaggaagagacaggcacaagctaaggttaatgtttttaacctaagtaccagctatagtcatgatgcagctgtaggacagctaaggctgcagtggaaagcctggggtctttctggtctggagaactaaaagatgggatctgggctaaccacagcttccagaaagtgaaggagacgtctcagaagggataaacgaggacctggagaaagaggtccc

SEQ ID NO: 427396 - DNA, 5339 bp, Homo sapiens
ggcgccgaaattcaaaggaataaatagttccggcgcgggtgttgagagcggtgtggtaggtgttgtagccgctatggtgaagttcgctttgtagcggccccggctagagagttggcctgttccctgcctttgtgacccggaggagcttttggggtgcgtcaagcccctggcctgaggcagcgaactggtttgtggcctgtttgattcctgtcagaggtttgctgacccaagacagtatcgaaaatgcatattaagtcaattattctagagggattcaagtcctatgctcagaggaccgaagtcaatggttttgaccccctcttcaatgctatcactggcttaaatggtagtgggaaatccaacatattggactccatctgctttttgctgggcatctccaacctgtctcaggttcgggcttctaatttacaagatttagtttacaaaaatgggcaggctggtattaccaaagcctctgtgtcaatcacttttgataattctgacaaaaagcaaagtcctttaggatttgaggttcatgatgaaatcacagtaacaaggcaggtggttattggtggtagaaataaatatttaatcaatggagtcaatgccaacaacaccagagtacaggatctcttctgttctgttggccttaatgttaacaaccctcactttctcatcatgcagggccgaattacaaaagtattgaatatgaaacctccagagattttatccatgatagaagaagcagctggaaccaggatgtatgaatacaaaaaaatagctgcacagaaaactatagaaaaaaaggaggctaagctgaaagaaattaagacgatacttgaagaagagattactccaaccattcaaaaattaaaagaggaaagatcgtcctacttggagtaccaaaaagtaatgagagaaatagaacatttgagtcgtttatatattgcttatcagtttttgctggctgaagataccaaagtacgctcagctgaggaattaaaagaaatgcaagataaagttataaagcttcaggaagaattgtctgagaatgataaaaaaataaaagcacttaatcatgaaatagaagaattggaaaaaagaaaagataaggaaactggaggtatacttcgatctttagaagatgctcttgcagaggctcagcgagttaatactaaatctcaaagcgcatttgatctcaagaagaaaaatctggcatgtgaggaaagcaaacgcaaagagctggaaaaaaatatggttgaggactcaaaaactttagcagcaaaggaaaaagaggttaaaaagataacagatggactgcatgcccttcaagaagcaagtaataaagatgctgaagctctggcagctgcacagcagcacttcaatgctgtttccgctggcctgtccagtaatgaagatggagcagaagcaactcttgctggtcaaatgatggcctgtaaaaatgatataagtaaagctcagacagaagccaaacaggctcagatgaagttgaagcatgctcaacaggaattaaagaataaacaagctgaagttaagaagatggatagtggctacaggaaggatcaagaagctctagaagctgtaaaaagacttaaagaaaaacttgaagctgaaatgaaaaagctaaattatgaagaaaataaagaggaaagccttttggaaaagcgcaggcagctgtctcgtgatattggtagattgaaagaaacatatgaagctctattagccagatttcccaatcttcgatttgcatacaaggatccagagaagaactggaatagaaattgtgtgaaaggacttgtggcttctctgattagtgtgaaagacacttctgcaaccacagctttagaattagtggctggagaacgactctacaatgttgtagtagacacagaagttactggtaaaaagctactagaaaggggggaactgaaacgtcgatacactataattccactcaataaaatttcagccagatgtattgcaccagaaactctgagagttgctcagaatcttgttggccctgacaacgttcatgtggctctttccttggttgaatataaaccagaacttcagaaagcaatggagtttgtctttggaacaacatttgtttgtgacaatatggataatgccaaaaaagtggcctttgataagaggataatgactagaactgtaactctcggaggtgatgtgtttgatcctcatgggacattgagtggaggtgctcgatcccaggcagcttccattttaaccaagtttcaagaactcaaagatgttcaggatgaactgagaatcaaagagaatgagctgcgggctctagaagaggaattagcaggtcttaaaaacactgctgaaaagtatcgccaactaaaacagcagtgggagatgaaaactgaagaggcagatttattacaaaccaagctccagcaaagctcatatcacaagcaacaagaagaattagatgcccttaaaaaaaccattgaggaaagtgaggagactttgaaaaacactaaagaaatccaaagaaaagcagaagaaaaatatgaagtattggaaaataaaatgaaaaatgcagaagctgaaagagagcgagaactgaaagatgctcagaaaaaactggattgtgccaaaacaaaggcagatgcatctagcaagaagatgaaagaaaaacaacaggaagttgaagctatcactctggaactggaagagctcaagagagagcatacatcttacaaacaacagcttgaagctgtaaatgaagctatcaaatcctatgaaagtcagattgaagtaatggcagctgaggtggctaaaaataaggagtcagtaaataaagctcaagaagaggtgaccaagcaaaaagaggtgataacagcccaagacactgtaattaaagctaaatatgcagaagtggcaaaacacaaggagcaaaacaatgattctcagcttaaaattaaggaattagaccacaacatcagcaaacataaacgggaggctgaagatggtgctgcaaaggtatccaaaatgttgaaagattatgactggattaatgcagagagacacctctttggccaacccaatagtgcctatgatttcaaaactaacaaccctaaagaagctggtcagagacttcagaagttgcaagaaatgaaggagaaactaggaagaaatgtcaatatgagagctatgaatgtattgacagaagctgaagagcgatacaatgacttgatgaagaagaagagaattgtagaaaatgacaaatccaaaattcttacaactatagaagaccttgaccagaagaaaaaccaagccctaaatattgcatggcaaaaggtgaacaaggactttgggtctattttttctactcttttgcctggtgctaatgctatgcttgcaccaccagagggtcaaactgttttggatggtctggagttcaaggttgccttgggaaatacctggaaagaaaacctaactgaacttagtggtggtcagaggtctttagtggccttgtcattaatactgtccatgcttctcttcaaacctgctccaatttatatccttgatgaggtagatgcagccttggatctttctcatacccaaaacattggacagatgctgcgtactcatttcacacattctcagttcattgtggtgtcactaaaagaaggtatgttcaacaatgcaaacgttcttttcaaaaccaagtttgtggatggtgtttctacagtagccagatttactcaatgtcaaaatggaaagatttcaaaggaagcaaaatccaaggcaaaaccacccaaaggagcacatgtggaagtttaaactacaaagttatttcttcatcttgacctgtttttttaaatgtaaacttttaaggacttgagataactaatttgtttatatacaaaaattaatgttactgtgttacttaacccatgttttctctttatataatcacttatcgcttacaaatgagcatatattcctcatctcttaactagtctaattatggtccaattattgtggttgtgattttatgcatatcatcaaatgtttttttcttatgcgggtcttttatatattagggatcctgagatacccgattctatatgtaaaagctaatatacaaaaaagcagattaaattacatgataaatgtagctgatcatcagtgtttaattgatttaattcctaaggcaatattaatgtgttttctaaagtcattcaggtaaggaagaattataaatcaggtaactggaccaacaaagggaacacatataaagctattatgcatgcatggagccgtttgaggctagttttttaaggccacaactccagacccctgatttagactgagataggaaacagatcttgaaagaatccttattttaatgatacatgaatatcatgttcctatacgcttaataattggtctctacgttttaatgatacatgaatatcatgttcctatacgcttaataattggtctctacgactttaatgtttttgtttttttaagctgtgtaagtatttttaaatcaaagcttaggaggtgtgttgcgtggtactatctgctgcaaatttatctgaagtttgttaatattttccaagatttttgtcagccttttcataatccagtcattaacaacctattggtaaacaagaatgtaggtgccagtagactaaaccaaatttatttttccctgagtctgatatatatatgtataaatataaataactcaatccatctgttccaccaaaataactcaaaagttggatgattatttgtcttccgctttccagttcaaagggatgaaattcctttagaacttgaaagatgacactagcgaacaccatgagaatactgtctacagtttttggtacgtcatcactagaacagtgaccccaaactgaatcatgaaaggtctgacatgatgtaatctgatcttccatgtgttattttggccccacatctcttcttgattttttagtcttatttccttagtgttattatcatacttcccctgatatatggccgtacttcctggccctgggcttgacatttcccacccttcattctccatacatatgagatgtcagaaaacatgcagtaattgatattatgggacacattggaaaggattgaatctggaattagttctgtccactgtggaggggagaggaaataatgctgtaaatgttgagtccccccccccccaaccccgcacatagtttttcctttcggttcaaacgggtatcaaaaggaggcttttcaaaaaacaaatcacaacagacaaaattaaagtataccatagtatacaaatt

SEQ ID NO: 427397 - DNA, 6540 bp, Homo sapiens
ggcgcgggggctgtagggagggggaccagtggcagagggaccttaggtgatccttagaaataaaggctagcttctgttcgaccttggagtagggcgaagaggtgtagacaggcctggagaagcgaggtaaaagcctgagtaaaagcaagaagttggagaatatgagatacatctcatctctagtaaatacttaaatgacttcccctcctcccggagtcaagcacaattcggggatgcaatgacggacgtaggtgaagacactgcgggaacttacagacaaaactggtttgtggcctgtttgattcctgtcagaggtttgctgacccaagacagtatcgaaaatgcatattaagtcaattattctagagggattcaagtcctatgctcagaggaccgaagtcaatggttttgaccccctcttcaatgctatcactggcttaaatggtagtgggaaatccaacatattggactccatctgctttttgctgggcatctccaacctgtctcaggttcgggcttctaatttacaagatttagtttacaaaaatgggcaggctggtattaccaaagcctctgtgtcaatcacttttgataattctgacaaaaagcaaagtcctttaggatttgaggttcatgatgaaatcacagtaacaaggcaggtggttattggtggtagaaataaatatttaatcaatggagtcaatgccaacaacaccagagtacaggatctcttctgttctgttggccttaatgttaacaaccctcactttctcatcatgcagggccgaattacaaaagtattgaatatgaaacctccagagattttatccatgatagaagaagcagctggaaccaggatgtatgaatacaaaaaaatagctgcacagaaaactatagaaaaaaaggaggctaagctgaaagaaattaagacgatacttgaagaagagattactccaaccattcaaaaattaaaagaggaaagatcgtcctacttggagtaccaaaaagtaatgagagaaatagaacatttgagtcgtttatatattgcttatcagtttttgctggctgaagataccaaagtacgctcagctgaggaattaaaagaaatgcaagataaagttataaagcttcaggaagaattgtctgagaatgataaaaaaataaaagcacttaatcatgaaatagaagaattggaaaaaagaaaagataaggaaactggaggtatacttcgatctttagaagatgctcttgcagaggctcagcgagttaatactaaatctcaaagcgcatttgatctcaagaagaaaaatctggcatgtgaggaaagcaaacgcaaagagctggaaaaaaatatggttgaggactcaaaaactttagcagcaaaggaaaaagaggttaaaaagataacagatggactgcatgcccttcaagaagcaagtaataaagatgctgaagctctggcagctgcacagcagcacttcaatgctgtttccgctggcctgtccagtaatgaagatggagcagaagcaactcttgctggtcaaatgatggcctgtaaaaatgatataagtaaagctcagacagaagccaaacaggctcagatgaagttgaagcatgctcaacaggaattaaagaataaacaagctgaagttaagaagatggatagtggctacaggaaggatcaagaagctctagaagctgtaaaaagacttaaagaaaaacttgaagctgaaatgaaaaagctaaattatgaagaaaataaagaggaaagccttttggaaaagcgcaggcagctgtctcgtgatattggtagattgaaagaaacatatgaagctctattagccagatttcccaatcttcgatttgcatacaaggatccagagaagaactggaatagaaattgtgtgaaaggacttgtggcttctctgattagtgtgaaagacacttctgcaaccacagctttagaattagtggctggagaacgactctacaatgttgtagtagacacagaagttactggtaaaaagctactagaaaggggggaactgaaacgtcgatacactataattccactcaataaaatttcagccagatgtattgcaccagaaactctgagagttgctcagaatcttgttggccctgacaacgttcatgtggctctttccttggttgaatataaaccagaacttcagaaagcaatggagtttgtctttggaacaacatttgtttgtgacaatatggataatgccaaaaaagtggcctttgataagaggataatgactagaactgtaactctcggaggtgatgtgtttgatcctcatgggacattgagtggaggtgctcgatcccaggcagcttccattttaaccaagtttcaagaactcaaagatgttcaggatgaactgagaatcaaagagaatgagctgcgggctctagaagaggaattagcaggtcttaaaaacactgctgaaaagtatcgccaactaaaacagcagtgggagatgaaaactgaagaggcagatttattacaaaccaagctccagcaaagctcatatcacaagcaacaagaagaattagatgcccttaaaaaaaccattgaggaaagtgaggagactttgaaaaacactaaagaaatccaaagaaaagcagaagaaaaatatgaagtattggaaaataaaatgaaaaatgcagaagctgaaagagagcgagaactgaaagatgctcagaaaaaactggattgtgccaaaacaaaggcagatgcatctagcaagaagatgaaagaaaaacaacaggaagttgaagctatcactctggaactggaagagctcaagagagagcatacatcttacaaacaacagcttgaagctgtaaatgaagctatcaaatcctatgaaagtcagattgaagtaatggcagctgaggtggctaaaaataaggagtcagtaaataaagctcaagaagaggtgaccaagcaaaaagaggtgataacagcccaagacactgtaattaaagctaaatatgcagaagtggcaaaacacaaggagcaaaacaatgattctcagcttaaaattaaggaattagaccacaacatcagcaaacataaacgggaggctgaagatggtgctgcaaaggtatccaaaatgttgaaagattatgactggattaatgcagagagacacctctttggccaacccaatagtgcctatgatttcaaaactaacaaccctaaagaagctggtcagagacttcagaagttgcaagaaatgaaggagaaactaggaagaaatgtcaatatgagagctatgaatgtattgacagaagctgaagagcgatacaatgacttgatgaagaagaagagaattgtagaaaatgacaaatccaaaattcttacaactatagaagaccttgaccagaagaaaaaccaagccctaaatattgcatggcaaaaggtgaacaaggactttgggtctattttttctactcttttgcctggtgctaatgctatgcttgcaccaccagagggtcaaactgttttggatggtctggagttcaaggttgccttgggaaatacctggaaagaaaacctaactgaacttagtggtggtcagaggtctttagtggccttgtcattaatactgtccatgcttctcttcaaacctgctccaatttatatccttgatgaggtagatgcagccttggatctttctcatacccaaaacattggacagatgctgcgtactcatttcacacattctcagttcattgtggtgtcactaaaagaaggtatgttcaacaatgcaaacgttcttttcaaaaccaagtttgtggatggtgtttctacagtagccagatttactcaatgtcaaaatggaaagatttcaaaggaagcaaaatccaaggcaaaaccacccaaaggagcacatgtggaagtttaaactacaaagttatttcttcatcttgacctgtttttttaaatgtaaacttttaaggacttgagataactaatttgtttatatacaaaaattaatgttactgtgttacttaacccatgttttctctttatataatcacttatcgcttacaaatgagcatatattcctcatctcttaactagtctaattatggtccaattattgtggttgtgattttatgcatatcatcaaatgtttttttcttatgcgggtcttttatatattagggatcctgagatacccgattctatatgtaaaagctaatatacaaaaaagcagattaaattacatgataaatgtagctgatcatcagtgtttaattgatttaattcctaaggcaatattaatgtgttttctaaagtcattcaggtaaggaagaattataaatcaggtaactggaccaacaaagggaacacatataaagctattatgcatgcatggagccgtttgaggctagttttttaaggccacaactccagacccctgatttagactgagataggaaacagatcttgaaagaatccttattttaatgatacatgaatatcatgttcctatacgcttaataattggtctctacgttttaatgatacatgaatatcatgttcctatacgcttaataattggtctctacgactttaatgtttttgtttttttaagctgtgtaagtatttttaaatcaaagcttaggaggtgtgttgcgtggtactatctgctgcaaatttatctgaagtttgttaatattttccaagatttttgtcagccttttcataatccagtcattaacaacctattggtaaacaagaatgtaggtgccagtagactaaaccaaatttatttttccctgagtctgatatatatatgtataaatataaataactcaatccatctgttccaccaaaataactcaaaagttggatgattatttgtcttccgctttccagttcaaagggatgaaattcctttagaacttgaaagatgacactagcgaacaccatgagaatactgtctacagtttttggtacgtcatcactagaacagtgaccccaaactgaatcatgaaaggtctgacatgatgtaatctgatcttccatgtgttattttggccccacatctcttcttgattttttagtcttatttccttagtgttattatcatacttcccctgatatatggccgtacttcctggccctgggcttgacatttcccacccttcattctccatacatatgagatgtcagaaaacatgcagtaattgatattatgggacacattggaaaggattgaatctggaattagttctgtccactgtggaggggagaggaaataatgctgtaaatgttgagttacagaaagtccaatgtcaaatatagtttttttgtttcctttcaaatgtattacagactgtgccaaaacagttaccaattcacactgtcaatattaaagtataccatagtatacaaattagtcagtacttgctgttaattttaatatttctgatttaacagttagttattaagtggtacttcattgctgttttagccaacgttttaaaaataatttgggagtttgactattttggcttacgtactcatttccttttctctgctaaaaatgttttgcttgtgtgcgttcctgatttttgtcttgtataatcttgatctttgaaaaccctcaaacatgtattaaattgttgtaactttttttcattagagggaagacattaaggggattggggacatttgtttcacacatctgcagtaatatgagttaactaatatttaacaagctctttctttacattagctgctgttctcatttgtatgtattgtcatatttaatcctcagagtaacctagtgaggtaaatactgttgttgtcagcatggtgtaatcgaggaattgagtgagttgagcagaaaagttaggaaacttgctcagggtgataatacagttaggagtgtcagggcccatggacaaatcttgtcagtctccagaacctaagatatactacgtcactgacagcttgaacatttgtatttattgtacagaataaatttaagaaaaatacctgtatgagcagtatgtacaacgtgaatgttaccttaaagaagaacctcaaccatgtgaagagaggattcattgtggtggtggcggttttggcatttcaagtaagctcacagcaaatgcaaagcaaagacatgaaattttctcttccaatagggtggcataatctaaaggccaacattcccacagatgataaatatagattctgagcaaaatactagaaacaactacctgagagttcaggaaactgaagaaaaactagaaagattttggatgggagataaaatacggaggaagagacaggcacaagctaaggttaatgtttttaacctaagtaccagctatagtcatgatgcagctgtaggacagctaaggctgcagtggaaagcctggggtctttctggtctggagaactaaaagatgggatctgggctaaccacagcttccagaaagtgaaggagacgtctcagaagggataaacgaggacctggagaaagaggtccc

SEQ ID NO: 427398 - DNA, 4613 bp, Homo sapiens
ggcgcgggggctgtagggagggggaccagtggcagagggaccttaggtgatccttagaaataaaggctagcttctgttcgaccttggagtagggcgaagaggtgtagacaggcctggagaagcgaggtaaaagcctgagtaaaagcaagaagttggagaatatgagatacatctcatctctagtaaatacttaaatgacttcccctcctcccggagtcaagcacaattcggggatgcaatgacggacgtaggtgaagacactgcgggaacttacagacaaaactggtttgtggcctgtttgattcctgtcagaggtttgctgacccaagacagtatcgaaaatgcatattaagtcaattattctagagggattcaagtcctatgctcagaggaccgaagtcaatggttttgaccccctcttcaatgctatcactggcttaaatggtagtgggaaatccaacatattggactccatctgctttttgctgggcatctccaacctgtctcaggttcgggcttctaatttacaagatttagtttacaaaaatgggcaggctggtattaccaaagcctctgtgtcaatcacttttgataattctgacaaaaagcaaagtcctttaggatttgaggttcatgatgaaatcacagtaacaaggcaggtggttattggtggtagaaataaatatttaatcaatggagtcaatgccaacaacaccagagtacaggatctcttctgttctgttggccttaatgttaacaaccctcactttctcatcatgcagggccgaattacaaaagtattgaatatgaaacctccagagattttatccatgatagaagaagcagctggaaccaggatgtatgaatacaaaaaaatagctgcacagaaaactatagaaaaaaaggaggctaagctgaaagaaattaagacgatacttgaagaagagattactccaaccattcaaaaattaaaagaggaaagatcgtcctacttggagtaccaaaaagtaatgagagaaatagaacatttgagtcgtttatatattgcttatcagtttttgctggctgaagataccaaagtacgctcagctgaggaattaaaagaaatgcaagataaagttataaagcttcaggaagaattgtctgagaatgataaaaaaataaaagcacttaatcatgaaatagaagaattggaaaaaagaaaagataaggaaactggaggtatacttcgatctttagaagatgctcttgcagaggctcagcgagttaatactaaatctcaaagcgcatttgatctcaagaagaaaaatctggcatgtgaggaaagcaaacgcaaagagctggaaaaaaatatggttgaggactcaaaaactttagcagcaaaggaaaaagaggttaaaaagataacagatggactgcatgcccttcaagaagcaagtaataaagatgctgaagctctggcagctgcacagcagcacttcaatgctgtttccgctggcctgtccagtaatgaagatggagcagaagcaactcttgctggtcaaatgatggcctgtaaaaatgatataagtaaagctcagacagaagccaaacaggctcagatgaagttgaagcatgctcaacaggaattaaagaataaacaagctgaagttaagaagatggatagtggctacaggaaggatcaagaagctctagaagctgtaaaaagacttaaagaaaaacttgaagctgaaatgaaaaagctaaattatgaagaaaataaagaggaaagccttttggaaaagcgcaggcagctgtctcgtgatattggtagattgaaagaaacatatgaagctctattagccagatttcccaatcttcgatttgcatacaaggatccagagaagaactggaatagaaattgtgtgaaaggacttgtggcttctctgattagtgtgaaagacacttctgcaaccacagctttagaattagtggctggagaacgactctacaatgttgtagtagacacagaagttactggtaaaaagctactagaaaggggggaactgaaacgtcgatacactataattccactcaataaaatttcagccagatgtattgcaccagaaactctgagagttgctcagaatcttgttggccctgacaacgttcatgtggctctttccttggttgaatataaaccagaacttcagaaagcaatggagtttgtctttggaacaacatttgtttgtgacaatatggataatgccaaaaaagtggcctttgataagaggataatgactagaactgtaactctcggaggtgatgtgtttgatcctcatgggacattgagtggaggtgctcgatcccaggcagcttccattttaaccaagtttcaagaactcaaagatgttcaggatgaactgagaatcaaagagaatgagctgcgggctctagaagaggaattagcaggtcttaaaaacactgctgaaaagtatcgccaactaaaacagcagtgggagatgaaaactgaagaggcagatttattacaaaccaagctccagcaaagctcatatcacaagcaacaagaagaattagatgcccttaaaaaaaccattgaggaaagtgaggagactttgaaaaacactaaagaaatccaaagaaaagcagaagaaaaatatgaagtattggaaaataaaatgaaaaatgcagaagctgaaagagagcgagaactgaaagatgctcagaaaaaactggattgtgccaaaacaaaggcagatgcatctagcaagaagatgaaagaaaaacaacaggaagttgaagctatcactctggaactggaagagctcaagagagagcatacatcttacaaacaacagcttgaagctgtaaatgaagctatcaaatcctatgaaagtcagattgaagtaatggcagctgaggtggctaaaaataaggagtcagtaaataaagctcaagaagaggtgaccaagcaaaaagaggtgataacagcccaagacactgtaattaaagctaaatatgcagaagtggcaaaacacaaggagcaaaacaatgattctcagcttaaaattaaggaattagaccacaacatcagcaaacataaacgggaggctgaagatggtgctgcaaaggtatccaaaatgttgaaagattatgactggattaatgcagagagacacctctttggccaacccaatagtgcctatgatttcaaaactaacaaccctaaagaagctggtcagagacttcagaagttgcaagaaatgaaggagaaactaggaagaaatgtcaatatgagagctatgaatgtattgacagaagctgaagagcgatacaatgacttgatgaagaagaagagaattgtagaaaatgacaaatccaaaattcttacaactatagaagaccttgaccagaagaaaaaccaagccctaaatattgcatggcaaaaggtgaacaaggactttgggtctattttttctactcttttgcctggtgctaatgctatgcttgcaccaccagagggtcaaactgttttggatggtctggagttcaaggttgccttgggaaatacctggaaagaaaacctaactgaacttagtggtggtcagaggtctttagtggccttgtcattaatactgtccatgcttctcttcaaacctgctccaatttatatccttgatgaggtagatgcagccttggatctttctcatacccaaaacattggacagatgctgcgtactcatttcacacattctcagttcattgtggtgtcactaaaagaaggtatgttcaacaatgcaaacgttcttttcaaaaccaagtttgtggatggtgtttctacagtagccagatttactcaatgtcaaaatggaaagatttcaaaggaagcaaaatccaaggcaaaaccacccaaaggagcacatgtggaagtttaaactacaaagttatttcttcatcttgacctgtttttttaaatgtaaacttttaaggacttgagataactaatttgtttatatacaaaaattaatgttactgtgttacttaacccatgttttctctttatataatcacttatcgcttacaaatgagcatatattcctcatctcttaactagtctaattatggtccaattattgtggttgtgattttatgcatatcatcaaatgtttttttcttatgcgggtcttttatatattagggatcctgagatacccgattctatatgtaaaagctaatatacaaaaaagcagattaaattacatgacgaaaaaaaacaaaaaaaaacaaaaaaaaaaacaatttttgggccgcgccttgggccctctcgaaaggtttttaaacaccattcggttggcgccgggggccccagggggtaggggaaccgtggtcaaagagtgtgttcccgagagggaacaccgcgggccacacgaacaagaggcgcggggattttctccacgcatgtgaagataagcggcccgcgggggcacacacgagaagctggttctggaaacaattccgagagaggagaagtctcggagggccacacaacgggggacttaatcacgaggggattcccagggaaactctcattttcaaatttagccccgttgccg

SEQ ID NO: 427399 - DNA, 4447 bp, Homo sapiens
ggcgcgggggctgtagggagggggaccagtggcagagggaccttaggtgatccttagaaataaaggctagcttctgttcgaccttggagtagggcgaagaggtgtagacaggcctggagaagcgaggtaaaagcctgagtaaaagcaagaagttggagaatatgagatacatctcatctctagtaaatacttaaatgacttcccctcctcccggagtcaagcacaattcggggatgcaatgacggacgtaggtgaagacactgcgggaacttacagacaaaactggtttgtggcctgtttgattcctgtcagaggtttgctgacccaagacagtatcgaaaatgcatattaagtcaattattctagagggattcaagtcctatgctcagaggaccgaagtcaatggttttgaccccctcttcaatgctatcactggcttaaatggtagtgggaaatccaacatattggactccatctgctttttgctgggcatctccaacctgtctcaggttcgggcttctaatttacaagatttagtttacaaaaatgggcaggctggtattaccaaagcctctgtgtcaatcacttttgataattctgacaaaaagcaaagtcctttaggatttgaggttcatgatgaaatcacagtaacaaggcaggtggttattggtggtagaaataaatatttaatcaatggagtcaatgccaacaacaccagagtacaggatctcttctgttctgttggccttaatgttaacaaccctcactttctcatcatgcagggccgaattacaaaagtattgaatatgaaacctccagagattttatccatgatagaagaagcagctggaaccaggatgtatgaatacaaaaaaatagctgcacagaaaactatagaaaaaaaggaggctaagctgaaagaaattaagacgatacttgaagaagagattactccaaccattcaaaaattaaaagaggaaagatcgtcctacttggagtaccaaaaagtaatgagagaaatagaacatttgagtcgtttatatattgcttatcagtttttgctggctgaagataccaaagtacgctcagctgaggaattaaaagaaatgcaagataaagttataaagcttcaggaagaattgtctgagaatgataaaaaaataaaagcacttaatcatgaaatagaagaattggaaaaaagaaaagataaggaaactggaggtatacttcgatctttagaagatgctcttgcagaggctcagcgagttaatactaaatctcaaagcgcatttgatctcaagaagaaaaatctggcatgtgaggaaagcaaacgcaaagagctggaaaaaaatatggttgaggactcaaaaactttagcagcaaaggaaaaagaggttaaaaagataacagatggactgcatgcccttcaagaagcaagtaataaagatgctgaagctctggcagctgcacagcagcacttcaatgctgtttccgctggcctgtccagtaatgaagatggagcagaagcaactcttgctggtcaaatgatggcctgtaaaaatgatataagtaaagctcagacagaagccaaacaggctcagatgaagttgaagcatgctcaacaggaattaaagaataaacaagctgaagttaagaagatggatagtggctacaggaaggatcaagaagctctagaagctgtaaaaagacttaaagaaaaacttgaagctgaaatgaaaaagctaaattatgaagaaaataaagaggaaagccttttggaaaagcgcaggcagctgtctcgtgatattggtagattgaaagaaacatatgaagctctattagccagatttcccaatcttcgatttgcatacaaggatccagagaagaactggaatagaaattgtgtgaaaggacttgtggcttctctgattagtgtgaaagacacttctgcaaccacagctttagaattagtggctggagaacgactctacaatgttgtagtagacacagaagttactggtaaaaagctactagaaaggggggaactgaaacgtcgatacactataattccactcaataaaatttcagccagatgtattgcaccagaaactctgagagttgctcagaatcttgttggccctgacaacgttcatgtggctctttccttggttgaatataaaccagaacttcagaaagcaatggagtttgtctttggaacaacatttgtttgtgacaatatggataatgccaaaaaagtggcctttgataagaggataatgactagaactgtaactctcggaggtgatgtgtttgatcctcatgggacattgagtggaggtgctcgatcccaggcagcttccattttaaccaagtttcaagaactcaaagatgttcaggatgaactgagaatcaaagagaatgagctgcgggctctagaagaggaattagcaggtcttaaaaacactgctgaaaagtatcgccaactaaaacagcagtgggagatgaaaactgaagaggcagatttattacaaaccaagctccagcaaagctcatatcacaagcaacaagaagaattagatgcccttaaaaaaaccattgaggaaagtgaggagactttgaaaaacactaaagaaatccaaagaaaagcagaagaaaaatatgaagtattggaaaataaaatgaaaaatgcagaagctgaaagagagcgagaactgaaagatgctcagaaaaaactggattgtgccaaaacaaaggcagatgcatctagcaagaagatgaaagaaaaacaacaggaagttgaagctatcactctggaactggaagagctcaagagagagcatacatcttacaaacaacagcttgaagctgtaaatgaagctatcaaatcctatgaaagtcagattgaagtaatggcagctgaggtggctaaaaataaggagtcagtaaataaagctcaagaagaggtgaccaagcaaaaagaggtgataacagcccaagacactgtaattaaagctaaatatgcagaagtggcaaaacacaaggagcaaaacaatgattctcagcttaaaattaaggaattagaccacaacatcagcaaacataaacgggaggctgaagatggtgctgcaaaggtatccaaaatgttgaaagattatgactggattaatgcagagagacacctctttggccaacccaatagtgcctatgatttcaaaactaacaaccctaaagaagctggtcagagacttcagaagttgcaagaaatgaaggagaaactaggaagaaatgtcaatatgagagctatgaatgtattgacagaagctgaagagcgatacaatgacttgatgaagaagaagagaattgtagaaaatgacaaatccaaaattcttacaactatagaagaccttgaccagaagaaaaaccaagccctaaatattgcatggcaaaaggtgaacaaggactttgggtctattttttctactcttttgcctggtgctaatgctatgcttgcaccaccagagggtcaaactgttttggatggtctggagttcaaggttgccttgggaaatacctggaaagaaaacctaactgaacttagtggtggtcagaggtctttagtggccttgtcattaatactgtccatgcttctcttcaaacctgctccaatttatatccttgatgaggtagatgcagccttggatctttctcatacccaaaacattggacagatgctgcgtactcatttcacacattctcagttcattgtggtgtcactaaaagaaggtatgttcaacaatgcaaacgttcttttcaaaaccaagtttgtggatggtgtttctacagtagccagatttactcaatgtcaaaatggaaagatttcaaaggaagcaaaatccaaggcaaaaccacccaaaggagcacatgtggaagtttaaactacaaagttatttcttcatcttgacctgtttttttaaatgtaaacttttaaggacttgagataactaatttgtttatatacaaaaattaatgttactgtgttacttaacccatgttttctctttatataatcacttatcgcttacaaatgagcatatattcctcatctcttaactagtctaattatggtccaattattgtggttgtgattttatgcatatcatcaaatgtttttttcttatgcgggtcttttatatattagggatcctgagatacccgattctatatgtaaaagctaatatacaaaaaagcagattaaattacatgagtgaaataaacggaagaacaatagcagaaagcaccaagaaagaacaagaaaactctgtgtgtcgtcggcgccggcccgggggccgcttcgaagaagcgcttttttgaaaccacttcggttggggcgcgcggggggcccaggaggggcgacgggcacaggggcacaaggggggcccaaggggac

SEQ ID NO: 427400 - DNA, 6635 bp, Homo sapiens
ggcgccgaaattcaaaggaataaatagttccggcgcgggtgttgagagcggtgtggtaggtgttgtagccgctatggtgaagttcgctttgtagcggccccggctagagagttggcctgttccctgcctttgtgacccggaggagcttttggggtgcgtcaagcccctggcctgaggcagcgaactggtttgtggcctgtttgattcctgtcagaggtttgctgacccaagacagtatcgaaaatgcatattaagtcaattattctagagggattcaagtcctatgctcagaggaccgaagtcaatggttttgaccccctcttcaatgctatcactggcttaaatggtagtgggaaatccaacatattggactccatctgctttttgctgggcatctccaacctgtctcaggttcgggcttctaatttacaagatttagtttacaaaaatgggcaggctggtattaccaaagcctctgtgtcaatcacttttgataattctgacaaaaagcaaagtcctttaggatttgaggttcatgatgaaatcacagtaacaaggcaggtggttattggtggtagaaataaatatttaatcaatggagtcaatgccaacaacaccagagtacaggatctcttctgttctgttggccttaatgttaacaaccctcactttctcatcatgcagggccgaattacaaaagtattgaatatgaaacctccagagattttatccatgatagaagaagcagctggaaccaggatgtatgaatacaaaaaaatagctgcacagaaaactatagaaaaaaaggaggctaagctgaaagaaattaagacgatacttgaagaagagattactccaaccattcaaaaattaaaagaggaaagatcgtcctacttggagtaccaaaaagtaatgagagaaatagaacatttgagtcgtttatatattgcttatcagtttttgctggctgaagataccaaagtacgctcagctgaggaattaaaagaaatgcaagataaagttataaagcttcaggaagaattgtctgagaatgataaaaaaataaaagcacttaatcatgaaatagaagaattggaaaaaagaaaagataaggaaactggaggtatacttcgatctttagaagatgctcttgcagaggctcagcgagttaatactaaatctcaaagcgcatttgatctcaagaagaaaaatctggcatgtgaggaaagcaaacgcaaagagctggaaaaaaatatggttgaggactcaaaaactttagcagcaaaggaaaaagaggttaaaaagataacagatggactgcatgcccttcaagaagcaagtaataaagatgctgaagctctggcagctgcacagcagcacttcaatgctgtttccgctggcctgtccagtaatgaagatggagcagaagcaactcttgctggtcaaatgatggcctgtaaaaatgatataagtaaagctcagacagaagccaaacaggctcagatgaagttgaagcatgctcaacaggaattaaagaataaacaagctgaagttaagaagatggatagtggctacaggaaggatcaagaagctctagaagctgtaaaaagacttaaagaaaaacttgaagctgaaatgaaaaagctaaattatgaagaaaataaagaggaaagccttttggaaaagcgcaggcagctgtctcgtgatattggtagattgaaagaaacatatgaagctctattagccagatttcccaatcttcgatttgcatacaaggatccagagaagaactggaatagaaattgtgtgaaaggacttgtggcttctctgattagtgtgaaagacacttctgcaaccacagctttagaattagtggctggagaacgactctacaatgttgtagtagacacagaagttactggtaaaaagctactagaaaggggggaactgaaacgtcgatacactataattccactcaataaaatttcagccagatgtattgcaccagaaactctgagagttgctcagaatcttgttggccctgacaacgttcatgtggctctttccttggttgaatataaaccagaacttcagaaagcaatggagtttgtctttggaacaacatttgtttgtgacaatatggataatgccaaaaaagtggcctttgataagaggataatgactagaactgtaactctcggaggtgatgtgtttgatcctcatgggacattgagtggaggtgctcgatcccaggcagcttccattttaaccaagtttcaagaactcaaagatgttcaggatgaactgagaatcaaagagaatgagctgcgggctctagaagaggaattagcaggtcttaaaaacactgctgaaaagtatcgccaactaaaacagcagtgggagatgaaaactgaagaggcagatttattacaaaccaagctccagcaaagctcatatcacaagcaacaagaagaattagatgcccttaaaaaaaccattgaggaaagtgaggagactttgaaaaacactaaagaaatccaaagaaaagcagaagaaaaatatgaagtattggaaaataaaatgaaaaatgcagaagctgaaagagagcgagaactgaaagatgctcagaaaaaactggattgtgccaaaacaaaggcagatgcatctagcaagaagatgaaagaaaaacaacaggaagttgaagctatcactctggaactggaagagctcaagagagagcatacatcttacaaacaacagcttgaagctgtaaatgaagctatcaaatcctatgaaagtcagattgaagtaatggcagctgaggtggctaaaaataaggagtcagtaaataaagctcaagaagaggtgaccaagcaaaaagaggtgataacagcccaagacactgtaattaaagctaaatatgcagaagtggcaaaacacaaggagcaaaacaatgattctcagcttaaaattaaggaattagaccacaacatcagcaaacataaacgggaggctgaagatggtgctgcaaaggtatccaaaatgttgaaagattatgactggattaatgcagagagacacctctttggccaacccaatagtgcctatgatttcaaaactaacaaccctaaagaagctggtcagagacttcagaagttgcaagaaatgaaggagaaactaggaagaaatgtcaatatgagagctatgaatgtattgacagaagctgaagagcgatacaatgacttgatgaagaagaagagaattgtagaaaatgacaaatccaaaattcttacaactatagaagaccttgaccagaagaaaaaccaagccctaaatattgcatggcaaaaggtgaacaaggactttgggtctattttttctactcttttgcctggtgctaatgctatgcttgcaccaccagagggtcaaactgttttggatggtctggagttcaaggttgccttgggaaatacctggaaagaaaacctaactgaacttagtggtggtcagagacaaaaacagcagaaccatactacaggttaaaggaagttctcaggcaaaaggaaaatgataccagatggaaccttggatctacataaaggaaagaagagtgttggaaactaacatggatttggagttcagggaagtttctcctgaccttacacagtgattcagaaaatcagcatagtgatagaaacctaaaaggtctttagtggccttgtcattaatactgtccatgcttctcttcaaacctgctccaatttatatccttgatgaggtagatgcagccttggatctttctcatacccaaaacattggacagatgctgcgtactcatttcacacattctcagttcattgtggtgtcactaaaagaaggtatgttcaacaatgcaaacgttcttttcaaaaccaagtttgtggatggtgtttctacagtagccagatttactcaatgtcaaaatggaaagatttcaaaggaagcaaaatccaaggcaaaaccacccaaaggagcacatgtggaagtttaaactacaaagttatttcttcatcttgacctgtttttttaaatgtaaacttttaaggacttgagataactaatttgtttatatacaaaaattaatgttactgtgttacttaacccatgttttctctttatataatcacttatcgcttacaaatgagcatatattcctcatctcttaactagtctaattatggtccaattattgtggttgtgattttatgcatatcatcaaatgtttttttcttatgcgggtcttttatatattagggatcctgagatacccgattctatatgtaaaagctaatatacaaaaaagcagattaaattacatgataaatgtagctgatcatcagtgtttaattgatttaattcctaaggcaatattaatgtgttttctaaagtcattcaggtaaggaagaattataaatcaggtaactggaccaacaaagggaacacatataaagctattatgcatgcatggagccgtttgaggctagttttttaaggccacaactccagacccctgatttagactgagataggaaacagatcttgaaagaatccttattttaatgatacatgaatatcatgttcctatacgcttaataattggtctctacgttttaatgatacatgaatatcatgttcctatacgcttaataattggtctctacgactttaatgtttttgtttttttaagctgtgtaagtatttttaaatcaaagcttaggaggtgtgttgcgtggtactatctgctgcaaatttatctgaagtttgttaatattttccaagatttttgtcagccttttcataatccagtcattaacaacctattggtaaacaagaatgtaggtgccagtagactaaaccaaatttatttttccctgagtctgatatatatatgtataaatataaataactcaatccatctgttccaccaaaataactcaaaagttggatgattatttgtcttccgctttccagttcaaagggatgaaattcctttagaacttgaaagatgacactagcgaacaccatgagaatactgtctacagtttttggtacgtcatcactagaacagtgaccccaaactgaatcatgaaaggtctgacatgatgtaatctgatcttccatgtgttattttggccccacatctcttcttgattttttagtcttatttccttagtgttattatcatacttcccctgatatatggccgtacttcctggccctgggcttgacatttcccacccttcattctccatacatatgagatgtcagaaaacatgcagtaattgatattatgggacacattggaaaggattgaatctggaattagttctgtccactgtggaggggagaggaaataatgctgtaaatgttgagttacagaaagtccaatgtcaaatatagtttttttgtttcctttcaaatgtattacagactgtgccaaaacagttaccaattcacactgtcaatattaaagtataccatagtatacaaattagtcagtacttgctgttaattttaatatttctgatttaacagttagttattaagtggtacttcattgctgttttagccaacgttttaaaaataatttgggagtttgactattttggcttacgtactcatttccttttctctgctaaaaatgttttgcttgtgtgcgttcctgatttttgtcttgtataatcttgatctttgaaaaccctcaaacatgtattaaattgttgtaactttttttcattagagggaagacattaaggggattggggacatttgtttcacacatctgcagtaatatgagttaactaatatttaacaagctctttctttacattagctgctgttctcatttgtatgtattgtcatatttaatcctcagagtaacctagtgaggtaaatactgttgttgtcagcatggtgtaatcgaggaattgagtgagttgagcagaaaagttaggaaacttgctcagggtgataatacagttaggagtgtcagggcccatggacaaatcttgtcagtctccagaacctaagatatactacgtcactgacagcttgaacatttgtatttattgtacagaataaatttaagaaaaatacctgtatgagcagtatgtacaacgtgaatgttaccttaaagaagaacctcaaccatgtgaagagaggattcattgtggtggtggcggttttggcatttcaagtaagctcacagcaaatgcaaagcaaagacatgaaattttctcttccaatagggtggcataatctaaaggccaacattcccacagatgataaatatagattctgagcaaaatactagaaacaactacctgagagttcaggaaactgaagaaaaactagaaagattttggatgggagataaaatacggaggaagagacaggcacaagctaaggttaatgtttttaacctaagtaccagctatagtcatgatgcagctgtaggacagctaaggctgcagtggaaagcctggggtctttctggtctggagaactaaaagatgggatctgggctaaccacagcttccagaaagtgaaggagacgtctcagaagggataaacgaggacctggagaaagaggtccc

SEQ ID NO: 427401 - DNA, 6413 bp, Homo sapiens
ggcgccgaaattcaaaggaataaatagttccggcgcgggtgttgagagcggtgtggtaggtgttgtagccgctatggtgaagttcgctttgtagcggccccggctagagagttggcctgttccctgcctttgtgacccggaggagcttttgggaactggtttgtggcctgtttgattcctgtcagaggtttgctgacccaagacagtatcgaaaatgcatattaagtcaattattctagagggattcaagtcctatgctcagaggaccgaagtcaatggttttgaccccctcttcaatgctatcactggcttaaatggtagtgggaaatccaacatattggactccatctgctttttgctgggcatctccaacctgtctcaggttcgggcttctaatttacaagatttagtttacaaaaatgggcaggctggtattaccaaagcctctgtgtcaatcacttttgataattctgacaaaaagcaaagtcctttaggatttgaggttcatgatgaaatcacagtaacaaggcaggtggttattggtggtagaaataaatatttaatcaatggagtcaatgccaacaacaccagagtacaggatctcttctgttctgttggccttaatgttaacaaccctcactttctcatcatgcagggccgaattacaaaagtattgaatatgaaacctccagagattttatccatgatagaagaagcagctggaaccaggatgtatgaatacaaaaaaatagctgcacagaaaactatagaaaaaaaggaggctaagctgaaagaaattaagacgatacttgaagaagagattactccaaccattcaaaaattaaaagaggaaagatcgtcctacttggagtaccaaaaagtaatgagagaaatagaacatttgagtcgtttatatattgcttatcagtttttgctggctgaagataccaaagtacgctcagctgaggaattaaaagaaatgcaagataaagttataaagcttcaggaagaattgtctgagaatgataaaaaaataaaagcacttaatcatgaaatagaagaattggaaaaaagaaaagataaggaaactggaggtatacttcgatctttagaagatgctcttgcagaggctcagcgagttaatactaaatctcaaagcgcatttgatctcaagaagaaaaatctggcatgtgaggaaagcaaacgcaaagagctggaaaaaaatatggttgaggactcaaaaactttagcagcaaaggaaaaagaggttaaaaagataacagatggactgcatgcccttcaagaagcaagtaataaagatgctgaagctctggcagctgcacagcagcacttcaatgctgtttccgctggcctgtccagtaatgaagatggagcagaagcaactcttgctggtcaaatgatggcctgtaaaaatgatataagtaaagctcagacagaagccaaacaggctcagatgaagttgaagcatgctcaacaggaattaaagaataaacaagctgaagttaagaagatggatagtggctacaggaaggatcaagaagctctagaagctgtaaaaagacttaaagaaaaacttgaagctgaaatgaaaaagctaaattatgaagaaaataaagaggaaagccttttggaaaagcgcaggcagctgtctcgtgatattggtagattgaaagaaacatatgaagctctattagccagatttcccaatcttcgatttgcatacaaggatccagagaagaactggaatagaaattgtgtgaaaggacttgtggcttctctgattagtgtgaaagacacttctgcaaccacagctttagaattagtggctggagaacgactctacaatgttgtagtagacacagaagttactggtaaaaagctactagaaaggggggaactgaaacgtcgatacactataattccactcaataaaatttcagccagatgtattgcaccagaaactctgagagttgctcagaatcttgttggccctgacaacgttcatgtggctctttccttggttgaatataaaccagaacttcagaaagcaatggagtttgtctttggaacaacatttgtttgtgacaatatggataatgccaaaaaagtggcctttgataagaggataatgactagaactgtaactctcggaggtgatgtgtttgatcctcatgggacattgagtggaggtgctcgatcccaggcagcttccattttaaccaagtttcaagaactcaaagatgttcaggatgaactgagaatcaaagagaatgagctgcgggctctagaagaggaattagcaggtcttaaaaacactgctgaaaagtatcgccaactaaaacagcagtgggagatgaaaactgaagaggcagatttattacaaaccaagctccagcaaagctcatatcacaagcaacaagaagaattagatgcccttaaaaaaaccattgaggaaagtgaggagactttgaaaaacactaaagaaatccaaagaaaagcagaagaaaaatatgaagtattggaaaataaaatgaaaaatgcagaagctgaaagagagcgagaactgaaagatgctcagaaaaaactggattgtgccaaaacaaaggcagatgcatctagcaagaagatgaaagaaaaacaacaggaagttgaagctatcactctggaactggaagagctcaagagagagcatacatcttacaaacaacagcttgaagctgtaaatgaagctatcaaatcctatgaaagtcagattgaagtaatggcagctgaggtggctaaaaataaggagtcagtaaataaagctcaagaagaggtgaccaagcaaaaagaggtgataacagcccaagacactgtaattaaagctaaatatgcagaagtggcaaaacacaaggagcaaaacaatgattctcagcttaaaattaaggaattagaccacaacatcagcaaacataaacgggaggctgaagatggtgctgcaaaggtatccaaaatgttgaaagattatgactggattaatgcagagagacacctctttggccaacccaatagtgcctatgatttcaaaactaacaaccctaaagaagctggtcagagacttcagaagttgcaagaaatgaaggagaaactaggaagaaatgtcaatatgagagctatgaatgtattgacagaagctgaagagcgatacaatgacttgatgaagaagaagagaattgtagaaaatgacaaatccaaaattcttacaactatagaagaccttgaccagaagaaaaaccaagccctaaatattgcatggcaaaaggtgaacaaggactttgggtctattttttctactcttttgcctggtgctaatgctatgcttgcaccaccagagggtcaaactgttttggatggtctggagttcaaggttgccttgggaaatacctggaaagaaaacctaactgaacttagtggtggtcagaggtctttagtggccttgtcattaatactgtccatgcttctcttcaaacctgctccaatttatatccttgatgaggtagatgcagccttggatctttctcatacccaaaacattggacagatgctgcgtactcatttcacacattctcagttcattgtggtgtcactaaaagaaggtatgttcaacaatgcaaacgttcttttcaaaaccaagtttgtggatggtgtttctacagtagccagatttactcaatgtcaaaatggaaagatttcaaaggaagcaaaatccaaggcaaaaccacccaaaggagcacatgtggaagtttaaactacaaagttatttcttcatcttgacctgtttttttaaatgtaaacttttaaggacttgagataactaatttgtttatatacaaaaattaatgttactgtgttacttaacccatgttttctctttatataatcacttatcgcttacaaatgagcatatattcctcatctcttaactagtctaattatggtccaattattgtggttgtgattttatgcatatcatcaaatgtttttttcttatgcgggtcttttatatattagggatcctgagatacccgattctatatgtaaaagctaatatacaaaaaagcagattaaattacatgataaatgtagctgatcatcagtgtttaattgatttaattcctaaggcaatattaatgtgttttctaaagtcattcaggtaaggaagaattataaatcaggtaactggaccaacaaagggaacacatataaagctattatgcatgcatggagccgtttgaggctagttttttaaggccacaactccagacccctgatttagactgagataggaaacagatcttgaaagaatccttattttaatgatacatgaatatcatgttcctatacgcttaataattggtctctacgttttaatgatacatgaatatcatgttcctatacgcttaataattggtctctacgactttaatgtttttgtttttttaagctgtgtaagtatttttaaatcaaagcttaggaggtgtgttgcgtggtactatctgctgcaaatttatctgaagtttgttaatattttccaagatttttgtcagccttttcataatccagtcattaacaacctattggtaaacaagaatgtaggtgccagtagactaaaccaaatttatttttccctgagtctgatatatatatgtataaatataaataactcaatccatctgttccaccaaaataactcaaaagttggatgattatttgtcttccgctttccagttcaaagggatgaaattcctttagaacttgaaagatgacactagcgaacaccatgagaatactgtctacagtttttggtacgtcatcactagaacagtgaccccaaactgaatcatgaaaggtctgacatgatgtaatctgatcttccatgtgttattttggccccacatctcttcttgattttttagtcttatttccttagtgttattatcatacttcccctgatatatggccgtacttcctggccctgggcttgacatttcccacccttcattctccatacatatgagatgtcagaaaacatgcagtaattgatattatgggacacattggaaaggattgaatctggaattagttctgtccactgtggaggggagaggaaataatgctgtaaatgttgagttacagaaagtccaatgtcaaatatagtttttttgtttcctttcaaatgtattacagactgtgccaaaacagttaccaattcacactgtcaatattaaagtataccatagtatacaaattagtcagtacttgctgttaattttaatatttctgatttaacagttagttattaagtggtacttcattgctgttttagccaacgttttaaaaataatttgggagtttgactattttggcttacgtactcatttccttttctctgctaaaaatgttttgcttgtgtgcgttcctgatttttgtcttgtataatcttgatctttgaaaaccctcaaacatgtattaaattgttgtaactttttttcattagagggaagacattaaggggattggggacatttgtttcacacatctgcagtaatatgagttaactaatatttaacaagctctttctttacattagctgctgttctcatttgtatgtattgtcatatttaatcctcagagtaacctagtgaggtaaatactgttgttgtcagcatggtgtaatcgaggaattgagtgagttgagcagaaaagttaggaaacttgctcagggtgataatacagttaggagtgtcagggcccatggacaaatcttgtcagtctccagaacctaagatatactacgtcactgacagcttgaacatttgtatttattgtacagaataaatttaagaaaaatacctgtatgagcagtatgtacaacgtgaatgttaccttaaagaagaacctcaaccatgtgaagagaggattcattgtggtggtggcggttttggcatttcaagtaagctcacagcaaatgcaaagcaaagacatgaaattttctcttccaatagggtggcataatctaaaggccaacattcccacagatgataaatatagattctgagcaaaatactagaaacaactacctgagagttcaggaaactgaagaaaaactagaaagattttggatgggagataaaatacggaggaagagacaggcacaagctaaggttaatgtttttaacctaagtaccagctatagtcatgatgcagctgtaggacagctaaggctgcagtggaaagcctggggtctttctggtctggagaactaaaagatgggatctgggctaaccacagcttccagaaagtgaaggagacgtctcagaagggataaacgaggacctggagaaagaggtccc

SEQ ID NO: 427402 - DNA, 6507 bp, Homo sapiens
ggcgcgggggctgtagggagggggaccagtggcagagggaccttaggtgatccttagaaataaaggctagcttctgttcgaccttggagtagggcgaagaggtgtagacaggcctggagaagcgaggtaaaagcctgagtaaaagcaagaagttggagaatatgagatacatctcatctctagtaaatacttaaatgacttcccctcctcccggagtcaagcacaattcggggatgcaatgacggacaactggtttgtggcctgtttgattcctgtcagaggtttgctgacccaagacagtatcgaaaatgcatattaagtcaattattctagagggattcaagtcctatgctcagaggaccgaagtcaatggttttgaccccctcttcaatgctatcactggcttaaatggtagtgggaaatccaacatattggactccatctgctttttgctgggcatctccaacctgtctcaggttcgggcttctaatttacaagatttagtttacaaaaatgggcaggctggtattaccaaagcctctgtgtcaatcacttttgataattctgacaaaaagcaaagtcctttaggatttgaggttcatgatgaaatcacagtaacaaggcaggtggttattggtggtagaaataaatatttaatcaatggagtcaatgccaacaacaccagagtacaggatctcttctgttctgttggccttaatgttaacaaccctcactttctcatcatgcagggccgaattacaaaagtattgaatatgaaacctccagagattttatccatgatagaagaagcagctggaaccaggatgtatgaatacaaaaaaatagctgcacagaaaactatagaaaaaaaggaggctaagctgaaagaaattaagacgatacttgaagaagagattactccaaccattcaaaaattaaaagaggaaagatcgtcctacttggagtaccaaaaagtaatgagagaaatagaacatttgagtcgtttatatattgcttatcagtttttgctggctgaagataccaaagtacgctcagctgaggaattaaaagaaatgcaagataaagttataaagcttcaggaagaattgtctgagaatgataaaaaaataaaagcacttaatcatgaaatagaagaattggaaaaaagaaaagataaggaaactggaggtatacttcgatctttagaagatgctcttgcagaggctcagcgagttaatactaaatctcaaagcgcatttgatctcaagaagaaaaatctggcatgtgaggaaagcaaacgcaaagagctggaaaaaaatatggttgaggactcaaaaactttagcagcaaaggaaaaagaggttaaaaagataacagatggactgcatgcccttcaagaagcaagtaataaagatgctgaagctctggcagctgcacagcagcacttcaatgctgtttccgctggcctgtccagtaatgaagatggagcagaagcaactcttgctggtcaaatgatggcctgtaaaaatgatataagtaaagctcagacagaagccaaacaggctcagatgaagttgaagcatgctcaacaggaattaaagaataaacaagctgaagttaagaagatggatagtggctacaggaaggatcaagaagctctagaagctgtaaaaagacttaaagaaaaacttgaagctgaaatgaaaaagctaaattatgaagaaaataaagaggaaagccttttggaaaagcgcaggcagctgtctcgtgatattggtagattgaaagaaacatatgaagctctattagccagatttcccaatcttcgatttgcatacaaggatccagagaagaactggaatagaaattgtgtgaaaggacttgtggcttctctgattagtgtgaaagacacttctgcaaccacagctttagaattagtggctggagaacgactctacaatgttgtagtagacacagaagttactggtaaaaagctactagaaaggggggaactgaaacgtcgatacactataattccactcaataaaatttcagccagatgtattgcaccagaaactctgagagttgctcagaatcttgttggccctgacaacgttcatgtggctctttccttggttgaatataaaccagaacttcagaaagcaatggagtttgtctttggaacaacatttgtttgtgacaatatggataatgccaaaaaagtggcctttgataagaggataatgactagaactgtaactctcggaggtgatgtgtttgatcctcatgggacattgagtggaggtgctcgatcccaggcagcttccattttaaccaagtttcaagaactcaaagatgttcaggatgaactgagaatcaaagagaatgagctgcgggctctagaagaggaattagcaggtcttaaaaacactgctgaaaagtatcgccaactaaaacagcagtgggagatgaaaactgaagaggcagatttattacaaaccaagctccagcaaagctcatatcacaagcaacaagaagaattagatgcccttaaaaaaaccattgaggaaagtgaggagactttgaaaaacactaaagaaatccaaagaaaagcagaagaaaaatatgaagtattggaaaataaaatgaaaaatgcagaagctgaaagagagcgagaactgaaagatgctcagaaaaaactggattgtgccaaaacaaaggcagatgcatctagcaagaagatgaaagaaaaacaacaggaagttgaagctatcactctggaactggaagagctcaagagagagcatacatcttacaaacaacagcttgaagctgtaaatgaagctatcaaatcctatgaaagtcagattgaagtaatggcagctgaggtggctaaaaataaggagtcagtaaataaagctcaagaagaggtgaccaagcaaaaagaggtgataacagcccaagacactgtaattaaagctaaatatgcagaagtggcaaaacacaaggagcaaaacaatgattctcagcttaaaattaaggaattagaccacaacatcagcaaacataaacgggaggctgaagatggtgctgcaaaggtatccaaaatgttgaaagattatgactggattaatgcagagagacacctctttggccaacccaatagtgcctatgatttcaaaactaacaaccctaaagaagctggtcagagacttcagaagttgcaagaaatgaaggagaaactaggaagaaatgtcaatatgagagctatgaatgtattgacagaagctgaagagcgatacaatgacttgatgaagaagaagagaattgtagaaaatgacaaatccaaaattcttacaactatagaagaccttgaccagaagaaaaaccaagccctaaatattgcatggcaaaaggtgaacaaggactttgggtctattttttctactcttttgcctggtgctaatgctatgcttgcaccaccagagggtcaaactgttttggatggtctggagttcaaggttgccttgggaaatacctggaaagaaaacctaactgaacttagtggtggtcagaggtctttagtggccttgtcattaatactgtccatgcttctcttcaaacctgctccaatttatatccttgatgaggtagatgcagccttggatctttctcatacccaaaacattggacagatgctgcgtactcatttcacacattctcagttcattgtggtgtcactaaaagaaggtatgttcaacaatgcaaacgttcttttcaaaaccaagtttgtggatggtgtttctacagtagccagatttactcaatgtcaaaatggaaagatttcaaaggaagcaaaatccaaggcaaaaccacccaaaggagcacatgtggaagtttaaactacaaagttatttcttcatcttgacctgtttttttaaatgtaaacttttaaggacttgagataactaatttgtttatatacaaaaattaatgttactgtgttacttaacccatgttttctctttatataatcacttatcgcttacaaatgagcatatattcctcatctcttaactagtctaattatggtccaattattgtggttgtgattttatgcatatcatcaaatgtttttttcttatgcgggtcttttatatattagggatcctgagatacccgattctatatgtaaaagctaatatacaaaaaagcagattaaattacatgataaatgtagctgatcatcagtgtttaattgatttaattcctaaggcaatattaatgtgttttctaaagtcattcaggtaaggaagaattataaatcaggtaactggaccaacaaagggaacacatataaagctattatgcatgcatggagccgtttgaggctagttttttaaggccacaactccagacccctgatttagactgagataggaaacagatcttgaaagaatccttattttaatgatacatgaatatcatgttcctatacgcttaataattggtctctacgttttaatgatacatgaatatcatgttcctatacgcttaataattggtctctacgactttaatgtttttgtttttttaagctgtgtaagtatttttaaatcaaagcttaggaggtgtgttgcgtggtactatctgctgcaaatttatctgaagtttgttaatattttccaagatttttgtcagccttttcataatccagtcattaacaacctattggtaaacaagaatgtaggtgccagtagactaaaccaaatttatttttccctgagtctgatatatatatgtataaatataaataactcaatccatctgttccaccaaaataactcaaaagttggatgattatttgtcttccgctttccagttcaaagggatgaaattcctttagaacttgaaagatgacactagcgaacaccatgagaatactgtctacagtttttggtacgtcatcactagaacagtgaccccaaactgaatcatgaaaggtctgacatgatgtaatctgatcttccatgtgttattttggccccacatctcttcttgattttttagtcttatttccttagtgttattatcatacttcccctgatatatggccgtacttcctggccctgggcttgacatttcccacccttcattctccatacatatgagatgtcagaaaacatgcagtaattgatattatgggacacattggaaaggattgaatctggaattagttctgtccactgtggaggggagaggaaataatgctgtaaatgttgagttacagaaagtccaatgtcaaatatagtttttttgtttcctttcaaatgtattacagactgtgccaaaacagttaccaattcacactgtcaatattaaagtataccatagtatacaaattagtcagtacttgctgttaattttaatatttctgatttaacagttagttattaagtggtacttcattgctgttttagccaacgttttaaaaataatttgggagtttgactattttggcttacgtactcatttccttttctctgctaaaaatgttttgcttgtgtgcgttcctgatttttgtcttgtataatcttgatctttgaaaaccctcaaacatgtattaaattgttgtaactttttttcattagagggaagacattaaggggattggggacatttgtttcacacatctgcagtaatatgagttaactaatatttaacaagctctttctttacattagctgctgttctcatttgtatgtattgtcatatttaatcctcagagtaacctagtgaggtaaatactgttgttgtcagcatggtgtaatcgaggaattgagtgagttgagcagaaaagttaggaaacttgctcagggtgataatacagttaggagtgtcagggcccatggacaaatcttgtcagtctccagaacctaagatatactacgtcactgacagcttgaacatttgtatttattgtacagaataaatttaagaaaaatacctgtatgagcagtatgtacaacgtgaatgttaccttaaagaagaacctcaaccatgtgaagagaggattcattgtggtggtggcggttttggcatttcaagtaagctcacagcaaatgcaaagcaaagacatgaaattttctcttccaatagggtggcataatctaaaggccaacattcccacagatgataaatatagattctgagcaaaatactagaaacaactacctgagagttcaggaaactgaagaaaaactagaaagattttggatgggagataaaatacggaggaagagacaggcacaagctaaggttaatgtttttaacctaagtaccagctatagtcatgatgcagctgtaggacagctaaggctgcagtggaaagcctggggtctttctggtctggagaactaaaagatgggatctgggctaaccacagcttccagaaagtgaaggagacgtctcagaagggataaacgaggacctggagaaagaggtccc

SEQ ID NO: 427403 - DNA, 6481 bp, Homo sapiens
ggcgccgaaattcaaaggaataaatagttccggcgcgggtgttgagagcggtgtggtaggtgttgtagccgctatggtgaagttcgctttgtagcggccccggctagagagttggcctgttccctgcctttgtgacccggaggagcttttggggtgcgtcaagcccctggcctgaggcagcgtacattccacttaggtggtggtatttctgtttcgtacagaactggtttgtggcctgtttgattcctgtcagaggtttgctgacccaagacagtatcgaaaatgcatattaagtcaattattctagagggattcaagtcctatgctcagaggaccgaagtcaatggttttgaccccctcttcaatgctatcactggcttaaatggtagtgggaaatccaacatattggactccatctgctttttgctgggcatctccaacctgtctcaggttcgggcttctaatttacaagatttagtttacaaaaatgggcaggctggtattaccaaagcctctgtgtcaatcacttttgataattctgacaaaaagcaaagtcctttaggatttgaggttcatgatgaaatcacagtaacaaggcaggtggttattggtggtagaaataaatatttaatcaatggagtcaatgccaacaacaccagagtacaggatctcttctgttctgttggccttaatgttaacaaccctcactttctcatcatgcagggccgaattacaaaagtattgaatatgaaacctccagagattttatccatgatagaagaagcagctggaaccaggatgtatgaatacaaaaaaatagctgcacagaaaactatagaaaaaaaggaggctaagctgaaagaaattaagacgatacttgaagaagagattactccaaccattcaaaaattaaaagaggaaagatcgtcctacttggagtaccaaaaagtaatgagagaaatagaacatttgagtcgtttatatattgcttatcagtttttgctggctgaagataccaaagtacgctcagctgaggaattaaaagaaatgcaagataaagttataaagcttcaggaagaattgtctgagaatgataaaaaaataaaagcacttaatcatgaaatagaagaattggaaaaaagaaaagataaggaaactggaggtatacttcgatctttagaagatgctcttgcagaggctcagcgagttaatactaaatctcaaagcgcatttgatctcaagaagaaaaatctggcatgtgaggaaagcaaacgcaaagagctggaaaaaaatatggttgaggactcaaaaactttagcagcaaaggaaaaagaggttaaaaagataacagatggactgcatgcccttcaagaagcaagtaataaagatgctgaagctctggcagctgcacagcagcacttcaatgctgtttccgctggcctgtccagtaatgaagatggagcagaagcaactcttgctggtcaaatgatggcctgtaaaaatgatataagtaaagctcagacagaagccaaacaggctcagatgaagttgaagcatgctcaacaggaattaaagaataaacaagctgaagttaagaagatggatagtggctacaggaaggatcaagaagctctagaagctgtaaaaagacttaaagaaaaacttgaagctgaaatgaaaaagctaaattatgaagaaaataaagaggaaagccttttggaaaagcgcaggcagctgtctcgtgatattggtagattgaaagaaacatatgaagctctattagccagatttcccaatcttcgatttgcatacaaggatccagagaagaactggaatagaaattgtgtgaaaggacttgtggcttctctgattagtgtgaaagacacttctgcaaccacagctttagaattagtggctggagaacgactctacaatgttgtagtagacacagaagttactggtaaaaagctactagaaaggggggaactgaaacgtcgatacactataattccactcaataaaatttcagccagatgtattgcaccagaaactctgagagttgctcagaatcttgttggccctgacaacgttcatgtggctctttccttggttgaatataaaccagaacttcagaaagcaatggagtttgtctttggaacaacatttgtttgtgacaatatggataatgccaaaaaagtggcctttgataagaggataatgactagaactgtaactctcggaggtgatgtgtttgatcctcatgggacattgagtggaggtgctcgatcccaggcagcttccattttaaccaagtttcaagaactcaaagatgttcaggatgaactgagaatcaaagagaatgagctgcgggctctagaagaggaattagcaggtcttaaaaacactgctgaaaagtatcgccaactaaaacagcagtgggagatgaaaactgaagaggcagatttattacaaaccaagctccagcaaagctcatatcacaagcaacaagaagaattagatgcccttaaaaaaaccattgaggaaagtgaggagactttgaaaaacactaaagaaatccaaagaaaagcagaagaaaaatatgaagtattggaaaataaaatgaaaaatgcagaagctgaaagagagcgagaactgaaagatgctcagaaaaaactggattgtgccaaaacaaaggcagatgcatctagcaagaagatgaaagaaaaacaacaggaagttgaagctatcactctggaactggaagagctcaagagagagcatacatcttacaaacaacagcttgaagctgtaaatgaagctatcaaatcctatgaaagtcagattgaagtaatggcagctgaggtggctaaaaataaggagtcagtaaataaagctcaagaagaggtgaccaagcaaaaagaggtgataacagcccaagacactgtaattaaagctaaatatgcagaagtggcaaaacacaaggagcaaaacaatgattctcagcttaaaattaaggaattagaccacaacatcagcaaacataaacgggaggctgaagatggtgctgcaaaggtatccaaaatgttgaaagattatgactggattaatgcagagagacacctctttggccaacccaatagtgcctatgatttcaaaactaacaaccctaaagaagctggtcagagacttcagaagttgcaagaaatgaaggagaaactaggaagaaatgtcaatatgagagctatgaatgtattgacagaagctgaagagcgatacaatgacttgatgaagaagaagagaattgtagaaaatgacaaatccaaaattcttacaactatagaagaccttgaccagaagaaaaaccaagccctaaatattgcatggcaaaaggtgaacaaggactttgggtctattttttctactcttttgcctggtgctaatgctatgcttgcaccaccagagggtcaaactgttttggatggtctggagttcaaggttgccttgggaaatacctggaaagaaaacctaactgaacttagtggtggtcagaggtctttagtggccttgtcattaatactgtccatgcttctcttcaaacctgctccaatttatatccttgatgaggtagatgcagccttggatctttctcatacccaaaacattggacagatgctgcgtactcatttcacacattctcagttcattgtggtgtcactaaaagaaggtatgttcaacaatgcaaacgttcttttcaaaaccaagtttgtggatggtgtttctacagtagccagatttactcaatgtcaaaatggaaagatttcaaaggaagcaaaatccaaggcaaaaccacccaaaggagcacatgtggaagtttaaactacaaagttatttcttcatcttgacctgtttttttaaatgtaaacttttaaggacttgagataactaatttgtttatatacaaaaattaatgttactgtgttacttaacccatgttttctctttatataatcacttatcgcttacaaatgagcatatattcctcatctcttaactagtctaattatggtccaattattgtggttgtgattttatgcatatcatcaaatgtttttttcttatgcgggtcttttatatattagggatcctgagatacccgattctatatgtaaaagctaatatacaaaaaagcagattaaattacatgataaatgtagctgatcatcagtgtttaattgatttaattcctaaggcaatattaatgtgttttctaaagtcattcaggtaaggaagaattataaatcaggtaactggaccaacaaagggaacacatataaagctattatgcatgcatggagccgtttgaggctagttttttaaggccacaactccagacccctgatttagactgagataggaaacagatcttgaaagaatccttattttaatgatacatgaatatcatgttcctatacgcttaataattggtctctacgttttaatgatacatgaatatcatgttcctatacgcttaataattggtctctacgactttaatgtttttgtttttttaagctgtgtaagtatttttaaatcaaagcttaggaggtgtgttgcgtggtactatctgctgcaaatttatctgaagtttgttaatattttccaagatttttgtcagccttttcataatccagtcattaacaacctattggtaaacaagaatgtaggtgccagtagactaaaccaaatttatttttccctgagtctgatatatatatgtataaatataaataactcaatccatctgttccaccaaaataactcaaaagttggatgattatttgtcttccgctttccagttcaaagggatgaaattcctttagaacttgaaagatgacactagcgaacaccatgagaatactgtctacagtttttggtacgtcatcactagaacagtgaccccaaactgaatcatgaaaggtctgacatgatgtaatctgatcttccatgtgttattttggccccacatctcttcttgattttttagtcttatttccttagtgttattatcatacttcccctgatatatggccgtacttcctggccctgggcttgacatttcccacccttcattctccatacatatgagatgtcagaaaacatgcagtaattgatattatgggacacattggaaaggattgaatctggaattagttctgtccactgtggaggggagaggaaataatgctgtaaatgttgagttacagaaagtccaatgtcaaatatagtttttttgtttcctttcaaatgtattacagactgtgccaaaacagttaccaattcacactgtcaatattaaagtataccatagtatacaaattagtcagtacttgctgttaattttaatatttctgatttaacagttagttattaagtggtacttcattgctgttttagccaacgttttaaaaataatttgggagtttgactattttggcttacgtactcatttccttttctctgctaaaaatgttttgcttgtgtgcgttcctgatttttgtcttgtataatcttgatctttgaaaaccctcaaacatgtattaaattgttgtaactttttttcattagagggaagacattaaggggattggggacatttgtttcacacatctgcagtaatatgagttaactaatatttaacaagctctttctttacattagctgctgttctcatttgtatgtattgtcatatttaatcctcagagtaacctagtgaggtaaatactgttgttgtcagcatggtgtaatcgaggaattgagtgagttgagcagaaaagttaggaaacttgctcagggtgataatacagttaggagtgtcagggcccatggacaaatcttgtcagtctccagaacctaagatatactacgtcactgacagcttgaacatttgtatttattgtacagaataaatttaagaaaaatacctgtatgagcagtatgtacaacgtgaatgttaccttaaagaagaacctcaaccatgtgaagagaggattcattgtggtggtggcggttttggcatttcaagtaagctcacagcaaatgcaaagcaaagacatgaaattttctcttccaatagggtggcataatctaaaggccaacattcccacagatgataaatatagattctgagcaaaatactagaaacaactacctgagagttcaggaaactgaagaaaaactagaaagattttggatgggagataaaatacggaggaagagacaggcacaagctaaggttaatgtttttaacctaagtaccagctatagtcatgatgcagctgtaggacagctaaggctgcagtggaaagcctggggtctttctggtctggagaactaaaagatgggatctgggctaaccacagcttccagaaagtgaaggagacgtctcagaagggataaacgaggacctggagaaagaggtccc

SEQ ID NO: 427404 - DNA, 6292 bp, Homo sapiens
ggcgccgaaattcaaaggaataaatagttccggcgcgggtgttgagagcggtgtggtaggtgttgtagccgctatggtgaagttcgctttgtagcggccccggctagagagttggcctgttccctgcctttgtgacccggaggagcttttggggtgcgtcaagcccctggcctgaggcagcgaactggtttgtggcctgtttgattcctgtcagaggtttgctgacccaagacagtatcgaaaatgcatattaagtcaattattctagagggattcaagtcctatgctcagaggaccgaagtcaatggttttgaccccctcttcaatgctatcactggcttaaatggtagtgggaaatccaacatattggactccatctgctttttgctgggcatctccaacctgtctcaggtggttattggtggtagaaataaatatttaatcaatggagtcaatgccaacaacaccagagtacaggatctcttctgttctgttggccttaatgttaacaaccctcactttctcatcatgcagggccgaattacaaaagtattgaatatgaaacctccagagattttatccatgatagaagaagcagctggaaccaggatgtatgaatacaaaaaaatagctgcacagaaaactatagaaaaaaaggaggctaagctgaaagaaattaagacgatacttgaagaagagattactccaaccattcaaaaattaaaagaggaaagatcgtcctacttggagtaccaaaaagtaatgagagaaatagaacatttgagtcgtttatatattgcttatcagtttttgctggctgaagataccaaagtacgctcagctgaggaattaaaagaaatgcaagataaagttataaagcttcaggaagaattgtctgagaatgataaaaaaataaaagcacttaatcatgaaatagaagaattggaaaaaagaaaagataaggaaactggaggtatacttcgatctttagaagatgctcttgcagaggctcagcgagttaatactaaatctcaaagcgcatttgatctcaagaagaaaaatctggcatgtgaggaaagcaaacgcaaagagctggaaaaaaatatggttgaggactcaaaaactttagcagcaaaggaaaaagaggttaaaaagataacagatggactgcatgcccttcaagaagcaagtaataaagatgctgaagctctggcagctgcacagcagcacttcaatgctgtttccgctggcctgtccagtaatgaagatggagcagaagcaactcttgctggtcaaatgatggcctgtaaaaatgatataagtaaagctcagacagaagccaaacaggctcagatgaagttgaagcatgctcaacaggaattaaagaataaacaagctgaagttaagaagatggatagtggctacaggaaggatcaagaagctctagaagctgtaaaaagacttaaagaaaaacttgaagctgaaatgaaaaagctaaattatgaagaaaataaagaggaaagccttttggaaaagcgcaggcagctgtctcgtgatattggtagattgaaagaaacatatgaagctctattagccagatttcccaatcttcgatttgcatacaaggatccagagaagaactggaatagaaattgtgtgaaaggacttgtggcttctctgattagtgtgaaagacacttctgcaaccacagctttagaattagtggctggagaacgactctacaatgttgtagtagacacagaagttactggtaaaaagctactagaaaggggggaactgaaacgtcgatacactataattccactcaataaaatttcagccagatgtattgcaccagaaactctgagagttgctcagaatcttgttggccctgacaacgttcatgtggctctttccttggttgaatataaaccagaacttcagaaagcaatggagtttgtctttggaacaacatttgtttgtgacaatatggataatgccaaaaaagtggcctttgataagaggataatgactagaactgtaactctcggaggtgatgtgtttgatcctcatgggacattgagtggaggtgctcgatcccaggcagcttccattttaaccaagtttcaagaactcaaagatgttcaggatgaactgagaatcaaagagaatgagctgcgggctctagaagaggaattagcaggtcttaaaaacactgctgaaaagtatcgccaactaaaacagcagtgggagatgaaaactgaagaggcagatttattacaaaccaagctccagcaaagctcatatcacaagcaacaagaagaattagatgcccttaaaaaaaccattgaggaaagtgaggagactttgaaaaacactaaagaaatccaaagaaaagcagaagaaaaatatgaagtattggaaaataaaatgaaaaatgcagaagctgaaagagagcgagaactgaaagatgctcagaaaaaactggattgtgccaaaacaaaggcagatgcatctagcaagaagatgaaagaaaaacaacaggaagttgaagctatcactctggaactggaagagctcaagagagagcatacatcttacaaacaacagcttgaagctgtaaatgaagctatcaaatcctatgaaagtcagattgaagtaatggcagctgaggtggctaaaaataaggagtcagtaaataaagctcaagaagaggtgaccaagcaaaaagaggtgataacagcccaagacactgtaattaaagctaaatatgcagaagtggcaaaacacaaggagcaaaacaatgattctcagcttaaaattaaggaattagaccacaacatcagcaaacataaacgggaggctgaagatggtgctgcaaaggtatccaaaatgttgaaagattatgactggattaatgcagagagacacctctttggccaacccaatagtgcctatgatttcaaaactaacaaccctaaagaagctggtcagagacttcagaagttgcaagaaatgaaggagaaactaggaagaaatgtcaatatgagagctatgaatgtattgacagaagctgaagagcgatacaatgacttgatgaagaagaagagaattgtagaaaatgacaaatccaaaattcttacaactatagaagaccttgaccagaagaaaaaccaagccctaaatattgcatggcaaaaggtgaacaaggactttgggtctattttttctactcttttgcctggtgctaatgctatgcttgcaccaccagagggtcaaactgttttggatggtctggagttcaaggttgccttgggaaatacctggaaagaaaacctaactgaacttagtggtggtcagaggtctttagtggccttgtcattaatactgtccatgcttctcttcaaacctgctccaatttatatccttgatgaggtagatgcagccttggatctttctcatacccaaaacattggacagatgctgcgtactcatttcacacattctcagttcattgtggtgtcactaaaagaaggtatgttcaacaatgcaaacgttcttttcaaaaccaagtttgtggatggtgtttctacagtagccagatttactcaatgtcaaaatggaaagatttcaaaggaagcaaaatccaaggcaaaaccacccaaaggagcacatgtggaagtttaaactacaaagttatttcttcatcttgacctgtttttttaaatgtaaacttttaaggacttgagataactaatttgtttatatacaaaaattaatgttactgtgttacttaacccatgttttctctttatataatcacttatcgcttacaaatgagcatatattcctcatctcttaactagtctaattatggtccaattattgtggttgtgattttatgcatatcatcaaatgtttttttcttatgcgggtcttttatatattagggatcctgagatacccgattctatatgtaaaagctaatatacaaaaaagcagattaaattacatgataaatgtagctgatcatcagtgtttaattgatttaattcctaaggcaatattaatgtgttttctaaagtcattcaggtaaggaagaattataaatcaggtaactggaccaacaaagggaacacatataaagctattatgcatgcatggagccgtttgaggctagttttttaaggccacaactccagacccctgatttagactgagataggaaacagatcttgaaagaatccttattttaatgatacatgaatatcatgttcctatacgcttaataattggtctctacgttttaatgatacatgaatatcatgttcctatacgcttaataattggtctctacgactttaatgtttttgtttttttaagctgtgtaagtatttttaaatcaaagcttaggaggtgtgttgcgtggtactatctgctgcaaatttatctgaagtttgttaatattttccaagatttttgtcagccttttcataatccagtcattaacaacctattggtaaacaagaatgtaggtgccagtagactaaaccaaatttatttttccctgagtctgatatatatatgtataaatataaataactcaatccatctgttccaccaaaataactcaaaagttggatgattatttgtcttccgctttccagttcaaagggatgaaattcctttagaacttgaaagatgacactagcgaacaccatgagaatactgtctacagtttttggtacgtcatcactagaacagtgaccccaaactgaatcatgaaaggtctgacatgatgtaatctgatcttccatgtgttattttggccccacatctcttcttgattttttagtcttatttccttagtgttattatcatacttcccctgatatatggccgtacttcctggccctgggcttgacatttcccacccttcattctccatacatatgagatgtcagaaaacatgcagtaattgatattatgggacacattggaaaggattgaatctggaattagttctgtccactgtggaggggagaggaaataatgctgtaaatgttgagttacagaaagtccaatgtcaaatatagtttttttgtttcctttcaaatgtattacagactgtgccaaaacagttaccaattcacactgtcaatattaaagtataccatagtatacaaattagtcagtacttgctgttaattttaatatttctgatttaacagttagttattaagtggtacttcattgctgttttagccaacgttttaaaaataatttgggagtttgactattttggcttacgtactcatttccttttctctgctaaaaatgttttgcttgtgtgcgttcctgatttttgtcttgtataatcttgatctttgaaaaccctcaaacatgtattaaattgttgtaactttttttcattagagggaagacattaaggggattggggacatttgtttcacacatctgcagtaatatgagttaactaatatttaacaagctctttctttacattagctgctgttctcatttgtatgtattgtcatatttaatcctcagagtaacctagtgaggtaaatactgttgttgtcagcatggtgtaatcgaggaattgagtgagttgagcagaaaagttaggaaacttgctcagggtgataatacagttaggagtgtcagggcccatggacaaatcttgtcagtctccagaacctaagatatactacgtcactgacagcttgaacatttgtatttattgtacagaataaatttaagaaaaatacctgtatgagcagtatgtacaacgtgaatgttaccttaaagaagaacctcaaccatgtgaagagaggattcattgtggtggtggcggttttggcatttcaagtaagctcacagcaaatgcaaagcaaagacatgaaattttctcttccaatagggtggcataatctaaaggccaacattcccacagatgataaatatagattctgagcaaaatactagaaacaactacctgagagttcaggaaactgaagaaaaactagaaagattttggatgggagataaaatacggaggaagagacaggcacaagctaaggttaatgtttttaacctaagtaccagctatagtcatgatgcagctgtaggacagctaaggctgcagtggaaagcctggggtctttctggtctggagaactaaaagatgggatctgggctaaccacagcttccagaaagtgaaggagacgtctcagaagggataaacgaggacctggagaaagaggtccc

SEQ ID NO: 427405 - DNA, 6331 bp, Homo sapiens
ggcgccgaaattcaaaggaataaatagttccggcgcgggtgttgagagcggtgtggtaggtgttgtagccgctatggtgaagttcgctttgtagcggccccggctagagagttggcctgttccctgcctttgtgacccggaggagcttttggggtgcgtcaagcccctggcctgaggcagcgtacattccacttaggtggtggtatttctgtttcgtacagaactggtttgtggcctgtttgattcctgtcagaggtttgctgacccaagacagtatcgaaaatgcatattaagtcaattattctagagggattcaagtcctatgctcagaggaccgaagtcaatggttttgaccccctcttcaatgctatcactggcttaaatggtagtgggaaatccaacatattggactccatctgctttttgctgggcatctccaacctgtctcaggtggttattggtggtagaaataaatatttaatcaatggagtcaatgccaacaacaccagagtacaggatctcttctgttctgttggccttaatgttaacaaccctcactttctcatcatgcagggccgaattacaaaagtattgaatatgaaacctccagagattttatccatgatagaagaagcagctggaaccaggatgtatgaatacaaaaaaatagctgcacagaaaactatagaaaaaaaggaggctaagctgaaagaaattaagacgatacttgaagaagagattactccaaccattcaaaaattaaaagaggaaagatcgtcctacttggagtaccaaaaagtaatgagagaaatagaacatttgagtcgtttatatattgcttatcagtttttgctggctgaagataccaaagtacgctcagctgaggaattaaaagaaatgcaagataaagttataaagcttcaggaagaattgtctgagaatgataaaaaaataaaagcacttaatcatgaaatagaagaattggaaaaaagaaaagataaggaaactggaggtatacttcgatctttagaagatgctcttgcagaggctcagcgagttaatactaaatctcaaagcgcatttgatctcaagaagaaaaatctggcatgtgaggaaagcaaacgcaaagagctggaaaaaaatatggttgaggactcaaaaactttagcagcaaaggaaaaagaggttaaaaagataacagatggactgcatgcccttcaagaagcaagtaataaagatgctgaagctctggcagctgcacagcagcacttcaatgctgtttccgctggcctgtccagtaatgaagatggagcagaagcaactcttgctggtcaaatgatggcctgtaaaaatgatataagtaaagctcagacagaagccaaacaggctcagatgaagttgaagcatgctcaacaggaattaaagaataaacaagctgaagttaagaagatggatagtggctacaggaaggatcaagaagctctagaagctgtaaaaagacttaaagaaaaacttgaagctgaaatgaaaaagctaaattatgaagaaaataaagaggaaagccttttggaaaagcgcaggcagctgtctcgtgatattggtagattgaaagaaacatatgaagctctattagccagatttcccaatcttcgatttgcatacaaggatccagagaagaactggaatagaaattgtgtgaaaggacttgtggcttctctgattagtgtgaaagacacttctgcaaccacagctttagaattagtggctggagaacgactctacaatgttgtagtagacacagaagttactggtaaaaagctactagaaaggggggaactgaaacgtcgatacactataattccactcaataaaatttcagccagatgtattgcaccagaaactctgagagttgctcagaatcttgttggccctgacaacgttcatgtggctctttccttggttgaatataaaccagaacttcagaaagcaatggagtttgtctttggaacaacatttgtttgtgacaatatggataatgccaaaaaagtggcctttgataagaggataatgactagaactgtaactctcggaggtgatgtgtttgatcctcatgggacattgagtggaggtgctcgatcccaggcagcttccattttaaccaagtttcaagaactcaaagatgttcaggatgaactgagaatcaaagagaatgagctgcgggctctagaagaggaattagcaggtcttaaaaacactgctgaaaagtatcgccaactaaaacagcagtgggagatgaaaactgaagaggcagatttattacaaaccaagctccagcaaagctcatatcacaagcaacaagaagaattagatgcccttaaaaaaaccattgaggaaagtgaggagactttgaaaaacactaaagaaatccaaagaaaagcagaagaaaaatatgaagtattggaaaataaaatgaaaaatgcagaagctgaaagagagcgagaactgaaagatgctcagaaaaaactggattgtgccaaaacaaaggcagatgcatctagcaagaagatgaaagaaaaacaacaggaagttgaagctatcactctggaactggaagagctcaagagagagcatacatcttacaaacaacagcttgaagctgtaaatgaagctatcaaatcctatgaaagtcagattgaagtaatggcagctgaggtggctaaaaataaggagtcagtaaataaagctcaagaagaggtgaccaagcaaaaagaggtgataacagcccaagacactgtaattaaagctaaatatgcagaagtggcaaaacacaaggagcaaaacaatgattctcagcttaaaattaaggaattagaccacaacatcagcaaacataaacgggaggctgaagatggtgctgcaaaggtatccaaaatgttgaaagattatgactggattaatgcagagagacacctctttggccaacccaatagtgcctatgatttcaaaactaacaaccctaaagaagctggtcagagacttcagaagttgcaagaaatgaaggagaaactaggaagaaatgtcaatatgagagctatgaatgtattgacagaagctgaagagcgatacaatgacttgatgaagaagaagagaattgtagaaaatgacaaatccaaaattcttacaactatagaagaccttgaccagaagaaaaaccaagccctaaatattgcatggcaaaaggtgaacaaggactttgggtctattttttctactcttttgcctggtgctaatgctatgcttgcaccaccagagggtcaaactgttttggatggtctggagttcaaggttgccttgggaaatacctggaaagaaaacctaactgaacttagtggtggtcagaggtctttagtggccttgtcattaatactgtccatgcttctcttcaaacctgctccaatttatatccttgatgaggtagatgcagccttggatctttctcatacccaaaacattggacagatgctgcgtactcatttcacacattctcagttcattgtggtgtcactaaaagaaggtatgttcaacaatgcaaacgttcttttcaaaaccaagtttgtggatggtgtttctacagtagccagatttactcaatgtcaaaatggaaagatttcaaaggaagcaaaatccaaggcaaaaccacccaaaggagcacatgtggaagtttaaactacaaagttatttcttcatcttgacctgtttttttaaatgtaaacttttaaggacttgagataactaatttgtttatatacaaaaattaatgttactgtgttacttaacccatgttttctctttatataatcacttatcgcttacaaatgagcatatattcctcatctcttaactagtctaattatggtccaattattgtggttgtgattttatgcatatcatcaaatgtttttttcttatgcgggtcttttatatattagggatcctgagatacccgattctatatgtaaaagctaatatacaaaaaagcagattaaattacatgataaatgtagctgatcatcagtgtttaattgatttaattcctaaggcaatattaatgtgttttctaaagtcattcaggtaaggaagaattataaatcaggtaactggaccaacaaagggaacacatataaagctattatgcatgcatggagccgtttgaggctagttttttaaggccacaactccagacccctgatttagactgagataggaaacagatcttgaaagaatccttattttaatgatacatgaatatcatgttcctatacgcttaataattggtctctacgttttaatgatacatgaatatcatgttcctatacgcttaataattggtctctacgactttaatgtttttgtttttttaagctgtgtaagtatttttaaatcaaagcttaggaggtgtgttgcgtggtactatctgctgcaaatttatctgaagtttgttaatattttccaagatttttgtcagccttttcataatccagtcattaacaacctattggtaaacaagaatgtaggtgccagtagactaaaccaaatttatttttccctgagtctgatatatatatgtataaatataaataactcaatccatctgttccaccaaaataactcaaaagttggatgattatttgtcttccgctttccagttcaaagggatgaaattcctttagaacttgaaagatgacactagcgaacaccatgagaatactgtctacagtttttggtacgtcatcactagaacagtgaccccaaactgaatcatgaaaggtctgacatgatgtaatctgatcttccatgtgttattttggccccacatctcttcttgattttttagtcttatttccttagtgttattatcatacttcccctgatatatggccgtacttcctggccctgggcttgacatttcccacccttcattctccatacatatgagatgtcagaaaacatgcagtaattgatattatgggacacattggaaaggattgaatctggaattagttctgtccactgtggaggggagaggaaataatgctgtaaatgttgagttacagaaagtccaatgtcaaatatagtttttttgtttcctttcaaatgtattacagactgtgccaaaacagttaccaattcacactgtcaatattaaagtataccatagtatacaaattagtcagtacttgctgttaattttaatatttctgatttaacagttagttattaagtggtacttcattgctgttttagccaacgttttaaaaataatttgggagtttgactattttggcttacgtactcatttccttttctctgctaaaaatgttttgcttgtgtgcgttcctgatttttgtcttgtataatcttgatctttgaaaaccctcaaacatgtattaaattgttgtaactttttttcattagagggaagacattaaggggattggggacatttgtttcacacatctgcagtaatatgagttaactaatatttaacaagctctttctttacattagctgctgttctcatttgtatgtattgtcatatttaatcctcagagtaacctagtgaggtaaatactgttgttgtcagcatggtgtaatcgaggaattgagtgagttgagcagaaaagttaggaaacttgctcagggtgataatacagttaggagtgtcagggcccatggacaaatcttgtcagtctccagaacctaagatatactacgtcactgacagcttgaacatttgtatttattgtacagaataaatttaagaaaaatacctgtatgagcagtatgtacaacgtgaatgttaccttaaagaagaacctcaaccatgtgaagagaggattcattgtggtggtggcggttttggcatttcaagtaagctcacagcaaatgcaaagcaaagacatgaaattttctcttccaatagggtggcataatctaaaggccaacattcccacagatgataaatatagattctgagcaaaatactagaaacaactacctgagagttcaggaaactgaagaaaaactagaaagattttggatgggagataaaatacggaggaagagacaggcacaagctaaggttaatgtttttaacctaagtaccagctatagtcatgatgcagctgtaggacagctaaggctgcagtggaaagcctggggtctttctggtctggagaactaaaagatgggatctgggctaaccacagcttccagaaagtgaaggagacgtctcagaagggataaacgaggacctggagaaagaggtccc

SEQ ID NO: 427406 - DNA, 6267 bp, Homo sapiens
ggcgcgggggctgtagggagggggaccagtggcagagggaccttaggtgatccttagaaataaaggctagcttctgttcgaccttggagtagggcgaagaggtgtagacaggcctggagaagcgaggtaaaagcctgagtaaaagcaagaagttggagaatatgagatacatctcatctctagtaaatacttaaatgacttcccctcctcccggagtcaagcacaattcggggatgcaatgacggacgtaggtgaagacactgcgggaacttacagacaaaactggtttgtggcctgtttgattcctgtcagaggtttgctgacccaagacagtatcgaaaatgcatattaagtcaattattctagagggattcaagtcctatgctcagaggaccgaagtcaatggttttgaccccctcttcaatgctatcactggcttaaatggtagtgggaaatccaacatattggactccatctgctttttgctgggcatctccaacctgtctcagggccgaattacaaaagtattgaatatgaaacctccagagattttatccatgatagaagaagcagctggaaccaggatgtatgaatacaaaaaaatagctgcacagaaaactatagaaaaaaaggaggctaagctgaaagaaattaagacgatacttgaagaagagattactccaaccattcaaaaattaaaagaggaaagatcgtcctacttggagtaccaaaaagtaatgagagaaatagaacatttgagtcgtttatatattgcttatcagtttttgctggctgaagataccaaagtacgctcagctgaggaattaaaagaaatgcaagataaagttataaagcttcaggaagaattgtctgagaatgataaaaaaataaaagcacttaatcatgaaatagaagaattggaaaaaagaaaagataaggaaactggaggtatacttcgatctttagaagatgctcttgcagaggctcagcgagttaatactaaatctcaaagcgcatttgatctcaagaagaaaaatctggcatgtgaggaaagcaaacgcaaagagctggaaaaaaatatggttgaggactcaaaaactttagcagcaaaggaaaaagaggttaaaaagataacagatggactgcatgcccttcaagaagcaagtaataaagatgctgaagctctggcagctgcacagcagcacttcaatgctgtttccgctggcctgtccagtaatgaagatggagcagaagcaactcttgctggtcaaatgatggcctgtaaaaatgatataagtaaagctcagacagaagccaaacaggctcagatgaagttgaagcatgctcaacaggaattaaagaataaacaagctgaagttaagaagatggatagtggctacaggaaggatcaagaagctctagaagctgtaaaaagacttaaagaaaaacttgaagctgaaatgaaaaagctaaattatgaagaaaataaagaggaaagccttttggaaaagcgcaggcagctgtctcgtgatattggtagattgaaagaaacatatgaagctctattagccagatttcccaatcttcgatttgcatacaaggatccagagaagaactggaatagaaattgtgtgaaaggacttgtggcttctctgattagtgtgaaagacacttctgcaaccacagctttagaattagtggctggagaacgactctacaatgttgtagtagacacagaagttactggtaaaaagctactagaaaggggggaactgaaacgtcgatacactataattccactcaataaaatttcagccagatgtattgcaccagaaactctgagagttgctcagaatcttgttggccctgacaacgttcatgtggctctttccttggttgaatataaaccagaacttcagaaagcaatggagtttgtctttggaacaacatttgtttgtgacaatatggataatgccaaaaaagtggcctttgataagaggataatgactagaactgtaactctcggaggtgatgtgtttgatcctcatgggacattgagtggaggtgctcgatcccaggcagcttccattttaaccaagtttcaagaactcaaagatgttcaggatgaactgagaatcaaagagaatgagctgcgggctctagaagaggaattagcaggtcttaaaaacactgctgaaaagtatcgccaactaaaacagcagtgggagatgaaaactgaagaggcagatttattacaaaccaagctccagcaaagctcatatcacaagcaacaagaagaattagatgcccttaaaaaaaccattgaggaaagtgaggagactttgaaaaacactaaagaaatccaaagaaaagcagaagaaaaatatgaagtattggaaaataaaatgaaaaatgcagaagctgaaagagagcgagaactgaaagatgctcagaaaaaactggattgtgccaaaacaaaggcagatgcatctagcaagaagatgaaagaaaaacaacaggaagttgaagctatcactctggaactggaagagctcaagagagagcatacatcttacaaacaacagcttgaagctgtaaatgaagctatcaaatcctatgaaagtcagattgaagtaatggcagctgaggtggctaaaaataaggagtcagtaaataaagctcaagaagaggtgaccaagcaaaaagaggtgataacagcccaagacactgtaattaaagctaaatatgcagaagtggcaaaacacaaggagcaaaacaatgattctcagcttaaaattaaggaattagaccacaacatcagcaaacataaacgggaggctgaagatggtgctgcaaaggtatccaaaatgttgaaagattatgactggattaatgcagagagacacctctttggccaacccaatagtgcctatgatttcaaaactaacaaccctaaagaagctggtcagagacttcagaagttgcaagaaatgaaggagaaactaggaagaaatgtcaatatgagagctatgaatgtattgacagaagctgaagagcgatacaatgacttgatgaagaagaagagaattgtagaaaatgacaaatccaaaattcttacaactatagaagaccttgaccagaagaaaaaccaagccctaaatattgcatggcaaaaggtgaacaaggactttgggtctattttttctactcttttgcctggtgctaatgctatgcttgcaccaccagagggtcaaactgttttggatggtctggagttcaaggttgccttgggaaatacctggaaagaaaacctaactgaacttagtggtggtcagaggtctttagtggccttgtcattaatactgtccatgcttctcttcaaacctgctccaatttatatccttgatgaggtagatgcagccttggatctttctcatacccaaaacattggacagatgctgcgtactcatttcacacattctcagttcattgtggtgtcactaaaagaaggtatgttcaacaatgcaaacgttcttttcaaaaccaagtttgtggatggtgtttctacagtagccagatttactcaatgtcaaaatggaaagatttcaaaggaagcaaaatccaaggcaaaaccacccaaaggagcacatgtggaagtttaaactacaaagttatttcttcatcttgacctgtttttttaaatgtaaacttttaaggacttgagataactaatttgtttatatacaaaaattaatgttactgtgttacttaacccatgttttctctttatataatcacttatcgcttacaaatgagcatatattcctcatctcttaactagtctaattatggtccaattattgtggttgtgattttatgcatatcatcaaatgtttttttcttatgcgggtcttttatatattagggatcctgagatacccgattctatatgtaaaagctaatatacaaaaaagcagattaaattacatgataaatgtagctgatcatcagtgtttaattgatttaattcctaaggcaatattaatgtgttttctaaagtcattcaggtaaggaagaattataaatcaggtaactggaccaacaaagggaacacatataaagctattatgcatgcatggagccgtttgaggctagttttttaaggccacaactccagacccctgatttagactgagataggaaacagatcttgaaagaatccttattttaatgatacatgaatatcatgttcctatacgcttaataattggtctctacgttttaatgatacatgaatatcatgttcctatacgcttaataattggtctctacgactttaatgtttttgtttttttaagctgtgtaagtatttttaaatcaaagcttaggaggtgtgttgcgtggtactatctgctgcaaatttatctgaagtttgttaatattttccaagatttttgtcagccttttcataatccagtcattaacaacctattggtaaacaagaatgtaggtgccagtagactaaaccaaatttatttttccctgagtctgatatatatatgtataaatataaataactcaatccatctgttccaccaaaataactcaaaagttggatgattatttgtcttccgctttccagttcaaagggatgaaattcctttagaacttgaaagatgacactagcgaacaccatgagaatactgtctacagtttttggtacgtcatcactagaacagtgaccccaaactgaatcatgaaaggtctgacatgatgtaatctgatcttccatgtgttattttggccccacatctcttcttgattttttagtcttatttccttagtgttattatcatacttcccctgatatatggccgtacttcctggccctgggcttgacatttcccacccttcattctccatacatatgagatgtcagaaaacatgcagtaattgatattatgggacacattggaaaggattgaatctggaattagttctgtccactgtggaggggagaggaaataatgctgtaaatgttgagttacagaaagtccaatgtcaaatatagtttttttgtttcctttcaaatgtattacagactgtgccaaaacagttaccaattcacactgtcaatattaaagtataccatagtatacaaattagtcagtacttgctgttaattttaatatttctgatttaacagttagttattaagtggtacttcattgctgttttagccaacgttttaaaaataatttgggagtttgactattttggcttacgtactcatttccttttctctgctaaaaatgttttgcttgtgtgcgttcctgatttttgtcttgtataatcttgatctttgaaaaccctcaaacatgtattaaattgttgtaactttttttcattagagggaagacattaaggggattggggacatttgtttcacacatctgcagtaatatgagttaactaatatttaacaagctctttctttacattagctgctgttctcatttgtatgtattgtcatatttaatcctcagagtaacctagtgaggtaaatactgttgttgtcagcatggtgtaatcgaggaattgagtgagttgagcagaaaagttaggaaacttgctcagggtgataatacagttaggagtgtcagggcccatggacaaatcttgtcagtctccagaacctaagatatactacgtcactgacagcttgaacatttgtatttattgtacagaataaatttaagaaaaatacctgtatgagcagtatgtacaacgtgaatgttaccttaaagaagaacctcaaccatgtgaagagaggattcattgtggtggtggcggttttggcatttcaagtaagctcacagcaaatgcaaagcaaagacatgaaattttctcttccaatagggtggcataatctaaaggccaacattcccacagatgataaatatagattctgagcaaaatactagaaacaactacctgagagttcaggaaactgaagaaaaactagaaagattttggatgggagataaaatacggaggaagagacaggcacaagctaaggttaatgtttttaacctaagtaccagctatagtcatgatgcagctgtaggacagctaaggctgcagtggaaagcctggggtctttctggtctggagaactaaaagatgggatctgggctaaccacagcttccagaaagtgaaggagacgtctcagaagggataaacgaggacctggagaaagaggtccc

SEQ ID NO: 427407 - DNA, 5682 bp, Homo sapiens
agaggttaaaaagataacagatggactgcatgcccttcaagaagcaagtaataaagatgctgaagctctggccgcgcacagcagcacttcaatgctgtttccgctggcctgtccagtaatgaagatggagcagaagcaactcttgctggtcaaatgatggcctgtaaaaatgatataagtaaagctcagacagaagccaaacaggctcagatgaagttgaagcatgctcagctgaggaattaaaagaaatgcaagataaagttataaagcttcaggaagaattgtctgagaatgataaaaaaataaaagcacttaatcatgaaatagaagaattggaaaaaagaaaagataaggaaactggaggtatacttcgatctttagaagatgctcttgcagaggctcagcgagttaatactaaatctcaaagcgcatttgatctcaagaagaaaaatctggcatgtgaggaaagcaaacgcaaagagctggaaaaaaatatggttgaggactcaaaaactttagcagcaaaggaaaaagaggttaaaaagataacagatggactgcatgcccttcaagaagcaagtaataaagatgctgaagctctggcagctgcacagcagcacttcaatgctgtttccgctggcctgtccagtaatgaagatggagcagaagcaactcttgctggtcaaatgatggcctgtaaaaatgatataagtaaagctcagacagaagccaaacaggctcagatgaagttgaagcatgctcaacaggaattaaagaataaacaagctgaagttaagaagatggatagtggctacaggaaggatcaagaagctctagaagctgtaaaaagacttaaagaaaaacttgaagctgaaatgaaaaagctaaattatgaagaaaataaagaggaaagccttttggaaaagcgcaggcagctgtctcgtgatattggtagattgaaagaaacatatgaagctctattagccagatttcccaatcttcgatttgcatacaaggatccagagaagaactggaatagaaattgtgtgaaaggacttgtggcttctctgattagtgtgaaagacacttctgcaaccacagctttagaattagtggctggagaacgactctacaatgttgtagtagacacagaagttactggtaaaaagctactagaaaggggggaactgaaacgtcgatacactataattccactcaataaaatttcagccagatgtattgcaccagaaactctgagagttgctcagaatcttgttggccctgacaacgttcatgtggctctttccttggttgaatataaaccagaacttcagaaagcaatggagtttgtctttggaacaacatttgtttgtgacaatatggataatgccaaaaaagtggcctttgataagaggataatgactagaactgtaactctcggaggtgatgtgtttgatcctcatgggacattgagtggaggtgctcgatcccaggcagcttccattttaaccaagtttcaagaactcaaagatgttcaggatgaactgagaatcaaagagaatgagctgcgggctctagaagaggaattagcaggtcttaaaaacactgctgaaaagtatcgccaactaaaacagcagtgggagatgaaaactgaagaggcagatttattacaaaccaagctccagcaaagctcatatcacaagcaacaagaagaattagatgcccttaaaaaaaccattgaggaaagtgaggagactttgaaaaacactaaagaaatccaaagaaaagcagaagaaaaatatgaagtattggaaaataaaatgaaaaatgcagaagctgaaagagagcgagaactgaaagatgctcagaaaaaactggattgtgccaaaacaaaggcagatgcatctagcaagaagatgaaagaaaaacaacaggaagttgaagctatcactctggaactggaagagctcaagagagagcatacatcttacaaacaacagcttgaagctgtaaatgaagctatcaaatcctatgaaagtcagattgaagtaatggcagctgaggtggctaaaaataaggagtcagtaaataaagctcaagaagaggtgaccaagcaaaaagaggtgataacagcccaagacactgtaattaaagctaaatatgcagaagtggcaaaacacaaggagcaaaacaatgattctcagcttaaaattaaggaattagaccacaacatcagcaaacataaacgggaggctgaagatggtgctgcaaaggtatccaaaatgttgaaagattatgactggattaatgcagagagacacctctttggccaacccaatagtgcctatgatttcaaaactaacaaccctaaagaagctggtcagagacttcagaagttgcaagaaatgaaggagaaactaggaagaaatgtcaatatgagagctatgaatgtattgacagaagctgaagagcgatacaatgacttgatgaagaagaagagaattgtagaaaatgacaaatccaaaattcttacaactatagaagaccttgaccagaagaaaaaccaagccctaaatattgcatggcaaaaggtgaacaaggactttgggtctattttttctactcttttgcctggtgctaatgctatgcttgcaccaccagagggtcaaactgttttggatggtctggagttcaaggttgccttgggaaatacctggaaagaaaacctaactgaacttagtggtggtcagaggtctttagtggccttgtcattaatactgtccatgcttctcttcaaacctgctccaatttatatccttgatgaggtagatgcagccttggatctttctcatacccaaaacattggacagatgctgcgtactcatttcacacattctcagttcattgtggtgtcactaaaagaaggtatgttcaacaatgcaaacgttcttttcaaaaccaagtttgtggatggtgtttctacagtagccagatttactcaatgtcaaaatggaaagatttcaaaggaagcaaaatccaaggcaaaaccacccaaaggagcacatgtggaagtttaaactacaaagttatttcttcatcttgacctgtttttttaaatgtaaacttttaaggacttgagataactaatttgtttatatacaaaaattaatgttactgtgttacttaacccatgttttctctttatataatcacttatcgcttacaaatgagcatatattcctcatctcttaactagtctaattatggtccaattattgtggttgtgattttatgcatatcatcaaatgtttttttcttatgcgggtcttttatatattagggatcctgagatacccgattctatatgtaaaagctaatatacaaaaaagcagattaaattacatgataaatgtagctgatcatcagtgtttaattgatttaattcctaaggcaatattaatgtgttttctaaagtcattcaggtaaggaagaattataaatcaggtaactggaccaacaaagggaacacatataaagctattatgcatgcatggagccgtttgaggctagttttttaaggccacaactccagacccctgatttagactgagataggaaacagatcttgaaagaatccttattttaatgatacatgaatatcatgttcctatacgcttaataattggtctctacgttttaatgatacatgaatatcatgttcctatacgcttaataattggtctctacgactttaatgtttttgtttttttaagctgtgtaagtatttttaaatcaaagcttaggaggtgtgttgcgtggtactatctgctgcaaatttatctgaagtttgttaatattttccaagatttttgtcagccttttcataatccagtcattaacaacctattggtaaacaagaatgtaggtgccagtagactaaaccaaatttatttttccctgagtctgatatatatatgtataaatataaataactcaatccatctgttccaccaaaataactcaaaagttggatgattatttgtcttccgctttccagttcaaagggatgaaattcctttagaacttgaaagatgacactagcgaacaccatgagaatactgtctacagtttttggtacgtcatcactagaacagtgaccccaaactgaatcatgaaaggtctgacatgatgtaatctgatcttccatgtgttattttggccccacatctcttcttgattttttagtcttatttccttagtgttattatcatacttcccctgatatatggccgtacttcctggccctgggcttgacatttcccacccttcattctccatacatatgagatgtcagaaaacatgcagtaattgatattatgggacacattggaaaggattgaatctggaattagttctgtccactgtggaggggagaggaaataatgctgtaaatgttgagttacagaaagtccaatgtcaaatatagtttttttgtttcctttcaaatgtattacagactgtgccaaaacagttaccaattcacactgtcaatattaaagtataccatagtatacaaattagtcagtacttgctgttaattttaatatttctgatttaacagttagttattaagtggtacttcattgctgttttagccaacgttttaaaaataatttgggagtttgactattttggcttacgtactcatttccttttctctgctaaaaatgttttgcttgtgtgcgttcctgatttttgtcttgtataatcttgatctttgaaaaccctcaaacatgtattaaattgttgtaactttttttcattagagggaagacattaaggggattggggacatttgtttcacacatctgcagtaatatgagttaactaatatttaacaagctctttctttacattagctgctgttctcatttgtatgtattgtcatatttaatcctcagagtaacctagtgaggtaaatactgttgttgtcagcatggtgtaatcgaggaattgagtgagttgagcagaaaagttaggaaacttgctcagggtgataatacagttaggagtgtcagggcccatggacaaatcttgtcagtctccagaacctaagatatactacgtcactgacagcttgaacatttgtatttattgtacagaataaatttaagaaaaatacctgtatgagcagtatgtacaacgtgaatgttaccttaaagaagaacctcaaccatgtgaagagaggattcattgtggtggtggcggttttggcatttcaagtaagctcacagcaaatgcaaagcaaagacatgaaattttctcttccaatagggtggcataatctaaaggccaacattcccacagatgataaatatagattctgagcaaaatactagaaacaactacctgagagttcaggaaactgaagaaaaactagaaagattttggatgggagataaaatacggaggaagagacaggcacaagctaaggttaatgtttttaacctaagtaccagctatagtcatgatgcagctgtaggacagctaaggctgcagtggaaagcctggggtctttctggtctggagaactaaaagatgggatctgggctaaccacagcttccagaaagtgaaggagacgtctcagaagggataaacgaggacctggagaaagaggtccc

SEQ ID NO: 427408 - DNA, 1113 bp, Homo sapiens
ggcgccgaaattcaaaggaataaatagttccggcgcgggtgttgagagcggtgtggtaggtgttgtagccgctatggtgaagttcgctttgtagcggccccggctagagagttggcctgttccctgcctttgtgacccggaggagcttttggggtgcgtcaagcccctggcctgaggcagcgaactggtttgtggcctgtttgattcctgtcagaggtttgctgacccaagacagtatcgaaaatgcatattaagtcaattattctagagggattcaagtcctatgctcagaggaccgaagtcaatggttttgaccccctcttcaatgctatcactggcttaaatggtagtgggaaatccaacatattggactccatctgctttttgctgggcatctccaacctgtctcaggttcgggcttctaatttacaagatttagtttacaaaaatgggcaggctggtattaccaaagcctctgtgtcaatcacttttgataattctgacaaaaagcaaagtcctttaggatttgaggttcatgatgaaatcacagtaacaaggcaggtggttattggtggtagaaataaatatttaatcaatggagtcaatgccaacaacaccagagtacaggatctcttctgttctgttggccttaatgttaacaaccctcactttctcatcatgcagggccgaattacaaaagtattgaatatgaaacctccagagattttatccatgatagaagaagcagctggaaccaggatgtatgaatacaaaaaaatagctgcacagaaaactatagaaaaaaaggaggctaagctgaaagaaattaagacgatacttgaagaagagattactccaaccattcaaaaattaaaagaggaaagatcgtcctacttggagtaccaaaaagtaatgagagaaatagaacatttgagtcgtttatatattgcttatcagtttttgctggctgaagataccaaagtacgctcagctgaggaattaaaagaaatgcaagataaagttataaagcttcaggaagaattgtctgagaatgataaaaaaataaaagcacttaatcatgaaatagaagaattggaaaaaagaaaagataag

SEQ ID NO: 427409 - DNA, 487 bp, Homo sapiens
tgatgttttaacttttttattttttaaatccaggtgaacaaggactttgggtctattttttctactcttttgcctggtgctaatgctatgcttgcaccaccagagggtcaaactgttttggatggtctggagttcaaggttgccttgggaaatacctggaaagaaaacctaactgaacttagtggtggtcagaggtgaggaatcactttgctatattataattttcattcctctttattataattcatctccttaccttaaaactgtatttgtgttttaactacctttgcatgtagaatttaaggagtctaatatataagactaaacaatttggttaaaacatttgattaaaataggtgacaaaggaggaataagcaaatagaaaattagacaaaacatgtttttaaaaaatctattttcaaatattagaaaatgaatagtccaggacaagatgaaacagaaatgctgagccctatgttcaccctgg

SEQ ID NO: 427410 - DNA, 613 bp, Homo sapiens
gcaaaaggaaaatgataccagatggaaccttggatctacataaaggaaagaagagtgttggaaactaacatggatttggagttcagggaagtttctcctgaccttacacagtgattcagaaaatcagcatagtgatagaaacctaaaaggtcatatgtccttacaccttacctaccaatagccaattaattaaaacctcctgaaagaaggttgtcaacattcacataattgaaattcgtgattcatttagtaattggtttttttctcctgcatggtatataatccataggccttgaattattgttctctgtcctgtaattccatcatgtaacccttttttatgtacttagaaaatattgacacctgttaatgttccttatgaccccctttatcatttttatgagtagaaatatattttatttatatttttataaaatttgtaaataagaatcaaaaatacagctcctgctgcctgttcataaaaattggattccacagtttagttcccaatatctttagctatatttgccgaagccctagaaaatgttttgaggaaaatagaaaatgtatgcttctcttcttactgggacctataaattatttccataattaa

SEQ ID NO: 427411 - DNA, 1707 bp, Homo sapiens
ctacgggcaccgtggccacacctgcctgcacagccagggccaggaggaggagatgccatgaccctcattctcacaagcctgctcttctttgggctgagcctgggccccaggacccgggtgcaggcagaaaacctacccaaacccatcctgtgggccgagccaggtcccgtgatcacctggcataaccccgtgaccatctggtgtcagggcaccctggaggcccaggggtaccgtctggataaagagggaaactcaatgtcgaggcacatattaaaaacactggagtctgaaaacaaggtcaaactctccatcccatccatgatgtgggaacatgcagggcgatatcactgttactatcagagccctgcaggctggtcagagcccagcgaccccctggagctggtggtgacagcctacagcagacccaccctgtccgccctgccaagccctgtggtaacctcaggagtgaacgtgaccctccggtgtgcctcacggctgggactgggcaggttcactctgattgaggaaggagaccacaggctctcctggaccctgaactcacaccaacacaaccatggaaagttccaggccctgttccccatgggccccctgaccttcagcaacaggggtacattcagatgctacggctatgaaaacaacaccccatacgtgtggtcggaacccagtgaccccctgcagctactggtgtcaggcgtgtctaggaagccctccctcctgaccctgcagggccctgtcgtgacccccggagagaatctgaccctccagtgtggctctgatgtcggctacatcagatacactctgtacaaggagggggccgatggcctcccccagcgccctggccggcagccccaggctgggctctcccaggccaacttcaccctgagccctgtgagccgctcctacgggggccagtacagatgctacggcgcacacaacgtctcctccgagtggtcggcccccagtgaccccctggacatcctgatcgcaggacagatctctgacagaccctccctctcagtgcagccgggccccacggtgacctcaggagagaaggtgaccctgctgtgtcagtcatgggacccgatgttcactttccttctgaccaaggagggggcagcccatcccccgttgcgtctgagatcaatgtacggagctcataagtaccaggctgaattccccatgagtcctgtgacctcagcccacgcggggacctacaggtgctacggctcacgcagctccaacccctacctgctgtctcaccccagtgagcccctggagctcgtggtctcaggagcaactgagaccctcaatccagcacaaaagaagtcagattccaagactgccccacacctccaggattacacagtggagaatctcatccgcatgggtgtggctggcttggtcctgctgttcctcgggattctgttatttgaggctcagcacagccagagaagccccccaaggtgcagccaggaggcaaacagcagaaaggacaatgcacccttcagagtggtggagccttgggaacagatctgatgatctgaggaggttctggaagactggggcagcagttggggaagtgtctgctgagaatatcaaggggaagaagcatgggtcaggtgcaggaagatgtctgggtgtctgtagaagatgcttcctccattaaactgtggtgctttcctcctc

SEQ ID NO: 427412 - DNA, 2102 bp, Homo sapiens
ctacgggcaccgtggccacacctgcctgcacagccagggccaggaggaggagatgccatgaccctcattctcacaagcctgctcttctttggtgagatcttaagagggggaggagagaccctagtctaggagagagaccccaatccatagccatgccttagtcaattagggcatcccaggggctcaaggaaaagaagaagacctgctcaggcttcggaggcaaatctctcacagggaactctcttccagggctgagcctgggccccaggacccgggtgcaggcagaaaacctacccaaacccatcctgtgggccgagccaggtcccgtgatcacctggcataaccccgtgaccatctggtgtcagggcaccctggaggcccaggggtaccgtctggataaagagggaaactcaatgtcgaggcacatattaaaaacactggagtctgaaaacaaggtcaaactctccatcccatccatgatgtgggaacatgcagggcgatatcactgttactatcagagccctgcaggctggtcagagcccagcgaccccctggagctggtggtgacagcctacagcagacccaccctgtccgccctgccaagccctgtggtaacctcaggagtgaacgtgaccctccggtgtgcctcacggctgggactgggcaggttcactctgattgaggaaggagaccacaggctctcctggaccctgaactcacaccaacacaaccatggaaagttccaggccctgttccccatgggccccctgaccttcagcaacaggggtacattcagatgctacggctatgaaaacaacaccccatacgtgtggtcggaacccagtgaccccctgcagctactggtgtcaggcgtgtctaggaagccctccctcctgaccctgcagggccctgtcgtgacccccggagagaatctgaccctccagtgtggctctgatgtcggctacatcagatacactctgtacaaggagggggccgatggcctcccccagcgccctggccggcagccccaggctgggctctcccaggccaacttcaccctgagccctgtgagccgctcctacgggggccagtacagatgctacggcgcacacaacgtctcctccgagtggtcggcccccagtgaccccctggacatcctgatcgcaggacagatctctgacagaccctccctctcagtgcagccgggccccacggtgacctcaggagagaaggtgaccctgctgtgtcagtcatgggacccgatgttcactttccttctgaccaaggagggggcagcccatcccccgttgcgtctgagatcaatgtacggagctcataagtaccaggctgaattccccatgagtcctgtgacctcagcccacgcggggacctacaggtgctacggctcacgcagctccaacccctacctgctgtctcaccccagtgagcccctggagctcgtggtctcaggagcaactgagaccctcaatccagcacaaaagaagtcagattccaagactgccccacacctccaggattacacagtggagaatctcatccgcatgggtgtggctggcttggtcctgctgttcctcgggattctgttatttgaggctcagcacagccagagaagccccccaaggtgcagccaggaggcaaacagcagaaaggacaatgcacccttcagagtggtggagccttgggaacagatctgatgatctgaggaggttctggaagactggggcagcagttggggaagtgtctgctgagaatatcaaggggaagaagcatgggtcaggtgcaggaagatgtctgggtgtctgtagaagatgcttcctccattaaactgtggtgctttcctcctcattgtcgactctccttgactgccccttccttcgtttttcttccctatgatgtaaggcttcacccctatggtgggtttgggtccgcccctctgtgacctcatgctctgctccactttcaggtaatacacctttctttatttctaactactgcattttctaatgtgtattactgggactatctcttcagctcataacatggaatttgcttttgataattaaatccatgggcaaaaatca

SEQ ID NO: 427413 - DNA, 1944 bp, Homo sapiens
ctacgggcaccgtggccacacctgcctgcacagccagggccaggaggaggagatgccatgaccctcattctcacaagcctgctcttctttgggctgagcctgggccccaggacccgggtgcaggcagaaaacctacccaaacccatcctgtgggccgagccaggtcccgtgatcacctggcataaccccgtgaccatctggtgtcagggcaccctggaggcccaggggtaccgtctggataaagagggaaactcaatgtcgaggcacatattaaaaacactggagtctgaaaacaaggtcaaactctccatcccatccatgatgtgggaacatgcagggcgatatcactgttactatcagagccctgcaggctggtcagagcccagcgaccccctggagctggtggtgacagcctacagcagacccaccctgtccgccctgccaagccctgtggtaacctcaggagtgaacgtgaccctccggtgtgcctcacggctgggactgggcaggttcactctgattgaggaaggagaccacaggctctcctggaccctgaactcacaccaacacaaccatggaaagttccaggccctgttccccatgggccccctgaccttcagcaacaggggtacattcagatgctacggctatgaaaacaacaccccatacgtgtggtcggaacccagtgaccccctgcagctactggtgtcaggcgtgtctaggaagccctccctcctgaccctgcagggccctgtcgtgacccccggagagaatctgaccctccagtgtggctctgatgtcggctacatcagatacactctgtacaaggagggggccgatggcctcccccagcgccctggccggcagccccaggctgggctctcccaggccaacttcaccctgagccctgtgagccgctcctacgggggccagtacagatgctacggcgcacacaacgtctcctccgagtggtcggcccccagtgaccccctggacatcctgatcgcaggacagatctctgacagaccctccctctcagtgcagccgggccccacggtgacctcaggagagaaggtgaccctgctgtgtcagtcatgggacccgatgttcactttccttctgaccaaggagggggcagcccatcccccgttgcgtctgagatcaatgtacggagctcataagtaccaggctgaattccccatgagtcctgtgacctcagcccacgcggggacctacaggtgctacggctcacgcagctccaacccctacctgctgtctcaccccagtgagcccctggagctcgtggtctcaggagcaactgagaccctcaatccagcacaaaagaagtcagattccaagactgccccacacctccaggattacacagtggagaatctcatccgcatgggtgtggctggcttggtcctgctgttcctcgggattctgttatttgaggctcagcacagccagagaagccccccaaggtgcagccaggaggcaaacagcagaaaggacaatgcacccttcagagtggtggagccttgggaacagatctgatgatctgaggaggttctggaagactggggcagcagttggggaagtgtctgctgagaatatcaaggggaagaagcatgggtcaggtgcaggaagatgtctgggtgtctgtagaagatgcttcctccattaaactgtggtgctttcctcctcattgtcgactctccttgactgccccttccttcgtttttcttccctatgatgtaaggcttcacccctatggtgggtttgggtccgcccctctgtgacctcatgctctgctccactttcaggtaatacacctttctttatttctaactactgcattttctaatgtgtattactgggactatctcttcagctcataacatggaatttgcttttgataattaaatccatgggcaaaaatca

SEQ ID NO: 427414 - DNA, 1380 bp, Homo sapiens
ctacgggcaccgtggccacacctgcctgcacagccagggccaggaggaggagatgccatgaccctcattctcacaagcctgctcttctttgggctgagcctgggccccaggacccgggtgcaggcagaaaacctacccaaacccatcctgtgggccgagccaggtcccgtgatcacctggcataaccccgtgaccatctggtgtcagggcaccctggaggcccaggggtaccgtctggataaagagggaaactcaatgtcgaggcacatattaaaaacactggagtctgaaaacaaggtcaaactctccatcccatccatgatgtgggaacatgcagggcgatatcactgttactatcagagccctgcaggctggtcagagcccagcgaccccctggagctggtggtgacagcctacagcagacccaccctgtccgccctgccaagccctgtggtaacctcaggagtgaacgtgaccctccggtgtgcctcacggctgggactgggcaggttcactctgattgaggaaggagaccacaggctctcctggaccctgaactcacaccaacacaaccatggaaagttccaggccctgttccccatgggccccctgaccttcagcaacaggggtacattcagatgctacggctatgaaaacaacaccccatacgtgtggtcggaacccagtgaccccctgcagctactggtgtcaggcgtgtctaggaagccctccctcctgaccctgcagggccctgtcgtgacccccggagagaatctgaccctccagtgtggctctgatgtcggctacatcagatacactctgtacaaggagggggccgatggcctcccccagcgccctggccggcagccccaggctgggctctcccaggccaacttcaccctgagccctgtgagccgctcctacgggggccagtacagatgctacggcgcacacaacgtctcctccgagtggtcggcccccagtgaccccctggacatcctgatcgcaggacagatctctgacagaccctccctctcagtgcagccgggccccacggtgacctcaggagagaaggtgaccctgctgtgtcagtcatgggacccgatgttcactttccttctgaccaaggagggggcagcccatcccccgttgcgtctgagatcaatgtacggagctcataagtaccaggctgaattccccatgagtcctgtgacctcagcccacgcggggacctacaggtgctacggctcacgcagctccaacccctacctgctgtctcaccccagtgagcccctggagctcgtggtctcaggtgagggcgctgaccctgtccactctgagctcaaaggggttcttggaaatgaaaaaggagagcttcca

SEQ ID NO: 427415 - DNA, 2654 bp, Homo sapiens
  misc_feature (1289)..(1289): n is a, c, g, or t
  misc_feature (1291)..(1295): n is a, c, g, or t
ccacaatgctctattttctcacctagtttgacaaatgttaattcctagctcaaactgtgaatagtaaggattgtaaagtatgtaatgctaagggctgtgttgtcttttcttacgattttaagttttaaaggctgttaaattacagagatgttgcccaaggatacatggggattctcaaaagtaagagatttttacctttttcataatctgccaagctggttcctaatatattgttaaattggtagaaaaatatctttaaattggtgtctgctcaagaattgcttttctagatttgatggagggagggggagagtcacatcatttggattctaccaatctgcaggctctatctttggcaacatgtaaataattagactatacatctgtttctcaagtatggcaagaccaatagtttgaatttaattatcaatgctatggtatactttctggtcatattttagttatgtcagttttaaggtaagttttttcatttattaaagcccttaaatgagattttagactgccaaagagaagaggcagtccaattgacctaactgaaatgagatgaccagtatatagagcctagatggactgtagcagctctacccctttgttttacaaggtaaatcattttaaaaattaccttttttgatcagtgggtaaaagttaaagggatctttaatttttgatatattcaagttaattttctaaatgtgaatcagtccttggactgcaactatatattcacctacaaaatcccaatcaaaaaattacatgagcctgtcaagcagatctttagttttccacttcacataagatcgttaatgttctaaattaatctattcatttagatgatttttgtcagttcttaaatggggatataataaatttaggcattttcatcttaacaaggcaaaagagttaaaaaacaaaacaaaacactactccaagccaaatacattctagctggttaattccagacttgtcccaagtggttccccaacctcttttccactggtaatttcttttcatgcaggcagaatataggggtgcgagcgctgtgagttttacatatgagcttggataggggaactgaagcgagtcaggagccctgctggaaaaggggtttgccattggattgtctgtggcctggtttctttccagtagtacagtaatagggtagattgaaaacaagtatttacttctgattctgcctgcatttagtgtgaaatgctcttaaggtattgcttctaaaaagcaaattaagcagttaagtataaagtccctgnannnnnatttcaaaataaggcttttatgagatttttattaaaaattgcaatagccatcacaaatctgagtttttctaggggtgagagaaaactgtattgtgatgagctagattagttgtagttccagaataagaacaaaaattcagagttgtgtggtgcccatcattgagtaaatgaaccctaaaaatgaataagctaatgaactagttcatggaattatttctgatggtcttttgacctgatgctgccatactgcagtgttaccagctccccctagaaaacggaactgtttaaaaacacagcaagttacagaaaccattttattctacagccattggggtacttcagtttatgggatgtttttggaaacttctgctttgggagggatgaagatcattgataaatgttatttgctttctgagttttggggtcatttcattgcttatcaatgaagggcagacagaggagagaatatctcaagtcttttctgataaaaggcttgcttgagggagcttataacttgcacctagagggtttacccactttgtggatttgatttatccaccaaccacagcaaccaataatgtcaagattctaggagtttatgaaagaggctagtatgttttcattttgagtcagacattcttttctcattctcaaatctgttttaaatgctccaattttaaaaatgccaatgaaaattttataatgcttctgtagtaaccatatgcagtttactttgaatttaggaaaacagttttgtatgatgaaatattgtgcagaatctgtaaataaggtagcttaaaaaaaaaaaaaaagtctaattagaatatgattaatccttgaaatgtagaaactagagattgtgttgagtcagaactgttatgtttgtatccaggtttctattcaccacatataccatcttagaatacacacatatctgtgagttataatttaaagtggtcatccagggaaatgatcatggagtgctactacagatgtacagttttacactactgatgtgttcttgccatacccaagtagggaatcacttccaggaaaacaagtcctcaagcactcaatgactttgtaaacccatgactgaaacaagactcatctgaggcagtaggactggtgggattctactgacttcttagtatcacatggcaccatcacaaatgcattgttagagcagcaacatccagagttcttaagcttgtaccctaacacacaaatttgacttctaaccctgaaatatcctatatatatttctaaaactgtttgtagttttcttgagaaaaagcactttataatttactcagttttcagtaataaaattaacactgacttgaatgtatttaaaaa

SEQ ID NO: 427416 - DNA, 4115 bp, Homo sapiens
  misc_feature (2750)..(2750): n is a, c, g, or t
  misc_feature (2752)..(2756): n is a, c, g, or t
gccttttttttctacgttatgcaaaatgcccagggatttaatgcacaggtgtactttaatgtttagggtcagtttgtagtattcttgagaaaaagataaagggttataatttgaatgtgaactgatccagaaataagtgctgtacctttccactgcacttgaagttcaacttaatggtgtatgtgaaaaacaaaaactactttggttgtgtatgtccaaagtcctatggttttattcatttatggttttacaggctttgaagtactcagatttgatttttgctttcttggaaagactcactttaccaagcatataaaggaaaaatgatttcaaacattgacaagatagatgagtgttaacaaagctttcttttttcgtgtcctccttatttaaaaaggtatacttacaatgtgaagtaacttatgaataaaaggaaaagtttatcccatattcaaataattcctaaggtcagcctccctttttgtaagtggcaaatatctgattaaatcatttctcagtttattaatccttggaaacaatgatatagcagttactcacagcttgtaaattacaacagaaaggttcctttcaaatagtagagctgcacctaaagaggaaattgggtttataagaaaatggaggcaaagaacttaagttttaagaaaaagcacttcaaaacagaagggcaaatggaaaaggggaatataaaacaaaccaataaaaataccatctgagggtgttactgtccaaaagtaaagaataagatgcatcactaagccctttgcactcgttatgacctcgtaagtaaaaattatcacttagaataaggggtgcacactacattccctctgtcttctagactttttttttgtagaagaatcagaaaacaatttactaacctccctgtttgatattaaaaataggaagaattttaatattttctgttagtacaagttgaacttgattgtgccaactgaaaccccagaggtttgtatatcagtagaatgcaagaacattgttaaaggtgcttacgatcttttttgttttcctttccactccattgtatcaattttttgagtaacttttaaatggctagaaaatggtctttttgctttgcccttttaaagctgaaataaccagctccattcttttcatgaatagtaagttgatatatttatttatcaggtatcttgcagttgtcaccaaatactgtagttttcttatgttgtatggaaattatagttcaattattttaatgtgatggagtgcaacaagtcattgtagaacttttcacctgttaatgttgaagttatacctctgaatttctgctgtggatatcaaggaaataataaagcagaaaccccaagaaatttgcaacttaacagtttgagactgtctcttatcctagtatttgggaagagaaggaataaatttgtcaaaactaggtgagaaaatagagcattgtgggaaaaactgagtccaactagattagcaaatgttaattcctagctcaaactgtgaatagtaaggattgtaaagtatgtaatgctaagggctgtgttgtcttttcttacgattttaagttttaaaggctgttaaattacagagatgttgcccaaggatacatggggattctcaaaagtaagagatttttacctttttcataatctgccaagctggttcctaatatattgttaaattggtagaaaaatatctttaaattggtgtctgctcaagaattgcttttctagatttgatggagggagggggagagtcacatcatttggattctaccaatctgcaggctctatctttggcaacatgtaaataattagactatacatctgtttctcaagtatggcaagaccaatagtttgaatttaattatcaatgctatggtatactttctggtcatattttagttatgtcagttttaaggtaagttttttcatttattaaagcccttaaatgagattttagactgccaaagagaagaggcagtccaattgacctaactgaaatgagatgaccagtatatagagcctagatggactgtagcagctctacccctttgttttacaaggtaaatcattttaaaaattaccttttttgatcagtgggtaaaagttaaagggatctttaatttttgatatattcaagttaattttctaaatgtgaatcagtccttggactgcaactatatattcacctacaaaatcccaatcaaaaaattacatgagcctgtcaagcagatctttagttttccacttcacataagatcgttaatgttctaaattaatctattcatttagatgatttttgtcagttcttaaatggggatataataaatttaggcattttcatcttaacaaggcaaaagagttaaaaaacaaaacaaaacactactccaagccaaatacattctagctggttaattccagacttgtcccaagtggttccccaacctcttttccactggtaatttcttttcatgcaggcagaatataggggtgcgagcgctgtgagttttacatatgagcttggataggggaactgaagcgagtcaggagccctgctggaaaaggggtttgccattggattgtctgtggcctggtttctttccagtagtacagtaatagggtagattgaaaacaagtatttacttctgattctgcctgcatttagtgtgaaatgctcttaaggtattgcttctaaaaagcaaattaagcagttaagtataaagtccctgnannnnnatttcaaaataaggcttttatgagatttttattaaaaattgcaatagccatcacaaatctgagtttttctaggggtgagagaaaactgtattgtgatgagctagattagttgtagttccagaataagaacaaaaattcagagttgtgtggtgcccatcattgagtaaatgaaccctaaaaatgaataagctaatgaactagttcatggaattatttctgatggtcttttgacctgatgctgccatactgcagtgttaccagctccccctagaaaacggaactgtttaaaaacacagcaagttacagaaaccattttattctacagccattggggtacttcagtttatgggatgtttttggaaacttctgctttgggagggatgaagatcattgataaatgttatttgctttctgagttttggggtcatttcattgcttatcaatgaagggcagacagaggagagaatatctcaagtcttttctgataaaaggcttgcttgagggagcttataacttgcacctagagggtttacccactttgtggatttgatttatccaccaaccacagcaaccaataatgtcaagattctaggagtttatgaaagaggctagtatgttttcattttgagtcagacattcttttctcattctcaaatctgttttaaatgctccaattttaaaaatgccaatgaaaattttataatgcttctgtagtaaccatatgcagtttactttgaatttaggaaaacagttttgtatgatgaaatattgtgcagaatctgtaaataaggtagcttaaaaaaaaaaaaaaagtctaattagaatatgattaatccttgaaatgtagaaactagagattgtgttgagtcagaactgttatgtttgtatccaggtttctattcaccacatataccatcttagaatacacacatatctgtgagttataatttaaagtggtcatccagggaaatgatcatggagtgctactacagatgtacagttttacactactgatgtgttcttgccatacccaagtagggaatcacttccaggaaaacaagtcctcaagcactcaatgactttgtaaacccatgactgaaacaagactcatctgaggcagtaggactggtgggattctactgacttcttagtatcacatggcaccatcacaaatgcattgttagagcagcaacatccagagttcttaagcttgtaccctaacacacaaatttgacttctaaccctgaaatatcctatatatatttctaaaactgtttgtagttttcttgagaaaaagcactttataatttactcagttttcagtaataaaattaacactgacttgaatgtatttaaaaa

SEQ ID NO: 427417 - DNA, 4061 bp, Homo sapiens
  misc_feature (2750)..(2750): n is a, c, g, or t
  misc_feature (2752)..(2756): n is a, c, g, or t
gccttttttttctacgttatgcaaaatgcccagggatttaatgcacaggtgtactttaatgtttagggtcagtttgtagtattcttgagaaaaagataaagggttataatttgaatgtgaactgatccagaaataagtgctgtacctttccactgcacttgaagttcaacttaatggtgtatgtgaaaaacaaaaactactttggttgtgtatgtccaaagtcctatggttttattcatttatggttttacaggctttgaagtactcagatttgatttttgctttcttggaaagactcactttaccaagcatataaaggaaaaatgatttcaaacattgacaagatagatgagtgttaacaaagctttcttttttcgtgtcctccttatttaaaaaggtatacttacaatgtgaagtaacttatgaataaaaggaaaagtttatcccatattcaaataattcctaaggtcagcctccctttttgtaagtggcaaatatctgattaaatcatttctcagtttattaatccttggaaacaatgatatagcagttactcacagcttgtaaattacaacagaaaggttcctttcaaatagtagagctgcacctaaagaggaaattgggtttataagaaaatggaggcaaagaacttaagttttaagaaaaagcacttcaaaacagaagggcaaatggaaaaggggaatataaaacaaaccaataaaaataccatctgagggtgttactgtccaaaagtaaagaataagatgcatcactaagccctttgcactcgttatgacctcgtaagtaaaaattatcacttagaataaggggtgcacactacattccctctgtcttctagactttttttttgtagaagaatcagaaaacaatttactaacctccctgtttgatattaaaaataggaagaattttaatattttctgttagtacaagttgaacttgattgtgccaactgaaaccccagaggtttgtatatcagtagaatgcaagaacattgttaaaggtgcttacgatcttttttgttttcctttccactccattgtatcaattttttgagtaacttttaaatggctagaaaatggtctttttgctttgcccttttaaagctgaaataaccagctccattcttttcatgaatagtaagttgatatatttatttatcaggtatcttgcagttgtcaccaaatactgtagttttcttatgttgtatggaaattatagttcaattattttaatgtgatggagtgcaacaagtcattgtagaacttttcacctgttaatgttgaagttatacctctgaatttctgctgtggatatcaaggaaataataaagcagaaaccccaagaaatttgcaacttaacagtttgagactgtctcttatcctagtatttgggaagagaaggaataaatttgtcaaaactaggtgagaaaatagagcattgtgggaaaaactgagtccaactagattagcaaatgttaattcctagctcaaactgtgaatagtaaggattgtaaagtatgtaatgctaagggctgtgttgtcttttcttacgattttaagttttaaaggctgttaaattacagagatgttgcccaaggatacatggggattctcaaaagtaagagatttttacctttttcataatctgccaagctggttcctaatatattgttaaattggtagaaaaatatctttaaattggtgtctgctcaagaattgcttttctagatttgatggagggagggggagagtcacatcatttggattctaccaatctgcaggctctatctttggcaacatgtaaataattagactatacatctgtttctcaagtatggcaagaccaatagtttgaatttaattatcaatgctatggtatactttctggtcatattttagttatgtcagttttaaggtaagttttttcatttattaaagcccttaaatgagattttagactgccaaagagaagaggcagtccaattgacctaactgaaatgagatgaccagtatatagagcctagatggactgtagcagctctacccctttgttttacaaggtaaatcattttaaaaattaccttttttgatcagtgggtaaaagttaaagggatctttaatttttgatatattcaagttaattttctaaatgtgaatcagtccttggactgcaactatatattcacctacaaaatcccaatcaaaaaattacatgagcctgtcaagcagatctttagttttccacttcacataagatcgttaatgttctaaattaatctattcatttagatgatttttgtcagttcttaaatggggatataataaatttaggcattttcatcttaacaaggcaaaagagttaaaaaacaaaacaaaacactactccaagccaaatacattctagctggttaattccagacttgtcccaagtggttccccaacctcttttccactggtaatttcttttcatgcaggcagaatataggggtgcgagcgctgtgagttttacatatgagcttggataggggaactgaagcgagtcaggagccctgctggaaaaggggtttgccattggattgtctgtggcctggtttctttccagtagtacagtaatagggtagattgaaaacaagtatttacttctgattctgcctgcatttagtgtgaaatgctcttaaggtattgcttctaaaaagcaaattaagcagttaagtataaagtccctgnannnnnatttcaaaataaggcttttatgagatttttattaaaaattgcaatagccatcacaaatctgagtttttctaggggtgagagaaaactgtattgtgatgagctagattagttgtagttccagaataagaacaaaaattcagagttgtgtggtgcccatcattgagtaaatgaaccctaaaaatgaataagctaatgaactagttcatggaattatttctgatggtcttttgacctgatgctgccatactgcagtgttaccagctccccctagaaaacggaactgtttaaaaacacagcaagttacagaaaccattttattctacagccattggggtacttcagtttatgggatgtttttggaaacttctgctttgggagggatgaagatcattgataaatgttatttgctttctgagttttggggtcatttcattgcttatcaatgaagggcagacagaggagagaatatctcaagtcttttctgatgtggatttgatttatccaccaaccacagcaaccaataatgtcaagattctaggagtttatgaaagaggctagtatgttttcattttgagtcagacattcttttctcattctcaaatctgttttaaatgctccaattttaaaaatgccaatgaaaattttataatgcttctgtagtaaccatatgcagtttactttgaatttaggaaaacagttttgtatgatgaaatattgtgcagaatctgtaaataaggtagcttaaaaaaaaaaaaaaagtctaattagaatatgattaatccttgaaatgtagaaactagagattgtgttgagtcagaactgttatgtttgtatccaggtttctattcaccacatataccatcttagaatacacacatatctgtgagttataatttaaagtggtcatccagggaaatgatcatggagtgctactacagatgtacagttttacactactgatgtgttcttgccatacccaagtagggaatcacttccaggaaaacaagtcctcaagcactcaatgactttgtaaacccatgactgaaacaagactcatctgaggcagtaggactggtgggattctactgacttcttagtatcacatggcaccatcacaaatgcattgttagagcagcaacatccagagttcttaagcttgtaccctaacacacaaatttgacttctaaccctgaaatatcctatatatatttctaaaactgtttgtagttttcttgagaaaaagcactttataatttactcagttttcagtaataaaattaacactgacttgaatgtatttaaaaa

SEQ ID NO: 427418 - DNA, 620 bp, Homo sapiens
agcggaagttcttgggagcgccagttccgtctgtgtgttcgagtggacaaaatggcgaagatcgccaagactcacgaagatattgaagcacagattcgagaaattcaaggcaagaaggcagctcttgatgaagctcaaggagtgggcctcgattctacaggttattatgaccaggaaatttatggtggaagtgacagcagatttgctggatacgtgacatcaattgctgcaactgaacttgaagatgatgacgatgactattcatcatctacgagtttgcttggtcagaagaagccaggatatcatgcccctgtggcattgcttaatgatataccacagtcaacagaacagtatgatccatttgctgagcacagacctccaaagattgcagaccgggaagatgaatacaaaaagcataggcggaccatgataatttccccagagcgtcttgatccttttgcagatggcttctattctgctgcttgaagtcagaactgctgatggagacaaaggcacgaaagtgtacgtattccggattagcaacccaggaacccatcacttctgaagactctaaactgtgctgtcattttgtttttatatgcattaaaatatttgtttta

SEQ ID NO: 427419 - DNA, 1525 bp, Homo sapiens
agcggaagttcttgggagcgccagttccgtctgtgtgttcgagtggacaaaatggcgaagatcgccaagactcacgaagatattgaagcacagattcgagaaattcaaggcaagaaggcagctcttgatgaagctcaaggagtgggcctcgattctacaggttattatgaccaggaaatttatggtggaagtgacagcagatttgctggatacgtgacatcaattgctgcaactgaacttgaagatgatgacgatgactattcatcatctacgagtttgcttggtcagaagaagccaggatatcatgcccctgtggcattgcttaatgatataccacagtcaacagaacagtatgatccatttgctgagcacagacctccaaagattgcagaccgggaagatgaatacaaaaagcataggcggaccatgataatttccccagagcgtcttgatccttttgcagatggagggaagacccctgatcctaaaatgaatgctaggacttacatggatgtaatgcgagaacaacacttgactaaagaagaacgagaaattaggcaacagctagcagaaaaagctaaagctggagaactaaaagtcgtcaatggagcagcagcgtcccagcctccatcaaaacgaaaacggcgttgggatcaaacagctgatcagactcctggtgccactcccaaaaaactatcaagttgggatcaggcagagacccctgggcatactccttccttaagatgggatgagacaccaggtcgtgcaaagggaagcgagactcctggagcaaccccaggctcaaaaatatgggatcctacacctagccacacaccagcgggagctgctactcctggacgaggtgatacaccaggccatgcgacaccaggccatggaggcgcaacttccagtgctcgtaaaaacagatgggatgaaacccccaaaacagagagagatactcctgggcatggaagtggatgggctgagactcctcgaacagatcgaggtggagattctattggtgaaacaccgactcctggagccagtaaaagaaaatcacggtgggatgaaacaccagctagtcagatgggtggaagcactccagttctgacccctggaaagacaccaattggcacaccagccatgaacatggctacccctactccaggtcacataatgagtatgactcctgaacagcttcaggcttggcggtgggaaagagaaattgatgagagaaatcgcccactttctgatgaggaattagatgctatgttcccagaaggatataaggtacttcctcctccagctggttatgttcctattcgaactccagctcgaaagctgacagctactccaacacctttgggtggtatgactggtttccacatgcaaactgaagatcgaactatgaaaagtgttaatgaccagccatctggaaatcttccatttttaaaacctgatgatattcaatactttgataaactattggttgatgttgatgaatcaacacttagtccagaagagc

SEQ ID NO: 427420 - DNA, 2289 bp, Homo sapiens
caccagaatgcttgagttgtttttttcttctgtaaaatcaccttggacccaaccaggacaccaggtccaggaatctgagttgttgagttttacatgatttaagtttgtaatgaaaatttctttcatctagtaaaggtaattactattcaatattattatgtccagaagtgtatatatgctgagtttcattctagctaagaatagaaagtagaataaaaggagactaggtttttatttgacctttgaacaaagacagtagatccctgatactgagtgactctttaagagtggccactcatcaacacctatgggctgattcagagaaacaggaaggtagaaattaagaagagattctttacctgaaatcttgccagagatggcagtcccgctactgttctgtgccttctgctgaaaagggcatggaaagattgctgccactcttactctatagtcattacaggaaagccatcctttctaccagagagatgactttttctatttgagtttcaccttgggagttgcacattatttgcaaggaagtatttcaaatcttatcttgttctaatgtataaacaggaaaaaaaaaaaagaatgtaagagaaaaaaaaaaacaggaggaggatgagcagaatgatggcggtggtatttatcaaacttggccctgaaggatgccgctagcgtctcccatccagcaccatgaagtcaccaggggtgtggctccctccatggctctcagagatggcgtatgcagaatcccactttctgccgagtttacagctcagtgcactgattcccaggctcctcaaatgaagagagctcccagatgctgctgtcttgcagtagtggctcaatgtcctcatcactgccccgttctggggtgttggtcaggctgccgctgctgctgttactgtgtttttgaactccactggctttactgtattcaggaatgaataaggcaaccagaaaagacataaggactatacatgccccaaataaaaacggcgggcctgggatgacagctccctgttgaatgtggaaaacaagtggagacaaagaatacagttagtcttttaactcaaaattattcctagattacccaaaaaaaacacaccaccaaaaagtgaatcatattctcataagcaaatgtttcattaaatgtcaaggcaaactccactagagcttggtgtttggaatatgacaaagggcaactaattaactgctttttgtaccacttccaaatagcttaagcaaaactgtaagcttgtaagcaacagctgtttacctataatcccatcctatgacttcagatcatgcacctttgtacatgaacattaattccagctttgtatagatatggcttagagggaacaagggaagaaatttcaaataaatagtacaaaaagtaccctacctcaatttttagctggatttttaggtcatttcaaattttaactagcctgggcttatccagagaatagtgtagtgattgtgtaggtgaaaacagaatctgaacaaagtttaagacatatcttttacataagatattaaatcactaaaatgacccctccctgatcccgagaagcaatgaacacaatacttattgctgccaaataaaatatagtaacatacaagaaagaatgctctccaaatttaaggtcacaagattttgctataatcatacataattgttgttacaaaactagacttatgaccaaattacctgcaggggaacgttgttagaattcaatttcgggcccaactcagtcagttccacatggaacatgtagaatgttgcaatattgtttacagggtctgtttcacccagcccggaaagtcagagatgtatattggaaaatttacaactccatctacattggttcccaggacgctctcatagcacattacccaagaatctacaacgatgataagaacacctatattcgttatgaacttgactatatcttataattttattgtttattttgtgtttaatgcacagctacttcacaccttaaacttgctttgatttggtgatgtaaacttttaaacattgcagatcagtgtagaactggtcatagaggaagagctagaaatccagtagcatgatttttaaataacctgtctttgtttttgatgttaaacagtaaatgccagtagtgaccaagaacacagtgattatatacactatactggagggatttcatttttaattcatctttatgaagatttagaactcattccttgtgtttaaagggaatgtttaattgagaaataaacatttgtgtacaa

SEQ ID NO: 427421 - DNA, 890 bp, Homo sapiens
  misc_feature (890)..(890): n is a, c, g, or t
tgtagatccccatgttatccccaacaccaggttcagctgcctgtgaagtcatttgtttcgtgttcatttcctagttactggtatttttttaatcattaaaaatgtttttaaattattgatagtaattgtacgtatttgtagggtgcatgtgtgcagtgggtgatgatcagatcggggtgcatgtgtgcagtgggtgatgatcagattggggttaatggcagagccacctcacagttactgttttgtgttgggcgataacattatccccaacacagaggaaagggtttggctgctttcttgaaggctattgggtatcttattcctcttatggatgcagaatatgccaactactatactagagaagtgatgttaatccttattcgagaattccagtctcctgatgaggaaatgaaaaaaattgtgctgaaggtggtaaaacagtgttgtgggacagatggtgtagaagcaaactacattaaaacagagattcttcctcccttttttaaacacttctggcagcacaggatggctttggatagaagaaattaccgacagttagttgatactactgtggagttggcaaacaaagtaggtgcagcagaaattatatccaggattgtggatgatctgaaagatgaagccgaacagtacagaaaaatggtgatgggcgataaatcacgtgatgttatcgcccaacaccaagaacaagcgatgtttgcttttaactgagggcaaagtaacttgcccactcgtgcagagagagccaggggtgggaccctaggccggtctggctctaaagctggtaccttccttgttgtggccgttagtcataaatgtgaacaggtgagaacagctaaccgcaatcttggtcatactgtgttggggagtan

SEQ ID NO: 427422 - DNA, 606 bp, Homo sapiens
  misc_feature (462)..(462): n is a, c, g, or t
  misc_feature (475)..(475): n is a, c, g, or t
tcagtcggtaccgatgtttcgctcaaacgtggtgaagcaagtttgagcctccctcttgtgggcggttccttggctgggatgatgattactggtctgtggaccccttggacagggccatggctgagctggctgcctgaggaggggcagggcccacccatgtcaccggtcagtgccttttggaactgtccttccctcaaagaggccttagagcgagcagagcagctctgctatgagtgtggggagtgttagaggatccccgtgatgttatcgcccaacacagaggaaagggtttggctgctttcttgaaggctattgggtatcttattcctcttatggatgcagaatatgccaactactatactagagaagtgatgttaatccttattcgagaattccagtctcctgatgaggaaatgaaaaaaattgtgctgaaggtggtaaaacagtgttggggatagtgtnggggataacatantatttatccccaacacgcacattgaaaacaaacaaaatgtcagttttacttttcacttaatatcttggatgaaacagcaaaaaaaattttttttattaagtgtggggcgataacatcacggggatcctcta

SEQ ID NO: 427423 - DNA, 510 bp, Homo sapiens
taggaatattctattttagaacttgatagttttgagtataactgtttgagaataaagaatattattttaacagtgattaaaattgtggttttactcactctttctttttaaagatactcctgggcatggaagtggatgggctgagactcctcgaacagatcgaggtggagattctattggtgaaacaccgactcctggagccagtaaaagaaaatcacggtgggatgaaacaccagctagtcagatgggtggaagcactccagttctgacccctggaaagacaccaattggcacaccagccatgaacatggctacccctactccaggtcacataatgagtatgactcctgaacagcttcaggcttggcggtgggaaagagaaattgatgagagaaatcgcccactttctgatgaggaattagatgctatgttcccagaaggatataaggtagtacatcaaatttgaatgaggtggtatttaggatatacatttattttaaatagtgaaaa

SEQ ID NO: 427424 - DNA, 475 bp, Homo sapiens
atacataatcaaaaattgttaataaaagttaaaaacgattctgagtctggtcagaatctggggctttctctttccctaggcagctgtaagtttatatttatacatagtcatatatgacattgctaagtaaaaggaaagtgaacaaaagttgcaattcaaatgttgatagtttattgacttctattaaataggtatgcataagatgactccaccaattaaagatctgctgcctagactcacccccatcttaaagaacagacatgaaaaagtacaagagaattgtattgatcttgttggtcgtattgctgacaggggagctgaatatgtatctgcaagagagtggatgaggatttgctttgagcttttagagctcttaaaagcccacaaaaaggctattcgtagagccacagtcaacacatttggttatattgcaaaggccattgggtgagtgttatttacttccattaaaaaaaaa

SEQ ID NO: 427425 - DNA, 325 bp, Homo sapiens
  misc_feature (37)..(38): n is a, c, g, or t
gcggccgcctactactactaaattcgcggccgcgtcnnccgcccactttctgatgaggaattagatgctatgttcccagaaggatataaggtacttcctcctccagctggttatgttcctattcgaactccagctcgaaagctgacagctactccaacacctttgggtggtatgactggtttccacatgcaaactgaagatcgaactatgaaaagtgttaatgaccagccatctggaaatcttccatttttaaaacctgatgatattcaatactttgataaactattggttgatgttgatgaatcaacacttagtccagaagagc

SEQ ID NO: 427426 - DNA, 546 bp, Homo sapiens
aaagcaaatactgaaactttaaccaagagactgacacatctctttgtacaccacgttgcttctgtgtgcatcataataactggtagaagtaatatatttaaagtaatatgtttccagttttaatttatgctttctaagaaataaaaatatgttttctgggtcaacaaaacttaaagcatgaagccctttttagtaacgtgacatcagaataagattataggtatatttttaaaatcagattttctaaactacaattgttttagaacactgtatgaagaacttatctagtcatagttatttgtagtcaggattttaacagcttgcaacaggtaatgttttgaatataaatatctttccaaagtgttactaatggtaaagagataattttctaggcttctattctgctgcttgaagtcagaactgctgatggagacaaaggcacgaaagtgtacgtattccggattagcaacccaggaacccatcacttctgaagactctaaactgtgctgtcattttgtttttatatgcattaaaatatttgtttta

SEQ ID NO: 427427 - DNA, 5123 bp, Homo sapiens
aaagcaaatactgaaactttaaccaagagactgacacatctctttgtacaccacgttgcttctgtgtgcatcataataactggtagaagtaatatatttaaagtaatatgtttccagttttaatttatgctttctaagaaataaaaatatgttttctgggtcaacaaaacttaaagcatgaagccctttttagtaacgtgacatcagaataagattataggtatatttttaaaatcagattttctaaactacaattgttttagaacactgtatgaagaacttatctagtcatagttatttgtagtcaggattttaacagcttgcaacaggtaatgttttgaatataaatatctttccaaagtgttactaatggtaaagagataattttctaggcttctattctgctgcttgaagtcagaactgctgatggagacaaaggcacgaaagtgtacgtattccggattagcaacccaggaacccatcacttctgaagactctaaactgtgctgtcattttgtttttatatgcattaaaatatttgttttaaactgctgtagatgtttgtgttcaaacaggttaaattgatcagcaaactcaataaaaagtaagatgtataattattaaagttttccatcaaaaaataatttaaatgattatggaataacataatatttagagcagggcagataaatcagttgaacctgcttattttttatttattgtactctttttcctgttgctgttcttttctgcaggagagggaagacccctgatcctaaaatgaatgctaggacttacatggatgtaatgcgagaacaacacttgactaaagaagaacgagaaattaggcaacagctagcagaaaaagctaaagctggagaactaaaagtcgtcaatggagcagcagcgtcccagcctccatcaaaacgaaaacggcgttgggatcaaacagctgatcagactcctggtgccactcccaaaaaactatcaagttgggatcaggcagagacccctgggcatactccttccttaagatgggatgagacaccaggtcgtgcaaagggaagcgagactcctggagcaaccccaggctcaaaaatatgggatcctacacctagccacacaccagcgggagctgctactcctggacgaggtgatacaccaggccatgcgacaccaggccatggaggcgcaacttccagtgctcgtaaaaacagatgggatgaaacccccaaaacagagagagatactcctgggcatggaagtggatgggctgagactcctcgaacagatcgaggtggagattctattggtgaaacaccgactcctggagccagtaaaagaaaatcacggtgggatgaaacaccagctagtcagatgggtggaagcactccagttctgacccctggaaagacaccaattggcacaccagccatgaacatggctacccctactccaggtcacataatgagtatgactcctgaacagcttcaggcttggcggtgggaaagagaaattgatgagagaaatcgcccactttctgatgaggaattagatgctatgttcccagaaggatataaggtacttcctcctccagctggttatgttcctattcgaactccagctcgaaagctgacagctactccaacacctttgggtggtatgactggtttccacatgcaaactgaagatcgaactatgaaaagtgttaatgaccagccatctggaaatcttccatttttaaaacctgatgatattcaatactttgataaactattggttgatgttgatgaatcaacacttagtccagaagagcaaaaagagagaaaaataatgaagttgcttttaaaaattaagaatggaacaccaccaatgagaaaggctgcattgcgtcagattactgataaagctcgtgaatttggagctggtcctttgtttaatcagattcttcctctgctgatgtctcctacacttgaggatcaagagcgtcatttacttgtgaaagttattgataggatactgtacaaacttgatgacttagttcgtccatatgtgcataagatcctcgtggtcattgaaccgctattgattgatgaagattactatgctagagtggaaggccgagagatcatttctaatttggcaaaggctgctggtctggctactatgatctctaccatgagacctgatatagataacatggatgagtatgtccgtaacacaacagctagagcttttgctgttgtagcctctgccctgggcattccttctttattgcccttcttaaaagctgtgtgcaaaagcaagaagtcctggcaagcgagacacactggtattaagattgtacaacagatagctattcttatgggctgtgccatcttgccacatcttagaagtttagttgaaatcattgaacatggtcttgtggatgagcagcagaaagttcggaccatcagtgctttggccattgctgccttggctgaagcagcaactccttatggtatcgaatcttttgattctgtgttaaagcctttatggaagggtatccgccaacacagaggaaagggtttggctgctttcttgaaggctattgggtatcttattcctcttatggatgcagaatatgccaactactatactagagaagtgatgttaatccttattcgagaattccagtctcctgatgaggaaatgaaaaaaattgtgctgaaggtggtaaaacagtgttgtgggacagatggtgtagaagcaaactacattaaaacagagattcttcctcccttttttaaacacttctggcagcacaggatggctttggatagaagaaattaccgacagttagttgatactactgtggagttggcaaacaaagtaggtgcagcagaaattatatccaggattgtggatgatctgaaagatgaagccgaacagtacagaaaaatggtgatggagacaattgagaaaattatgggcaatttgggagcagcagatattgatcataaacttgaagaacaactgattgatggtattctttatgctttccaagaacagactacagaggactcagtaatgttgaacggctttggcacagtggttaatgctcttggcaaacgagtcaaaccatacttgcctcagatctgtggtacagttttgtggcgtttaaataacaaatctgctaaagttaggcaacaggcagctgacttgatttctcgaactgctgttgtcatgaagacttgtcaagaggaaaaattgatgggacacttgggtgttgtattgtatgagtatttgggtgaagagtaccctgaagtattgggcagcattcttggagcactgaaggccattgtaaatgtcataggtatgcataagatgactccaccaattaaagatctgctgcctagactcacccccatcttaaagaacagacatgaaaaagtacaagagaattgtattgatcttgttggtcgtattgctgacaggggagctgaatatgtatctgcaagagagtggatgaggatttgctttgagcttttagagctcttaaaagcccacaaaaaggctattcgtagagccacagtcaacacatttggttatattgcaaaggccattggccctcatgatgtattggctacacttctgaacaacctcaaagttcaagaaaggcagaacagagtttgtaccactgtagcaatagctattgttgcagaaacatgttcaccctttacagtactccctgccttaatgaatgaatacagagttcctgaactgaatgttcaaaatggagtgttaaaatcgctttccttcttgtttgaatatattggtgaaatgggaaaagactacatttatgccgtaacaccgttacttgaagatgctttaatggatagagaccttgtacacagacagacggctagtgcagtggtacagcacatgtcacttggggtttatggatttggttgtgaagattcgctgaatcacttgttgaactatgtatggcccaatgtgtttgagacatctcctcatgtaattcaggcagttatgggagccctagagggcctgagagttgctattggaccatgtagaatgttgcaatattgtttacagggtctgtttcacccagcccggaaagtcagagatgtatattggaaaatttacaactccatctacattggttcccaggacgctctcatagcacattacccaagaatctacaacgatgataagaacacctatattcgttatgaacttgactatatcttataattttattgtttattttgtgtttaatgcacagctacttcacaccttaaacttgctttgatttggtgatgtaaacttttaaacattgcagatcagtgtagaactggtcatagaggaagagctagaaatccagtagcatgatttttaaataacctgtctttgtttttgatgttaaacagtaaatgccagtagtgaccaagaacacagtgattatatacactatactggagggatttcatttttaattcatctttatgaagatttagaactcattccttgtgtttaaagggaatgtttaattgagaaataaacatttgtgtacaaaatgctaaaaaaaccagacgaactgttagcaaaccaagcaacaccactcaacaaatataacccgtctacctcccttgaacatcatgctcacaagaagcccccccatcaaccctcacccacacacgccgtcccaaaccacgacccccccccgagcccggcccacacaccccccccccccgcgccccctccaccccccccccaacgcggcaagaccgcactccagcacaaactagcgaaccagcaaaaccacacccccccggcggcaccacaaacgcgccgaatcgaccgccacagccaacgcccctcagctcccgcacaccccatcgtgcgacagctcacacaccaacccacccccacgtccccacacgatgcgccacgcatacactttagacgatgatcactgaccgcgcacaacgcctccgcacgacccccaccactcatacacacccaccgcgcactaccccccacccacaccatcccaccacagaccccccagcgccaccccacccgcgcacacaccacccccaccccacactaccaccacc

SEQ ID NO: 427428 - DNA, 4652 bp, Homo sapiens
agcggaagttcttgggagcgccagttccgtctgtgtgttcgagtggacaaaatggcgaagatcgccaagactcacgaagatattgaagcacagattcgagaaattcaaggcaagaaggcagctcttgatgaagctcaaggagtgggcctcgattctacaggttattatgaccaggaaatttatggtggaagtgacagcagatttgctggatacgtgacatcaattgctgcaactgaacttgaagatgatgacgatgactattcatcatctacgagtttgcttggtcagaagaagccaggatatcatgcccctgtggcattgcttaatgatataccacagtcaacagaacagtatgatccatttgctgagcacagacctccaaagattgcagaccgggaagatgaatacaaaaagcataggcggaccatgataatttccccagagcgtcttgatccttttgcagatggcttctattctgctgcttgaagtcagaactgctgatggagacaaaggcacgaaagtgtacgtattccggattagcaacccaggaacccatcacttctgaagactctaaactgtgctgtcattttgtttttatatgcattaaaatatttgttttaaactgctgtagatgtttgtgttcaaacaggttaaattgatcagcaaactcaataaaaagtaagatgtataattattaaagttttccatcaaaaaataatttaaatgattatggaataacataatatttagagcagggcagataaatcagttgaacctgcttattttttatttattgtactctttttcctgttgctgttcttttctgcaggagagggaagacccctgatcctaaaatgaatgctaggacttacatggatgtaatgcgagaacaacacttgactaaagaagaacgagaaattaggcaacagctagcagaaaaagctaaagctggagaactaaaagtcgtcaatggagcagcagcgtcccagcctccatcaaaacgaaaacggcgttgggatcaaacagctgatcagactcctggtgccactcccaaaaaactatcaagttgggatcaggcagagacccctgggcatactccttccttaagatgggatgagacaccaggtcgtgcaaagggaagcgagactcctggagcaaccccaggctcaaaaatatgggatcctacacctagccacacaccagcgggagctgctactcctggacgaggtgatacaccaggccatgcgacaccaggccatggaggcgcaacttccagtgctcgtaaaaacagatgggatgaaacccccaaaacagagagagatactcctgggcatggaagtggatgggctgagactcctcgaacagatcgaggtggagattctattggtgaaacaccgactcctggagccagtaaaagaaaatcacggtgggatgaaacaccagctagtcagatgggtggaagcactccagttctgacccctggaaagacaccaattggcacaccagccatgaacatggctacccctactccaggtcacataatgagtatgactcctgaacagcttcaggcttggcggtgggaaagagaaattgatgagagaaatcgcccactttctgatgaggaattagatgctatgttcccagaaggatataaggtacttcctcctccagctggttatgttcctattcgaactccagctcgaaagctgacagctactccaacacctttgggtggtatgactggtttccacatgcaaactgaagatcgaactatgaaaagtgttaatgaccagccatctggaaatcttccatttttaaaacctgatgatattcaatactttgataaactattggttgatgttgatgaatcaacacttagtccagaagagcaaaaagagagaaaaataatgaagttgcttttaaaaattaagaatggaacaccaccaatgagaaaggctgcattgcgtcagattactgataaagctcgtgaatttggagctggtcctttgtttaatcagattcttcctctgctgatgtctcctacacttgaggatcaagagcgtcatttacttgtgaaagttattgataggatactgtacaaacttgatgacttagttcgtccatatgtgcataagatcctcgtggtcattgaaccgctattgattgatgaagattactatgctagagtggaaggccgagagatcatttctaatttggcaaaggctgctggtctggctactatgatctctaccatgagacctgatatagataacatggatgagtatgtccgtaacacaacagctagagcttttgctgttgtagcctctgccctgggcattccttctttattgcccttcttaaaagctgtgtgcaaaagcaagaagtcctggcaagcgagacacactggtattaagattgtacaacagatagctattcttatgggctgtgccatcttgccacatcttagaagtttagttgaaatcattgaacatggtcttgtggatgagcagcagaaagttcggaccatcagtgctttggccattgctgccttggctgaagcagcaactccttatggtatcgaatcttttgattctgtgttaaagcctttatggaagggtatccgccaacacagaggaaagggtttggctgctttcttgaaggctattgggtatcttattcctcttatggatgcagaatatgccaactactatactagagaagtgatgttaatccttattcgagaattccagtctcctgatgaggaaatgaaaaaaattgtgctgaaggtggtaaaacagtgttgtgggacagatggtgtagaagcaaactacattaaaacagagattcttcctcccttttttaaacacttctggcagcacaggatggctttggatagaagaaattaccgacagttagttgatactactgtggagttggcaaacaaagtaggtgcagcagaaattatatccaggattgtggatgatctgaaagatgaagccgaacagtacagaaaaatggtgatggagacaattgagaaaattatgggcaatttgggagcagcagatattgatcataaacttgaagaacaactgattgatggtattctttatgctttccaagaacagactacagaggactcagtaatgttgaacggctttggcacagtggttaatgctcttggcaaacgagtcaaaccatacttgcctcagatctgtggtacagttttgtggcgtttaaataacaaatctgctaaagttaggcaacaggcagctgacttgatttctcgaactgctgttgtcatgaagacttgtcaagaggaaaaattgatgggacacttgggtgttgtattgtatgagtatttgggtgaagagtaccctgaagtattgggcagcattcttggagcactgaaggccattgtaaatgtcataggtatgcataagatgactccaccaattaaagatctgctgcctagactcacccccatcttaaagaacagacatgaaaaagtacaagagaattgtattgatcttgttggtcgtattgctgacaggggagctgaatatgtatctgcaagagagtggatgaggatttgctttgagcttttagagctcttaaaagcccacaaaaaggctattcgtagagccacagtcaacacatttggttatattgcaaaggccattggccctcatgatgtattggctacacttctgaacaacctcaaagttcaagaaaggcagaacagagtttgtaccactgtagcaatagctattgttgcagaaacatgttcaccctttacagtactccctgccttaatgaatgaatacagagttcctgaactgaatgttcaaaatggagtgttaaaatcgctttccttcttgtttgaatatattggtgaaatgggaaaagactacatttatgccgtaacaccgttacttgaagatgctttaatggatagagaccttgtacacagacagacggctagtgcagtggtacagcacatgtcacttggggtttatggatttggttgtgaagattcgctgaatcacttgttgaactatgtatggcccaatgtgtttgagacatctcctcatgtaattcaggcagttatgggagccctagagggcctgagagttgctattggaccatgtagaatgttgcaatattgtttacagggtctgtttcacccagcccggaaagtcagagatgtatattggaaaatttacaactccatctacattggttcccaggacgctctcatagcacattacccaagaatctacaacgatgataagaacacctatattcgttatgaacttgactatatcttataattttattgtttattttgtgtttaatgcacagctacttcacaccttaaacttgctttgatttggtgatgtaaacttttaaacattgcagatcagtgtagaactggtcatagaggaagagctagaaatccagtagcatgatttttaaataacctgtctttgtttttgatgttaaacagtaaatgccagtagtgaccaagaacacagtgattatatacactatactggagggatttcatttttaattcatctttatgaagatttagaactcattccttgtgtttaaagggaatgtttaattgagaaataaacatttgtgtacaa

SEQ ID NO: 427429 - DNA, 3809 bp, Homo sapiens
gaggttgatctagaggatcccgtccactgttcgatacggtgggatgaaacaccagctagtcagatgggtggaagcactccagttctgacccctggaaagacaccaattggcacaccagccatgaacatggctacccctactccaggtcacataatgagtatgactcctgaacagcttcaggcttggcggtgggaaagagaaattgatgagagaaatcgcccactttctgatgaggaattagatgctatgttcccagaaggatataaggtacttcctcctccagctggttatgttcctattcgaactccagctcgaaagctgacagctactccaacacctttgggtggtatgactggtttccacatgcaaactgaagatcgaactatgaaaagtgttaatgaccagccatctggaaatcttccatttttaaaacctgatgatattcaatactttgataaactattggttgatgttgatgaatcaacacttagtccagaagagcaaaaagagagaaaaataatgaagttgcttttaaaaattaagaatggaacaccaccaatgagaaaggctgcattgcgtcagattactgataaagctcgtgaatttggagctggtcctttgtttaatcagattcttcctctgctgatgtctcctacacttgaggatcaagagcgtcatttacttgtgaaagttattgataggatactgtacaaacttgatgacttagttcgtccatatgtgcataagatcctcgtggtcattgaaccgctattgattgatgaagattactatgctagagtggaaggccgagagatcatttctaatttggcaaaggctgctggtctggctactatgatctctaccatgagacctgatatagataacatggatgagtatgtccgtaacacaacagctagagcttttgctgttgtagcctctgccctgggcattccttctttattgcccttcttaaaagctgtgtgcaaaagcaagaagtcctggcaagcgagacacactggtattaagattgtacaacagatagctattcttatgggctgtgccatcttgccacatcttagaagtttagttgaaatcattgaacatggtcttgtggatgagcagcagaaagttcggaccatcagtgctttggccattgctgccttggctgaagcagcaactccttatggtatcgaatcttttgattctgtgttaaagcctttatggaagggtatccgccaacacagaggaaagggtttggctgctttcttgaaggctattgggtatcttattcctcttatggatgcagaatatgccaactactatactagagaagtgatgttaatccttattcgagaattccagtctcctgatgaggaaatgaaaaaaattgtgctgaaggtggtaaaacagtgttgtgggacagatggtgtagaagcaaactacattaaaacagagattcttcctcccttttttaaacacttctggcagcacaggatggctttggatagaagaaattaccgacagttagttgatactactgtggagttggcaaacaaagtaggtgcagcagaaattatatccaggattgtggatgatctgaaagatgaagccgaacagtacagaaaaatggtgatggagacaattgagaaaattatgggcaatttgggagcagcagatattgatcataaacttgaagaacaactgattgatggtattctttatgctttccaagaacagactacagaggactcagtaatgttgaacggctttggcacagtggttaatgctcttggcaaacgagtcaaaccatacttgcctcagatctgtggtacagttttgtggcgtttaaataacaaatctgctaaagttaggcaacaggcagctgacttgatttctcgaactgctgttgtcatgaagacttgtcaagaggaaaaattgatgggacacttgggtgttgtattgtatgagtatttgggtgaagagtaccctgaagtattgggcagcattcttggagcactgaaggccattgtaaatgtcataggtatgcataagatgactccaccaattaaagatctgctgcctagactcacccccatcttaaagaacagacatgaaaaagtacaagagaattgtattgatcttgttggtcgtattgctgacaggggagctgaatatgtatctgcaagagagtggatgaggatttgctttgagcttttagagctcttaaaagcccacaaaaaggctattcgtagagccacagtcaacacatttggttatattgcaaaggccattggccctcatgatgtattggctacacttctgaacaacctcaaagttcaagaaaggcagaacagagtttgtaccactgtagcaatagctattgttgcagaaacatgttcaccctttacagtactccctgccttaatgaatgaatacagagttcctgaactgaatgttcaaaatggagtgttaaaatcgctttccttcttgtttgaatatattggtgaaatgggaaaagactacatttatgccgtaacaccgttacttgaagatgctttaatggatagagaccttgtacacagacagacggctagtgcagtggtacagcacatgtcacttggggtttatggatttggttgtgaagattcgctgaatcacttgttgaactatgtatggcccaatgtgtttgagacatctcctcatgtaattcaggcagttatgggagccctagagggcctgagagttgctattggaccatgtagaatgttgcaatattgtttacagggtctgtttcacccagcccggaaagtcagagatgtatattggaaaatttacaactccatctacattggttcccaggacgctctcatagcacattacccaagaatctacaacgatgataagaacacctatattcgttatgaacttgactatatcttataattttattgtttattttgtgtttaatgcacagctacttcacaccttaaacttgctttgatttggtgatgtaaacttttaaacattgcagatcagtgtagaactggtcatagaggaagagctagaaatccagtagcatgatttttaaataacctgtctttgtttttgatgttaaacagtaaatgccagtagtgaccaagaacacagtgattatatacactatactggagggatttcatttttaattcatctttatgaagatttagaactcattccttgtgtttaaagggaatgtttaattgagaaataaacatttgtgtacaaaatgctaaaaaaaccagacgaactgttagcaaaccaagcaacaccactcaacaaatataacccgtctacctcccttgaacatcatgctcacaagaagcccccccatcaaccctcacccacacacgccgtcccaaaccacgacccccccccgagcccggcccacacaccccccccccccgcgccccctccaccccccccccaacgcggcaagaccgcactccagcacaaactagcgaaccagcaaaaccacacccccccggcggcaccacaaacgcgccgaatcgaccgccacagccaacgcccctcagctcccgcacaccccatcgtgcgacagctcacacaccaacccacccccacgtccccacacgatgcgccacgcatacactttagacgatgatcactgaccgcgcacaacgcctccgcacgacccccaccactcatacacacccaccgcgcactaccccccacccacaccatcccaccacagaccccccagcgccaccccacccgcgcacacaccacccccaccccacactaccaccacc

SEQ ID NO: 427430 - DNA, 2845 bp, Homo sapiens
tcagtcggtaccgatgtttcgctcaaacgtggtgaagcaagtttgagcctccctcttgtgggcggttccttggctgggatgatgattactggtctgtggaccccttggacagggccatggctgagctggctgcctgaggaggggcagggcccacccatgtcaccggtcagtgccttttggaactgtccttccctcaaagaggccttagagcgagcagagcagctctgctatgagtgtggggagtgttagaggatccccgtgatgttatcgcccaacacagaggaaagggtttggctgctttcttgaaggctattgggtatcttattcctcttatggatgcagaatatgccaactactatactagagaagtgatgttaatccttattcgagaattccagtctcctgatgaggaaatgaaaaaaattgtgctgaaggtggtaaaacagtgttgtgggacagatggtgtagaagcaaactacattaaaacagagattcttcctcccttttttaaacacttctggcagcacaggatggctttggatagaagaaattaccgacagttagttgatactactgtggagttggcaaacaaagtaggtgcagcagaaattatatccaggattgtggatgatctgaaagatgaagccgaacagtacagaaaaatggtgatggagacaattgagaaaattatgggcaatttgggagcagcagatattgatcataaacttgaagaacaactgattgatggtattctttatgctttccaagaacagactacagaggactcagtaatgttgaacggctttggcacagtggttaatgctcttggcaaacgagtcaaaccatacttgcctcagatctgtggtacagttttgtggcgtttaaataacaaatctgctaaagttaggcaacaggcagctgacttgatttctcgaactgctgttgtcatgaagacttgtcaagaggaaaaattgatgggacacttgggtgttgtattgtatgagtatttgggtgaagagtaccctgaagtattgggcagcattcttggagcactgaaggccattgtaaatgtcataggtatgcataagatgactccaccaattaaagatctgctgcctagactcacccccatcttaaagaacagacatgaaaaagtacaagagaattgtattgatcttgttggtcgtattgctgacaggggagctgaatatgtatctgcaagagagtggatgaggatttgctttgagcttttagagctcttaaaagcccacaaaaaggctattcgtagagccacagtcaacacatttggttatattgcaaaggccattggccctcatgatgtattggctacacttctgaacaacctcaaagttcaagaaaggcagaacagagtttgtaccactgtagcaatagctattgttgcagaaacatgttcaccctttacagtactccctgccttaatgaatgaatacagagttcctgaactgaatgttcaaaatggagtgttaaaatcgctttccttcttgtttgaatatattggtgaaatgggaaaagactacatttatgccgtaacaccgttacttgaagatgctttaatggatagagaccttgtacacagacagacggctagtgcagtggtacagcacatgtcacttggggtttatggatttggttgtgaagattcgctgaatcacttgttgaactatgtatggcccaatgtgtttgagacatctcctcatgtaattcaggcagttatgggagccctagagggcctgagagttgctattggaccatgtagaatgttgcaatattgtttacagggtctgtttcacccagcccggaaagtcagagatgtatattggaaaatttacaactccatctacattggttcccaggacgctctcatagcacattacccaagaatctacaacgatgataagaacacctatattcgttatgaacttgactatatcttataattttattgtttattttgtgtttaatgcacagctacttcacaccttaaacttgctttgatttggtgatgtaaacttttaaacattgcagatcagtgtagaactggtcatagaggaagagctagaaatccagtagcatgatttttaaataacctgtctttgtttttgatgttaaacagtaaatgccagtagtgaccaagaacacagtgattatatacactatactggagggatttcatttttaattcatctttatgaagatttagaactcattccttgtgtttaaagggaatgtttaattgagaaataaacatttgtgtacaaaatgctaaaaaaaccagacgaactgttagcaaaccaagcaacaccactcaacaaatataacccgtctacctcccttgaacatcatgctcacaagaagcccccccatcaaccctcacccacacacgccgtcccaaaccacgacccccccccgagcccggcccacacaccccccccccccgcgccccctccaccccccccccaacgcggcaagaccgcactccagcacaaactagcgaaccagcaaaaccacacccccccggcggcaccacaaacgcgccgaatcgaccgccacagccaacgcccctcagctcccgcacaccccatcgtgcgacagctcacacaccaacccacccccacgtccccacacgatgcgccacgcatacactttagacgatgatcactgaccgcgcacaacgcctccgcacgacccccaccactcatacacacccaccgcgcactaccccccacccacaccatcccaccacagaccccccagcgccaccccacccgcgcacacaccacccccaccccacactaccaccacc

SEQ ID NO: 427431 - DNA, 2840 bp, Homo sapiens
tgtagatccccatgttatccccaacaccaggttcagctgcctgtgaagtcatttgtttcgtgttcatttcctagttactggtatttttttaatcattaaaaatgtttttaaattattgatagtaattgtacgtatttgtagggtgcatgtgtgcagtgggtgatgatcagatcggggtgcatgtgtgcagtgggtgatgatcagattggggttaatggcagagccacctcacagttactgttttgtgttgggcgataacattatccccaacacagaggaaagggtttggctgctttcttgaaggctattgggtatcttattcctcttatggatgcagaatatgccaactactatactagagaagtgatgttaatccttattcgagaattccagtctcctgatgaggaaatgaaaaaaattgtgctgaaggtggtaaaacagtgttgtgggacagatggtgtagaagcaaactacattaaaacagagattcttcctcccttttttaaacacttctggcagcacaggatggctttggatagaagaaattaccgacagttagttgatactactgtggagttggcaaacaaagtaggtgcagcagaaattatatccaggattgtggatgatctgaaagatgaagccgaacagtacagaaaaatggtgatggagacaattgagaaaattatgggcaatttgggagcagcagatattgatcataaacttgaagaacaactgattgatggtattctttatgctttccaagaacagactacagaggactcagtaatgttgaacggctttggcacagtggttaatgctcttggcaaacgagtcaaaccatacttgcctcagatctgtggtacagttttgtggcgtttaaataacaaatctgctaaagttaggcaacaggcagctgacttgatttctcgaactgctgttgtcatgaagacttgtcaagaggaaaaattgatgggacacttgggtgttgtattgtatgagtatttgggtgaagagtaccctgaagtattgggcagcattcttggagcactgaaggccattgtaaatgtcataggtatgcataagatgactccaccaattaaagatctgctgcctagactcacccccatcttaaagaacagacatgaaaaagtacaagagaattgtattgatcttgttggtcgtattgctgacaggggagctgaatatgtatctgcaagagagtggatgaggatttgctttgagcttttagagctcttaaaagcccacaaaaaggctattcgtagagccacagtcaacacatttggttatattgcaaaggccattggccctcatgatgtattggctacacttctgaacaacctcaaagttcaagaaaggcagaacagagtttgtaccactgtagcaatagctattgttgcagaaacatgttcaccctttacagtactccctgccttaatgaatgaatacagagttcctgaactgaatgttcaaaatggagtgttaaaatcgctttccttcttgtttgaatatattggtgaaatgggaaaagactacatttatgccgtaacaccgttacttgaagatgctttaatggatagagaccttgtacacagacagacggctagtgcagtggtacagcacatgtcacttggggtttatggatttggttgtgaagattcgctgaatcacttgttgaactatgtatggcccaatgtgtttgagacatctcctcatgtaattcaggcagttatgggagccctagagggcctgagagttgctattggaccatgtagaatgttgcaatattgtttacagggtctgtttcacccagcccggaaagtcagagatgtatattggaaaatttacaactccatctacattggttcccaggacgctctcatagcacattacccaagaatctacaacgatgataagaacacctatattcgttatgaacttgactatatcttataattttattgtttattttgtgtttaatgcacagctacttcacaccttaaacttgctttgatttggtgatgtaaacttttaaacattgcagatcagtgtagaactggtcatagaggaagagctagaaatccagtagcatgatttttaaataacctgtctttgtttttgatgttaaacagtaaatgccagtagtgaccaagaacacagtgattatatacactatactggagggatttcatttttaattcatctttatgaagatttagaactcattccttgtgtttaaagggaatgtttaattgagaaataaacatttgtgtacaaaatgctaaaaaaaccagacgaactgttagcaaaccaagcaacaccactcaacaaatataacccgtctacctcccttgaacatcatgctcacaagaagcccccccatcaaccctcacccacacacgccgtcccaaaccacgacccccccccgagcccggcccacacaccccccccccccgcgccccctccaccccccccccaacgcggcaagaccgcactccagcacaaactagcgaaccagcaaaaccacacccccccggcggcaccacaaacgcgccgaatcgaccgccacagccaacgcccctcagctcccgcacaccccatcgtgcgacagctcacacaccaacccacccccacgtccccacacgatgcgccacgcatacactttagacgatgatcactgaccgcgcacaacgcctccgcacgacccccaccactcatacacacccaccgcgcactaccccccacccacaccatcccaccacagaccccccagcgccaccccacccgcgcacacaccacccccaccccacactaccaccacc

SEQ ID NO: 427432 - DNA, 1802 bp, Homo sapiens
gagactggagatctgtttgttttgcagttaaagggtatgcataagatgactccaccaattaaagatctgctgcctagactcacccccatcttaaagaacagacatgaaaaagtacaagagaattgtattgatcttgttggtcgtattgctgacaggggagctgaatatgtatctgcaagagagtggatgaggatttgctttgagcttttagagctcttaaaagcccacaaaaaggctattcgtagagccacagtcaacacatttggttatattgcaaaggccattggccctcatgatgtattggctacacttctgaacaacctcaaagttcaagaaaggcagaacagagtttgtaccactgtagcaatagctattgttgcagaaacatgttcaccctttacagtactccctgccttaatgaatgaatacagagttcctgaactgaatgttcaaaatggagtgttaaaatcgctttccttcttgtttgaatatattggtgaaatgggaaaagactacatttatgccgtaacaccgttacttgaagatgctttaatggatagagaccttgtacacagacagacggctagtgcagtggtacagcacatgtcacttggggtttatggatttggttgtgaagattcgctgaatcacttgttgaactatgtatggcccaatgtgtttgagacatctcctcatgtaattcaggcagttatgggagccctagagggcctgagagttgctattggaccatgtagaatgttgcaatattgtttacagggtctgtttcacccagcccggaaagtcagagatgtatattggaaaatttacaactccatctacattggttcccaggacgctctcatagcacattacccaagaatctacaacgatgataagaacacctatattcgttatgaacttgactatatcttataattttattgtttattttgtgtttaatgcacagctacttcacaccttaaacttgctttgatttggtgatgtaaacttttaaacattgcagatcagtgtagaactggtcatagaggaagagctagaaatccagtagcatgatttttaaataacctgtctttgtttttgatgttaaacagtaaatgccagtagtgaccaagaacacagtgattatatacactatactggagggatttcatttttaattcatctttatgaagatttagaactcattccttgtgtttaaagggaatgtttaattgagaaataaacatttgtgtacaaaatgctaaaaaaaccagacgaactgttagcaaaccaagcaacaccactcaacaaatataacccgtctacctcccttgaacatcatgctcacaagaagcccccccatcaaccctcacccacacacgccgtcccaaaccacgacccccccccgagcccggcccacacaccccccccccccgcgccccctccaccccccccccaacgcggcaagaccgcactccagcacaaactagcgaaccagcaaaaccacacccccccggcggcaccacaaacgcgccgaatcgaccgccacagccaacgcccctcagctcccgcacaccccatcgtgcgacagctcacacaccaacccacccccacgtccccacacgatgcgccacgcatacactttagacgatgatcactgaccgcgcacaacgcctccgcacgacccccaccactcatacacacccaccgcgcactaccccccacccacaccatcccaccacagaccccccagcgccaccccacccgcgcacacaccacccccaccccacactaccaccacc

SEQ ID NO: 427433 - DNA, 5143 bp, Homo sapiens
agcggaagttcttgggagcgccagttccgtctgtgtgttcgagtggacaaaatggcgaagatcgccaagactcacgaagatattgaagcacagattcgagaaattcaaggcaagaaggcagctcttgatgaagctcaaggagtgggcctcgattctacaggttattatgaccaggaaatttatggtggaagtgacagcagatttgctggatacgtgacatcaattgctgcaactgaacttgaagatgatgacgatgactattcatcatctacgagtttgcttggtcagaagaagccaggatatcatgcccctgtggcattgcttaatgatataccacagtcaacagaacagtatgatccatttgctgagcacagacctccaaagattgcagaccgggaagatgaatacaaaaagcataggcggaccatgataatttccccagagcgtcttgatccttttgcagatggcttctattctgctgcttgaagtcagaactgctgatggagacaaaggcacgaaagtgtacgtattccggattagcaacccaggaacccatcacttctgaagactctaaactgtgctgtcattttgtttttatatgcattaaaatatttgttttaaactgctgtagatgtttgtgttcaaacaggttaaattgatcagcaaactcaataaaaagtaagatgtataattattaaagttttccatcaaaaaataatttaaatgattatggaataacataatatttagagcagggcagataaatcagttgaacctgcttattttttatttattgtactctttttcctgttgctgttcttttctgcaggagagggaagacccctgatcctaaaatgaatgctaggacttacatggatgtaatgcgagaacaacacttgactaaagaagaacgagaaattaggcaacagctagcagaaaaagctaaagctggagaactaaaagtcgtcaatggagcagcagcgtcccagcctccatcaaaacgaaaacggcgttgggatcaaacagctgatcagactcctggtgccactcccaaaaaactatcaagttgggatcaggcagagacccctgggcatactccttccttaagatgggatgagacaccaggtcgtgcaaagggaagcgagactcctggagcaaccccaggctcaaaaatatgggatcctacacctagccacacaccagcgggagctgctactcctggacgaggtgatacaccaggccatgcgacaccaggccatggaggcgcaacttccagtgctcgtaaaaacagatgggatgaaacccccaaaacagagagagatactcctgggcatggaagtggatgggctgagactcctcgaacagatcgaggtggagattctattggtgaaacaccgactcctggagccagtaaaagaaaatcacggtgggatgaaacaccagctagtcagatgggtggaagcactccagttctgacccctggaaagacaccaattggcacaccagccatgaacatggctacccctactccaggtcacataatgagtatgactcctgaacagcttcaggcttggcggtgggaaagagaaattgatgagagaaatcgcccactttctgatgaggaattagatgctatgttcccagaaggatataaggtacttcctcctccagctggttatgttcctattcgaactccagctcgaaagctgacagctactccaacacctttgggtggtatgactggtttccacatgcaaactgaagatcgaactatgaaaagtgttaatgaccagccatctggaaatcttccatttttaaaacctgatgatattcaatactttgataaactattggttgatgttgatgaatcaacacttagtccagaagagcaaaaagagagaaaaataatgaagttgcttttaaaaattaagaatggaacaccaccaatgagaaaggctgcattgcgtcagattactgataaagctcgtgaatttggagctggtcctttgtttaatcagattcttcctctgctgatgtctcctacacttgaggatcaagagcgtcatttacttgtgaaagttattgataggatactgtacaaacttgatgacttagttcgtccatatgtgcataagatcctcgtggtcattgaaccgctattgattgatgaagattactatgctagagtggaaggccgagagatcatttctaatttggcaaaggctgctggtctggctactatgatctctaccatgagacctgatatagataacatggatgagtatgtccgtaacacaacagctagagcttttgctgttgtagcctctgccctgggcattccttctttattgcccttcttaaaagctgtgtgcaaaagcaagaagtcctggcaagcgagacacactggtattaagattgtacaacagatagctattcttatgggctgtgccatcttgccacatcttagaagtttagttgaaatcattgaacatggtcttgtggatgagcagcagaaagttcggaccatcagtgctttggccattgctgccttggctgaagcagcaactccttatggtatcgaatcttttgattctgtgttaaagcctttatggaagggtatccgccaacacagaggaaagggtttggctgctttcttgaaggctattgggtatcttattcctcttatggatgcagaatatgccaactactatactagagaagtgatgttaatccttattcgagaattccagtctcctgatgaggaaatgaaaaaaattgtgctgaaggtggtaaaacagtgttgtgggacagatggtgtagaagcaaactacattaaaacagagattcttcctcccttttttaaacacttctggcagcacaggatggctttggatagaagaaattaccgacagttagttgatactactgtggagttggcaaacaaagtaggtgcagcagaaattatatccaggattgtggatgatctgaaagatgaagccgaacagtacagaaaaatggtgatggagacaattgagaaaattatgggcaatttgggagcagcagatattgatcataaacttgaagaacaactgattgatggtattctttatgctttccaagaacagactacagaggactcagtaatgttgaacggctttggcacagtggttaatgctcttggcaaacgagtcaaaccatacttgcctcagatctgtggtacagttttgtggcgtttaaataacaaatctgctaaagttaggcaacaggcagctgacttgatttctcgaactgctgttgtcatgaagacttgtcaagaggaaaaattgatgggacacttgggtgttgtattgtatgagtatttgggtgaagagtaccctgaagtattgggcagcattcttggagcactgaaggccattgtaaatgtcataggtatgcataagatgactccaccaattaaagatctgctgcctagactcacccccatcttaaagaacagacatgaaaaagtacaagagaattgtattgatcttgttggtcgtattgctgacaggggagctgaatatgtatctgcaagagagtggatgaggatttgctttgagcttttagagctcttaaaagcccacaaaaaggctattcgtagagccacagtcaacacatttggttatattgcaaaggccattggccctcatgatgtattggctacacttctgaacaacctcaaagttcaagaaaggcagaacagagtttgtaccactgtagcaatagctattgttgcagaaacatgttcaccctttacagtactccctgccttaatgaatgaatacagagttcctgaactgaatgttcaaaatggagtgttaaaatcgctttccttcttgtttgaatatattggtgaaatgggaaaagactacatttatgccgtaacaccgttacttgaagatgctttaatggatagagaccttgtacacagacagacggctagtgcagtggtacagcacatgtcacttggggtttatggatttggttgtgaagattcgctgaatcacttgttgaactatgtatggcccaatgtgtttgagacatctcctcatgtaattcaggcagttatgggagccctagagggcctgagagttgctattggaccatgtagaatgttgcaatattgtttacagggtctgtttcacccagcccggaaagtcagagatgtatattggccaagaatctacaacgatgataagaacacctatattcgttatgaacttgactatatcttataattttattgtttattttgtgtttaatgcacagctacttcacaccttaaacttgctttgatttggtgatgtaaacttttaaacattgcagatcagtgtagaactggtcatagaggaagagctagaaatccagtagcatgatttttaaataacctgtctttgtttttgatgttaaacagtaaatgccagtagtgaccaagaacacagtgattatatacactatactggagggatttcatttttaattcatctttatgaagatttagaactcattccttgtgtttaaagggaatgtttaattgagaaataaacatttgtgtacaaaatgctaaaaaaaccagacgaactgttagcaaaccaagcaacaccactcaacaaatataacccgtctacctcccttgaacatcatgctcacaagaagcccccccatcaaccctcacccacacacgccgtcccaaaccacgacccccccccgagcccggcccacacaccccccccccccgcgccccctccaccccccccccaacgcggcaagaccgcactccagcacaaactagcgaaccagcaaaaccacacccccccggcggcaccacaaacgcgccgaatcgaccgccacagccaacgcccctcagctcccgcacaccccatcgtgcgacagctcacacaccaacccacccccacgtccccacacgatgcgccacgcatacactttagacgatgatcactgaccgcgcacaacgcctccgcacgacccccaccactcatacacacccaccgcgcactaccccccacccacaccatcccaccacagaccccccagcgccaccccacccgcgcacacaccacccccaccccacactaccaccacc

SEQ ID NO: 427434 - DNA, 1701 bp, Homo sapiens
attgatcataaacttgaagaacaactgattgatcttgtggtcgtatgctgacaggggagctgaatatgtatctgcaagagagtggatgaggatttgctttgagcttttagagctcttaaaagcccacaaaaaggctattcgtagagccacagtcaacacatttggttatattgcaaaggccattggccctcatgatgtattggctacacttctgaacaacctcaaagttcaagaaaggcagaacagagtttgtaccactgtagcaatagctattgttgcagaaacatgttcaccctttacagtactccctgccttaatgaatgaatacagagttcctgaactgaatgttcaaaatggagtgttaaaatcgctttccttcttgtttgaatatattggtgaaatgggaaaagactacatttatgccgtaacaccgttacttgaagatgctttaatggatagagaccttgtacacagacagacggctagtgcagtggtacagcacatgtcacttggggtttatggatttggttgtgaagattcgctgaatcacttgttgaactatgtatggcccaatgtgtttgagacatctcctcatgtaattcaggcagttatgggagccctagagggcctgagagttgctattggaccatgtagaatgttgcaatattgtttacagggtctgtttcacccagcccggaaagtcagagatgtatattggaaaatttacaactccatctacattggttcccaggacgctctcatagcacattacccaagaatctacaacgatgataagaacacctatattcgttatgaacttgactatatcttataattttattgtttattttgtgtttaatgcacagctacttcacaccttaaacttgctttgatttggtgatgtaaacttttaaacattgcagatcagtgtagaactggtcatagaggaagagctagaaatccagtagcatgatttttaaataacctgtctttgtttttgatgttaaacagtaaatgccagtagtgaccaagaacacagtgattatatacactatactggagggatttcatttttaattcatctttatgaagatttagaactcattccttgtgtttaaagggaatgtttaattgagaaataaacatttgtgtacaaaatgctaaaaaaaccagacgaactgttagcaaaccaagcaacaccactcaacaaatataacccgtctacctcccttgaacatcatgctcacaagaagcccccccatcaaccctcacccacacacgccgtcccaaaccacgacccccccccgagcccggcccacacaccccccccccccgcgccccctccaccccccccccaacgcggcaagaccgcactccagcacaaactagcgaaccagcaaaaccacacccccccggcggcaccacaaacgcgccgaatcgaccgccacagccaacgcccctcagctcccgcacaccccatcgtgcgacagctcacacaccaacccacccccacgtccccacacgatgcgccacgcatacactttagacgatgatcactgaccgcgcacaacgcctccgcacgacccccaccactcatacacacccaccgcgcactaccccccacccacaccatcccaccacagaccccccagcgccaccccacccgcgcacacaccacccccaccccacactaccaccacc

SEQ ID NO: 427435 - DNA, 4343 bp, Homo sapiens
agcggaagttcttgggagcgccagttccgtctgtgtgttcgagtggacaaaatggcgaagatcgccaagactcacgaagatattgaagcacagattcgagaaattcaaggcaagaaggcagctcttgatgaagctcaaggagtgggcctcgattctacaggttattatgaccaggaaatttatggtggaagtgacagcagatttgctggatacgtgacatcaattgctgcaactgaacttgaagatgatgacgatgactattcatcatctacgagtttgcttggtcagaagaagccaggatatcatgcccctgtggcattgcttaatgatataccacagtcaacagaacagtatgatccatttgctgagcacagacctccaaagattgcagaccgggaagatgaatacaaaaagcataggcggaccatgataatttccccagagcgtcttgatccttttgcagatggcttctattctgctgcttgaagtcagaactgctgatggagacaaaggcacgaaagtgtacgtattccggattagcaacccaggaacccatcacttctgaagactctaaactgtgctgtcattttgtttttatatgcattaaaatatttgttttaaactgctgtagatgtttgtgttcaaacaggttaaattgatcagcaaactcaataaaaagtaagatgtataattattaaagttttccatcaaaaaataatttaaatgattatggaataacataatatttagagcagggcagataaatcagttgaacctgcttattttttatttattgtactctttttcctgttgctgttcttttctgcaggagagggaagacccctgatcctaaaatgaatgctaggacttacatggatgtaatgcgagaacaacacttgactaaagaagaacgagaaattaggcaacagctagcagaaaaagctaaagctggagaactaaaagtcgtcaatggagcagcagcgtcccagcctccatcaaaacgaaaacggcgttgggatcaaacagctgatcagactcctggtgccactcccaaaaaactatcaagttgggatcaggcagagacccctgggcatactccttccttaagatgggatgagacaccaggtcgtgcaaagggaagcgagactcctggagcaaccccaggctcaaaaatatgggatcctacacctagccacacaccagcgggagctgctactcctggacgaggtgatacaccaggccatgcgacaccaggccatggaggcgcaacttccagtgctcgtaaaaacagatgggatgaaacccccaaaacagagagagatactcctgggcatggaagtggatgggctgagactcctcgaacagatcgaggtggagattctattggtgaaacaccgactcctggagccagtaaaagaaaatcacggtgggatgaaacaccagctagtcagatgggtggaagcactccagttctgacccctggaaagacaccaattggcacaccagccatgaacatggctacccctactccaggtcacataatgagtatgactcctgaacagcttcaggcttggcggtgggaaagagaaattgatgagagaaatcgcccactttctgatgaggaattagatgctatgttcccagaaggatataaggtacttcctcctccagctggttatgttcctattcgaactccagctcgaaagctgacagctactccaacacctttgggtggtatgactggtttccacatgcaaactgaagatcgaactatgaaaagtgttaatgaccagccatctggaaatcttccatttttaaaacctgatgatattcaatactttgataaactattggttgatgttgatgaatcaacacttagtccagaagagcaaaaagagagaaaaataatgaagttgcttttaaaaattaagaatggaacaccaccaatgagaaaggctgcattgcgtcagattactgataaagctcgtgaatttggagctggtcctttgtttaatcagattcttcctctgctgatgtctcctacacttgaggatcaagagcgtcatttacttgtgaaagttattgataggatactgtacaaacttgatgacttagttcgtccatatgtgcataagatcctcgtggtcattgaaccgctattgattgatgaagattactatgctagagtggaaggccgagagatcatttctaatttggcaaaggctgctggtctggctactatgatctctaccatgagacctgatatagataacatggatgagtatgtccgtaacacaacagctagagcttttgctgttgtagcctctgccctgggcattccttctttattgcccttcttaaaagctgtgtgcaaaagcaagaagtcctggcaagcgagacacactggtattaagattgtacaacagatagctattcttatgggctgtgccatcttgccacatcttagaagtttagttgaaatcattgaacatggtcttgtggatgagcagcagaaagttcggaccatcagtgctttggccattgctgccttggctgaagcagcaactccttatggtatcgaatcttttgattctgtgttaaagcctttatggaagggtatccgccaacacagaggaaagggtttggctgctttcttgaaggctattgggtatcttattcctcttatggatgcagaatatgccaactactatactagagaagtgatgttaatccttattcgagaattccagtctcctgatgaggaaatgaaaaaaattgtgctgaaggtggtaaaacagtgttgtgggacagatggtgtagaagcaaactacattaaaacagagattcttcctcccttttttaaacacttctggcagcacaggatggctttggatagaagaaattaccgacagttagttgatactactgtggagttggcaaacaaagtaggtgcagcagaaattatatccaggattgtggatgatctgaaagatgaagccgaacagtacagaaaaatggtgatggagacaattgagaaaattatgggcaatttgggagcagcagatattgatcataaacttgaagaacaactgattgatggtattctttatgctttccaagaacagactacagaggactcagtaatgttgaacggctttggcacagtggttaatgctcttggcaaacgagtcaaaccatacttgcctcagatctgtggtacagttttgtggcgtttaaataacaaatctgctaaagttaggcaacaggcagctgacttgatttctcgaactgctgttgtcatgaagacttgtcaagaggaaaaattgatgggacacttgggtgttgtattgtatgagtatttgggtgaagagtaccctgaagtattgggcagcattcttggagcactgaaggccattgtaaatgtcataggtatgcataagatgactccaccaattaaagatctgctgcctagactcacccccatcttaaagaacagacatgaaaaagtacaagagaattgtattgatcttgttggtcgtattgctgacaggggagctgaatatgtatctgcaagagagtggatgaggatttgctttgagcttttagagctcttaaaagcccacaaaaaggctattcgtagagccacagtcaacacatttggttatattgcaaaggccattggccctcatgatgtattggctacacttctgaacaacctcaaagttcaagaaaggcagaacagagtttgtaccactgtagcaatagctattgttgcagaaacatgttcaccctttacagtactccctgccttaatgaatgaatacagagttcctgaactgaatgttcaaaatggagtgttaaaatcgctttccttcttgtttgaatatattggtgaaatgggaaaagactacatttatgccgtaacaccgttacttgaaaatgctaatttgtgtgtgttttttgaacatgacttgtaaaatgcggaactttgataaagtattggtttatgtggaataagtggcttaatttcattttctgtcacatggtttatagaaagtagttagctgaataaaaactatataaagtgatggcatctttgtcaaaattccattgttgtgttaataatgacagcaagaagagtagcctcaggggatgttcccctcaaactagcacaaccattccatcatcgtagaaaagtagcacttttgctaaactgtcttgaatattttgtacttacatagcgcctttcatctcttgatttctcaaaatgctttatgaacacatttaaagaaagtggtttaagtcttgtccaacacttgacaggtctgctgtgtttagcaagt

SEQ ID NO: 427436 - DNA, 3247 bp, Homo sapiens
  misc_feature (3247)..(3247): n is a, c, g, or t
agcggaagttcttgggagcgccagttccgtctgtgtgttcgagtggacaaaatggcgaagatcgccaagactcacgaagatattgaagcacagattcgagaaattcaaggcaagaaggcagctcttgatgaagctcaaggagtgggcctcgattctacaggttattatgaccaggaaatttatggtggaagtgacagcagatttgctggatacgtgacatcaattgctgcaactgaacttgaagatgatgacgatgactattcatcatctacgagtttgcttggtcagaagaagccaggatatcatgcccctgtggcattgcttaatgatataccacagtcaacagaacagtatgatccatttgctgagcacagacctccaaagattgcagaccgggaagatgaatacaaaaagcataggcggaccatgataatttccccagagcgtcttgatccttttgcagatggcttctattctgctgcttgaagtcagaactgctgatggagacaaaggcacgaaagtgtacgtattccggattagcaacccaggaacccatcacttctgaagactctaaactgtgctgtcattttgtttttatatgcattaaaatatttgttttaaactgctgtagatgtttgtgttcaaacaggttaaattgatcagcaaactcaataaaaagtaagatgtataattattaaagttttccatcaaaaaataatttaaatgattatggaataacataatatttagagcagggcagataaatcagttgaacctgcttattttttatttattgtactctttttcctgttgctgttcttttctgcaggagagggaagacccctgatcctaaaatgaatgctaggacttacatggatgtaatgcgagaacaacacttgactaaagaagaacgagaaattaggcaacagctagcagaaaaagctaaagctggagaactaaaagtcgtcaatggagcagcagcgtcccagcctccatcaaaacgaaaacggcgttgggatcaaacagctgatcagactcctggtgccactcccaaaaaactatcaagttgggatcaggcagagacccctgggcatactccttccttaagatgggatgagacaccaggtcgtgcaaagggaagcgagactcctggagcaaccccaggctcaaaaatatgggatcctacacctagccacacaccagcgggagctgctactcctggacgaggtgatacaccaggccatgcgacaccaggccatggaggcgcaacttccagtgctcgtaaaaacagatgggatgaaacccccaaaacagagagagatactcctgggcatggaagtggatgggctgagactcctcgaacagatcgaggtggagattctattggtgaaacaccgactcctggagccagtaaaagaaaatcacggtgggatgaaacaccagctagtcagatgggtggaagcactccagttctgacccctggaaagacaccaattggcacaccagccatgaacatggctacccctactccaggtcacataatgagtatgactcctgaacagcttcaggcttggcggtgggaaagagaaattgatgagagaaatcgcccactttctgatgaggaattagatgctatgttcccagaaggatataaggtacttcctcctccagctggttatgttcctattcgaactccagctcgaaagctgacagctactccaacacctttgggtggtatgactggtttccacatgcaaactgaagatcgaactatgaaaagtgttaatgaccagccatctggaaatcttccatttttaaaacctgatgatattcaatactttgataaactattggttgatgttgatgaatcaacacttagtccagaagagcaaaaagagagaaaaataatgaagttgcttttaaaaattaagaatggaacaccaccaatgagaaaggctgcattgcgtcagattactgataaagctcgtgaatttggagctggtcctttgtttaatcagattcttcctctgctgatgtctcctacacttgaggatcaagagcgtcatttacttgtgaaagttattgataggatactgtacaaacttgatgacttagttcgtccatatgtgcataagatcctcgtggtcattgaaccgctattgattgatgaagattactatgctagagtggaaggccgagagatcatttctaatttggcaaaggctgctggtctggctactatgatctctaccatgagacctgatatagataacatggatgagtatgtccgtaacacaacagctagagcttttgctgttgtagcctctgccctgggcattccttctttattgcccttcttaaaagctgtgtgcaaaagcaagaagtcctggcaagcgagacacactggtattaagattgtacaacagatagctattcttatgggctgtgccatcttgccacatcttagaagtttagttgaaatcattgaacatggtcttgtggatgagcagcagaaagttcggaccatcagtgctttggccattgctgccttggctgaagcagcaactccttatggtatcgaatcttttgattctgtgttaaagcctttatggaagggtatccgccaacacagaggaaagggtttggctgctttcttgaaggctattgggtatcttattcctcttatggatgcagaatatgccaactactatactagagaagtgatgttaatccttattcgagaattccagtctcctgatgaggaaatgaaaaaaattgtgctgaaggtggtaaaacagtgttgtgggacagatggtgtagaagcaaactacattaaaacagagattcttcctcccttttttaaacacttctggcagcacaggatggctttggatagaagaaattaccgacagttagttgatactactgtggagttggcaaacaaagtaggtgcagcagaaattatatccaggattgtggatgatctgaaagatgaagccgaacagtacagaaaaatggtgatgggcgataaatcacgtgatgttatcgcccaacaccaagaacaagcgatgtttgcttttaactgagggcaaagtaacttgcccactcgtgcagagagagccaggggtgggaccctaggccggtctggctctaaagctggtaccttccttgttgtggccgttagtcataaatgtgaacaggtgagaacagctaaccgcaatcttggtcatactgtgttggggagtan

SEQ ID NO: 427437 - DNA, 3014 bp, Homo sapiens
agcggaagttcttgggagcgccagttccgtctgtgtgttcgagtggacaaaatggcgaagatcgccaagactcacgaagatattgaagcacagattcgagaaattcaaggcaagaaggcagctcttgatgaagctcaaggagtgggcctcgattctacaggttattatgaccaggaaatttatggtggaagtgacagcagatttgctggatacgtgacatcaattgctgcaactgaacttgaagatgatgacgatgactattcatcatctacgagtttgcttggtcagaagaagccaggatatcatgcccctgtggcattgcttaatgatataccacagtcaacagaacagtatgatccatttgctgagcacagacctccaaagattgcagaccgggaagatgaatacaaaaagcataggcggaccatgataatttccccagagcgtcttgatccttttgcagatggcttctattctgctgcttgaagtcagaactgctgatggagacaaaggcacgaaagtgtacgtattccggattagcaacccaggaacccatcacttctgaagactctaaactgtgctgtcattttgtttttatatgcattaaaatatttgttttaaactgctgtagatgtttgtgttcaaacaggttaaattgatcagcaaactcaataaaaagtaagatgtataattattaaagttttccatcaaaaaataatttaaatgattatggaataacataatatttagagcagggcagataaatcagttgaacctgcttattttttatttattgtactctttttcctgttgctgttcttttctgcaggagagggaagacccctgatcctaaaatgaatgctaggacttacatggatgtaatgcgagaacaacacttgactaaagaagaacgagaaattaggcaacagctagcagaaaaagctaaagctggagaactaaaagtcgtcaatggagcagcagcgtcccagcctccatcaaaacgaaaacggcgttgggatcaaacagctgatcagactcctggtgccactcccaaaaaactatcaagttgggatcaggcagagacccctgggcatactccttccttaagatgggatgagacaccaggtcgtgcaaagggaagcgagactcctggagcaaccccaggctcaaaaatatgggatcctacacctagccacacaccagcgggagctgctactcctggacgaggtgatacaccaggccatgcgacaccaggccatggaggcgcaacttccagtgctcgtaaaaacagatgggatgaaacccccaaaacagagagagatactcctgggcatggaagtggatgggctgagactcctcgaacagatcgaggtggagattctattggtgaaacaccgactcctggagccagtaaaagaaaatcacggtgggatgaaacaccagctagtcagatgggtggaagcactccagttctgacccctggaaagacaccaattggcacaccagccatgaacatggctacccctactccaggtcacataatgagtatgactcctgaacagcttcaggcttggcggtgggaaagagaaattgatgagagaaatcgcccactttctgatgaggaattagatgctatgttcccagaaggatataaggtacttcctcctccagctggttatgttcctattcgaactccagctcgaaagctgacagctactccaacacctttgggtggtatgactggtttccacatgcaaactgaagatcgaactatgaaaagtgttaatgaccagccatctggaaatcttccatttttaaaacctgatgatattcaatactttgataaactattggttgatgttgatgaatcaacacttagtccagaagagcaaaaagagagaaaaataatgaagttgcttttaaaaattaagaatggaacaccaccaatgagaaaggctgcattgcgtcagattactgataaagctcgtgaatttggagctggtcctttgtttaatcagattcttcctctgctgatgtctcctacacttgaggatcaagagcgtcatttacttgtgaaagttattgataggatactgtacaaacttgatgacttagttcgtccatatgtgcataagatcctcgtggtcattgaaccgctattgattgatgaagattactatgctagagtggaaggccgagagatcatttctaatttggcaaaggctgctggtctggctactatgatctctaccatgagacctgatatagataacatggatgagtatgtccgtaacacaacagctagagcttttgctgttgtagcctctgccctgggcattccttctttattgcccttcttaaaagctgtgtgcaaaagcaagaagtcctggcaagcgagacacactggtattaagattgtacaacagatagctattcttatgggctgtgccatcttgccacatcttagaagtttagttgaaatcattgaacatggtcttgtggatgagcagcagaaagttcggaccatcagtgctttggccattgctgccttggctgaagcagcaactccttatggtatcgaatcttttgattctgtgttaaagcctttatggaagggtatccgccaacacagaggaaagggtttggctgctttcttgaaggctattgggtatcttattcctcttatggatgcagaatatgccaactactatactagagaagtgatgttaatccttattcgagaattccagtctcctgatgaggaaatgaaaaaaattgtgctgaaggtacgaagatgagggaggatgaagacaaaggtcctccctgtggcccagtgaactgcaatgaaaagatcgtggtccttctgcagcgcttgaagcctgagatcaaggatgtcattgagcagctcaacctggtcaccacctgcttgcagctgcagatacctcggattgaggatgtaactattttagagtggctgatgggtgcagactccggtaactctagatcacctcacc

SEQ ID NO: 427438 - DNA, 1852 bp, Homo sapiens
  misc_feature (8)..(9): n is a, c, g, or t
  misc_feature (16)..(16): n is a, c, g, or t
cattgaanntcccttntctacggacgcgcgccattgtgttggtactcgggaactcggccattatggccggctattctaaaggatatattagatatatgaaatgttagatgacttcacatctattcagtgcactgaattagtaatttagtttctaatgggccggtgaatatttcctgtaaaactaagactgtatctttaaggatttttccccctttcttataagaccgcatcttaaaggacttttttcccttccgttgtagagaccttgtacacagacagacggctagtgcagtggtacagcacatgtcacttggggtttatggatttggttgtgaagattcgctgaatcacttgttgaactatgtatggcccaatgtgtttgagacatctcctcatgtaattcaggcagttatgggagccctagagggcctgagagttgctattggaccatgtagaatgttgcaatattgtttacaggtaagttaaagattttttttttaatcggtgattttttttttttaaataatactttaagttctgggatacttgtgctgaacgtgcaggtttgttacataggtatatatgtgccatggtggtttgctgcacctatcaacctgtcatctaggttttaagccctgcatgcattaggtatttgtcctaatgctctccctcccctttccccccactgcctgtaagttaaagatttttaaaagattacttagcaagaaaagtagtgtattggaatcatatctttatgttttcttaattttgttaaggttatgtatgttcttaaaaattgaaataatgtaaccgttcaattattttagggtctgtttcacccagcccggaaagtcagagatgtatattggaaaatttacaactccatctacattggttcccaggacgctctcatagcacattacccaagaatctacaacgatgataagaacacctatattcgttatgaacttgactatatcttataattttattgtttattttgtgtttaatgcacagctacttcacaccttaaacttgctttgatttggtgatgtaaacttttaaacattgcagatcagtgtagaactggtcatagaggaagagctagaaatccagtagcatgatttttaaataacctgtctttgtttttgatgttaaacagtaaatgccagtagtgaccaagaacacagtgattatatacactatactggagggatttcatttttaattcatctttatgaagatttagaactcattccttgtgtttaaagggaatgtttaattgagaaataaacatttgtgtacaaaatgctaaaaaaaccagacgaactgttagcaaaccaagcaacaccactcaacaaatataacccgtctacctcccttgaacatcatgctcacaagaagcccccccatcaaccctcacccacacacgccgtcccaaaccacgacccccccccgagcccggcccacacaccccccccccccgcgccccctccaccccccccccaacgcggcaagaccgcactccagcacaaactagcgaaccagcaaaaccacacccccccggcggcaccacaaacgcgccgaatcgaccgccacagccaacgcccctcagctcccgcacaccccatcgtgcgacagctcacacaccaacccacccccacgtccccacacgatgcgccacgcatacactttagacgatgatcactgaccgcgcacaacgcctccgcacgacccccaccactcatacacacccaccgcgcactaccccccacccacaccatcccaccacagaccccccagcgccaccccacccgcgcacacaccacccccaccccacactaccaccacc

SEQ ID NO: 427439 - DNA, 673 bp, Homo sapiens
agcggaagttcttgggagcgccagttccgtctgtgtgttcgagtggacaaaatggcgaagatcgccaagactcacgaagatattgaagcacagattcgagaaattcaaggcaagaaggcagctcttgatgaagctcaaggagtgggcctcgattctacaggttattatgaccaggaaatttatggtggaagtgacagcagatttgctggatacgtgacatcaattgctgcaactgaacttgaagatgatgacgatgactattcatcatctacgagtttgcttggtcagaagaagccaggatatcatgcccctgtggcattgcttaatgatataccacagtcaacagaacagtatgatccatttgctgagcacagacctccaaagattgcagaccgggaagatgaatacaaaaagcataggcggaccatgataatttccccagagcgtcttgatccttttgcagatggcttctattctgctgcttgaagtcagaactgctgatggagacaaaggcacgaaagtgagggaagacccctgatcctaaaatgaatgctaggacttacatggatgtaatgcgagaacaacacttgactaaagaagaagtatgtaaacctgtctcctgttttaatggttgtgaaagaatataaatacagttgtgattgagagactgtta

SEQ ID NO: 427440 - DNA, 4832 bp, Homo sapiens
agcggaagttcttgggagcgccagttccgtctgtgtgttcgagtggacaaaatggcgaagatcgccaagactcacgaagatattgaagcacagattcgagaaattcaaggcaagaaggcagctcttgatgaagctcaaggagtgggcctcgattctacaggttattatgaccaggaaatttatggtggaagtgacagcagatttgctggatacgtgacatcaattgctgcaactgaacttgaagatgatgacgatgactattcatcatctacgagtttgcttggtcagaagaagccaggatatcatgcccctgtggcattgcttaatgatataccacagtcaacagaacagtatgatccatttgctgagcacagacctccaaagattgcagaccgggaagatgaatacaaaaagcataggcggaccatgataatttccccagagcgtcttgatccttttgcagatggagggaagacccctgatcctaaaatgaatgctaggacttacatggatgtaatgcgagaacaacacttgactaaagaagaacgagaaattaggcaacagctagcagaaaaagctaaagctggagaactaaaagtcgtcaatggagcagcagcgtcccagcctccatcaaaacgaaaacggcgttgggatcaaacagctgatcagactcctggtgccactcccaaaaaactatcaagttgggatcaggcagagacccctgggcatactccttccttaagatgggatgagacaccaggtcgtgcaaagggaagcgagactcctggagcaaccccaggctcaaaaatatgggatcctacacctagccacacaccagcgggagctgctactcctggacgaggtgatacaccaggccatgcgacaccaggccatggaggcgcaacttccagtgctcgtaaaaacagatgggatgaaacccccaaaacagagagagatactcctgggcatggaagtggatgggctgagactcctcgaacagatcgaggtggagattctattggtgaaacaccgactcctggagccagtaaaagaaaatcacggtgggatgaaacaccagctagtcagatgggtggaagcactccagttctgacccctggaaagacaccaattggcacaccagccatgaacatggctacccctactccaggtcacataatgagtatgactcctgaacagcttcaggcttggcggtgggaaagagaaattgatgagagaaatcgcccactttctgatgaggaattagatgctatgttcccagaaggatataaggtacttcctcctccagctggttatgttcctattcgaactccagctcgaaagctgacagctactccaacacctttgggtggtatgactggtttccacatgcaaactgaagatcgaactatgaaaagtgttaatgaccagccatctggaaatcttccatttttaaaacctgatgatattcaatactttgataaactattggttgatgttgatgaatcaacacttagtccagaagagcaaaaagagagaaaaataatgaagttgcttttaaaaattaagaatggaacaccaccaatgagaaaggctgcattgcgtcagattactgataaagctcgtgaatttggagctggtcctttgtttaatcagattcttcctctgctgatgtctcctacacttgaggatcaagagcgtcatttacttgtgaaagttattgataggatactgtacaaacttgatgacttagttcgtccatatgtgcataagatcctcgtggtcattgaaccgctattgattgatgaagattactatgctagagtggaaggccgagagatcatttctaatttggcaaaggctgctggtctggctactatgatctctaccatgagacctgatatagataacatggatgagtatgtccgtaacacaacagctagagcttttgctgttgtagcctctgccctgggcattccttctttattgcccttcttaaaagctgtgtgcaaaagcaagaagtcctggcaagcgagacacactggtattaagattgtacaacagatagctattcttatgggctgtgccatcttgccacatcttagaagtttagttgaaatcattgaacatggtcttgtggatgagcagcagaaagttcggaccatcagtgctttggccattgctgccttggctgaagcagcaactccttatggtatcgaatcttttgattctgtgttaaagcctttatggaagggtatccgccaacacagaggaaagggtttggctgctttcttgaaggctattgggtatcttattcctcttatggatgcagaatatgccaactactatactagagaagtgatgttaatccttattcgagaattccagtctcctgatgaggaaatgaaaaaaattgtgctgaaggtggtaaaacagtgttgtgggacagatggtgtagaagcaaactacattaaaacagagattcttcctcccttttttaaacacttctggcagcacaggatggctttggatagaagaaattaccgacagttagttgatactactgtggagttggcaaacaaagtaggtgcagcagaaattatatccaggattgtggatgatctgaaagatgaagccgaacagtacagaaaaatggtgatggagacaattgagaaaattatgggcaatttgggagcagcagatattgatcataaacttgaagaacaactgattgatggtattctttatgctttccaagaacagactacagaggactcagtaatgttgaacggctttggcacagtggttaatgctcttggcaaacgagtcaaaccatacttgcctcagatctgtggtacagttttgtggcgtttaaataacaaatctgctaaagttaggcaacaggcagctgacttgatttctcgaactgctgttgtcatgaagacttgtcaagaggaaaaattgatgggacacttgggtgttgtattgtatgagtatttgggtgaagagtaccctgaagtattgggcagcattcttggagcactgaaggccattgtaaatgtcataggtatgcataagatgactccaccaattaaagatctgctgcctagactcacccccatcttaaagaacagacatgaaaaagtacaagagaattgtattgatcttgttggtcgtattgctgacaggggagctgaatatgtatctgcaagagagtggatgaggatttgctttgagcttttagagctcttaaaagcccacaaaaaggctattcgtagagccacagtcaacacatttggttatattgcaaaggccattggccctcatgatgtattggctacacttctgaacaacctcaaagttcaagaaaggcagaacagagtttgtaccactgtagcaatagctattgttgcagaaacatgttcaccctttacagtactccctgccttaatgaatgaatacagagttcctgaactgaatgttcaaaatggagtgttaaaatcgctttccttcttgtttgaatatattggtgaaatgggaaaagactacatttatgccgtaacaccgttacttgaagatgctttaatggatagagaccttgtacacagacagacggctagtgcagtggtacagcacatgtcacttggggtttatggatttggttgtgaagattcgctgaatcacttgttgaactatgtatggcccaatgtgtttgagacatctcctcatgtaattcaggcagttatgggagccctagagggcctgagagttgctattggaccatgtagaatgttgcaatattgtttacagggtctgtttcacccagcccggaaagtcagagatgtatattggaaaatttacaactccatctacattggttcccaggacgctctcatagcacattacccaagaatctacaacgatgataagaacacctatattcgttatgaacttgactatatcttataattttattgtttattttgtgtttaatgcacagctacttcacaccttaaacttgctttgatttggtgatgtaaacttttaaacattgcagatcagtgtagaactggtcatagaggaagagctagaaatccagtagcatgatttttaaataacctgtctttgtttttgatgttaaacagtaaatgccagtagtgaccaagaacacagtgattatatacactatactggagggatttcatttttaattcatctttatgaagatttagaactcattccttgtgtttaaagggaatgtttaattgagaaataaacatttgtgtacaaaatgctaaaaaaaccagacgaactgttagcaaaccaagcaacaccactcaacaaatataacccgtctacctcccttgaacatcatgctcacaagaagcccccccatcaaccctcacccacacacgccgtcccaaaccacgacccccccccgagcccggcccacacaccccccccccccgcgccccctccaccccccccccaacgcggcaagaccgcactccagcacaaactagcgaaccagcaaaaccacacccccccggcggcaccacaaacgcgccgaatcgaccgccacagccaacgcccctcagctcccgcacaccccatcgtgcgacagctcacacaccaacccacccccacgtccccacacgatgcgccacgcatacactttagacgatgatcactgaccgcgcacaacgcctccgcacgacccccaccactcatacacacccaccgcgcactaccccccacccacaccatcccaccacagaccccccagcgccaccccacccgcgcacacaccacccccaccccacactaccaccacc

SEQ ID NO: 427441 - DNA, 608 bp, Homo sapiens
agcggaagttcttgggagcgccagttccgtctgtgtgttcgagtggacaaaatggcgaagatcgccaagactcacgaagatattgaagcacagattcgagaaattcaaggcaagaaggcagctcttgatgaagctcaaggagtgggcctcgattctacaggttattatgaccaggaaatttatggtggaagtgacagcagatttgctggatacgtgacatcaattgctgcaactgaacttgaagatgatgacgatgactattcatcatctacgagtttgcttggtcagaagaagccaggatatcatgcccctgtggcattgcttaatgatataccacagtcaacagaacagtatgatccatttgctgagcacagacctccaaagattgcagaccgggaagatgaatacaaaaagcataggcggaccatgataatttccccagagcgtcttgatccttttgcagatggtaattctttcccacttttctataagtattcagaaatttatttgtattaagttgtctttagccctttgattttttttggcatgcttctgaatttgcttttctttttaaaaatcccccttactatagatttgtatagatgtgg

SEQ ID NO: 427442 - DNA, 5197 bp, Homo sapiens
agcggaagttcttgggagcgccagttccgtctgtgtgttcgagtggacaaaatggcgaagatcgccaagactcacgaagatattgaagcacagattcgagaaattcaaggcaagaaggcagctcttgatgaagctcaaggagtgggcctcgattctacaggttattatgaccaggaaatttatggtggaagtgacagcagatttgctggatacgtgacatcaattgctgcaactgaacttgaagatgatgacgatgactattcatcatctacgagtttgcttggtcagaagaagccaggatatcatgcccctgtggcattgcttaatgatataccacagtcaacagaacagtatgatccatttgctgagcacagacctccaaagattgcagaccgggaagatgaatacaaaaagcataggcggaccatgataatttccccagagcgtcttgatccttttgcagatggcttctattctgctgcttgaagtcagaactgctgatggagacaaaggcacgaaagtgtacgtattccggattagcaacccaggaacccatcacttctgaagactctaaactgtgctgtcattttgtttttatatgcattaaaatatttgttttaaactgctgtagatgtttgtgttcaaacaggttaaattgatcagcaaactcaataaaaagtaagatgtataattattaaagttttccatcaaaaaataatttaaatgattatggaataacataatatttagagcagggcagataaatcagttgaacctgcttattttttatttattgtactctttttcctgttgctgttcttttctgcaggagagggaagacccctgatcctaaaatgaatgctaggacttacatggatgtaatgcgagaacaacacttgactaaagaagaacgagaaattaggcaacagctagcagaaaaagctaaagctggagaactaaaagtcgtcaatggagcagcagcgtcccagcctccatcaaaacgaaaacggcgttgggatcaaacagctgatcagactcctggtgccactcccaaaaaactatcaagttgggatcaggcagagacccctgggcatactccttccttaagatgggatgagacaccaggtcgtgcaaagggaagcgagactcctggagcaaccccaggctcaaaaatatgggatcctacacctagccacacaccagcgggagctgctactcctggacgaggtgatacaccaggccatgcgacaccaggccatggaggcgcaacttccagtgctcgtaaaaacagatgggatgaaacccccaaaacagagagagatactcctgggcatggaagtggatgggctgagactcctcgaacagatcgaggtggagattctattggtgaaacaccgactcctggagccagtaaaagaaaatcacggtgggatgaaacaccagctagtcagatgggtggaagcactccagttctgacccctggaaagacaccaattggcacaccagccatgaacatggctacccctactccaggtcacataatgagtatgactcctgaacagcttcaggcttggcggtgggaaagagaaattgatgagagaaatcgcccactttctgatgaggaattagatgctatgttcccagaaggatataaggtacttcctcctccagctggttatgttcctattcgaactccagctcgaaagctgacagctactccaacacctttgggtggtatgactggtttccacatgcaaactgaagatcgaactatgaaaagtgttaatgaccagccatctggaaatcttccatttttaaaacctgatgatattcaatactttgataaactattggttgatgttgatgaatcaacacttagtccagaagagcaaaaagagagaaaaataatgaagttgcttttaaaaattaagaatggaacaccaccaatgagaaaggctgcattgcgtcagattactgataaagctcgtgaatttggagctggtcctttgtttaatcagattcttcctctgctgatgtctcctacacttgaggatcaagagcgtcatttacttgtgaaagttattgataggatactgtacaaacttgatgacttagttcgtccatatgtgcataagatcctcgtggtcattgaaccgctattgattgatgaagattactatgctagagtggaaggccgagagatcatttctaatttggcaaaggctgctggtctggctactatgatctctaccatgagacctgatatagataacatggatgagtatgtccgtaacacaacagctagagcttttgctgttgtagcctctgccctgggcattccttctttattgcccttcttaaaagctgtgtgcaaaagcaagaagtcctggcaagcgagacacactggtattaagattgtacaacagatagctattcttatgggctgtgccatcttgccacatcttagaagtttagttgaaatcattgaacatggtcttgtggatgagcagcagaaagttcggaccatcagtgctttggccattgctgccttggctgaagcagcaactccttatggtatcgaatcttttgattctgtgttaaagcctttatggaagggtatccgccaacacagaggaaagggtttggctgctttcttgaaggctattgggtatcttattcctcttatggatgcagaatatgccaactactatactagagaagtgatgttaatccttattcgagaattccagtctcctgatgaggaaatgaaaaaaattgtgctgaaggtggtaaaacagtgttgtgggacagatggtgtagaagcaaactacattaaaacagagattcttcctcccttttttaaacacttctggcagcacaggatggctttggatagaagaaattaccgacagttagttgatactactgtggagttggcaaacaaagtaggtgcagcagaaattatatccaggattgtggatgatctgaaagatgaagccgaacagtacagaaaaatggtgatggagacaattgagaaaattatgggcaatttgggagcagcagatattgatcataaacttgaagaacaactgattgatggtattctttatgctttccaagaacagactacagaggactcagtaatgttgaacggctttggcacagtggttaatgctcttggcaaacgagtcaaaccatacttgcctcagatctgtggtacagttttgtggcgtttaaataacaaatctgctaaagttaggcaacaggcagctgacttgatttctcgaactgctgttgtcatgaagacttgtcaagaggaaaaattgatgggacacttgggtgttgtattgtatgagtatttgggtgaagagtaccctgaagtattgggcagcattcttggagcactgaaggccattgtaaatgtcataggtatgcataagatgactccaccaattaaagatctgctgcctagactcacccccatcttaaagaacagacatgaaaaagtacaagagaattgtattgatcttgttggtcgtattgctgacaggggagctgaatatgtatctgcaagagagtggatgaggatttgctttgagcttttagagctcttaaaagcccacaaaaaggctattcgtagagccacagtcaacacatttggttatattgcaaaggccattggccctcatgatgtattggctacacttctgaacaacctcaaagttcaagaaaggcagaacagagtttgtaccactgtagcaatagctattgttgcagaaacatgttcaccctttacagtactccctgccttaatgaatgaatacagagttcctgaactgaatgttcaaaatggagtgttaaaatcgctttccttcttgtttgaatatattggtgaaatgggaaaagactacatttatgccgtaacaccgttacttgaagatgctttaatggatagagaccttgtacacagacagacggctagtgcagtggtacagcacatgtcacttggggtttatggatttggttgtgaagattcgctgaatcacttgttgaactatgtatggcccaatgtgtttgagacatctcctcatgtaattcaggcagttatgggagccctagagggcctgagagttgctattggaccatgtagaatgttgcaatattgtttacagggtctgtttcacccagcccggaaagtcagagatgtatattggaaaatttacaactccatctacattggttcccaggacgctctcatagcacattacccaagaatctacaacgatgataagaacacctatattcgttatgaacttgactatatcttataattttattgtttattttgtgtttaatgcacagctacttcacaccttaaacttgctttgatttggtgatgtaaacttttaaacattgcagatcagtgtagaactggtcatagaggaagagctagaaatccagtagcatgatttttaaataacctgtctttgtttttgatgttaaacagtaaatgccagtagtgaccaagaacacagtgattatatacactatactggagggatttcatttttaattcatctttatgaagatttagaactcattccttgtgtttaaagggaatgtttaattgagaaataaacatttgtgtacaaaatgctaaaaaaaccagacgaactgttagcaaaccaagcaacaccactcaacaaatataacccgtctacctcccttgaacatcatgctcacaagaagcccccccatcaaccctcacccacacacgccgtcccaaaccacgacccccccccgagcccggcccacacaccccccccccccgcgccccctccaccccccccccaacgcggcaagaccgcactccagcacaaactagcgaaccagcaaaaccacacccccccggcggcaccacaaacgcgccgaatcgaccgccacagccaacgcccctcagctcccgcacaccccatcgtgcgacagctcacacaccaacccacccccacgtccccacacgatgcgccacgcatacactttagacgatgatcactgaccgcgcacaacgcctccgcacgacccccaccactcatacacacccaccgcgcactaccccccacccacaccatcccaccacagaccccccagcgccaccccacccgcgcacacaccacccccaccccacactaccaccacc

SEQ ID NO: 427443 - DNA, 4405 bp, Homo sapiens
  misc_feature (37)..(38): n is a, c, g, or t
gcggccgcctactactactaaattcgcggccgcgtcnncgagggaagacccctgatcctaaaatgaatgctaggacttacatggatgtaatgcgagaacaacacttgactaaagaagaacgagaaattaggcaacagctagcagaaaaagctaaagctggagaactaaaagtcgtcaatggagcagcagcgtcccagcctccatcaaaacgaaaacggcgttgggatcaaacagctgatcagactcctggtgccactcccaaaaaactatcaagttgggatcaggcagagacccctgggcatactccttccttaagatgggatgagacaccaggtcgtgcaaagggaagcgagactcctggagcaaccccaggctcaaaaatatgggatcctacacctagccacacaccagcgggagctgctactcctggacgaggtgatacaccaggccatgcgacaccaggccatggaggcgcaacttccagtgctcgtaaaaacagatgggatgaaacccccaaaacagagagagatactcctgggcatggaagtggatgggctgagactcctcgaacagatcgaggtggagattctattggtgaaacaccgactcctggagccagtaaaagaaaatcacggtgggatgaaacaccagctagtcagatgggtggaagcactccagttctgacccctggaaagacaccaattggcacaccagccatgaacatggctacccctactccaggtcacataatgagtatgactcctgaacagcttcaggcttggcggtgggaaagagaaattgatgagagaaatcgcccactttctgatgaggaattagatgctatgttcccagaaggatataaggtacttcctcctccagctggttatgttcctattcgaactccagctcgaaagctgacagctactccaacacctttgggtggtatgactggtttccacatgcaaactgaagatcgaactatgaaaagtgttaatgaccagccatctggaaatcttccatttttaaaacctgatgatattcaatactttgataaactattggttgatgttgatgaatcaacacttagtccagaagagcaaaaagagagaaaaataatgaagttgcttttaaaaattaagaatggaacaccaccaatgagaaaggctgcattgcgtcagattactgataaagctcgtgaatttggagctggtcctttgtttaatcagattcttcctctgctgatgtctcctacacttgaggatcaagagcgtcatttacttgtgaaagttattgataggatactgtacaaacttgatgacttagttcgtccatatgtgcataagatcctcgtggtcattgaaccgctattgattgatgaagattactatgctagagtggaaggccgagagatcatttctaatttggcaaaggctgctggtctggctactatgatctctaccatgagacctgatatagataacatggatgagtatgtccgtaacacaacagctagagcttttgctgttgtagcctctgccctgggcattccttctttattgcccttcttaaaagctgtgtgcaaaagcaagaagtcctggcaagcgagacacactggtattaagattgtacaacagatagctattcttatgggctgtgccatcttgccacatcttagaagtttagttgaaatcattgaacatggtcttgtggatgagcagcagaaagttcggaccatcagtgctttggccattgctgccttggctgaagcagcaactccttatggtatcgaatcttttgattctgtgttaaagcctttatggaagggtatccgccaacacagaggaaagggtttggctgctttcttgaaggctattgggtatcttattcctcttatggatgcagaatatgccaactactatactagagaagtgatgttaatccttattcgagaattccagtctcctgatgaggaaatgaaaaaaattgtgctgaaggtggtaaaacagtgttgtgggacagatggtgtagaagcaaactacattaaaacagagattcttcctcccttttttaaacacttctggcagcacaggatggctttggatagaagaaattaccgacagttagttgatactactgtggagttggcaaacaaagtaggtgcagcagaaattatatccaggattgtggatgatctgaaagatgaagccgaacagtacagaaaaatggtgatggagacaattgagaaaattatgggcaatttgggagcagcagatattgatcataaacttgaagaacaactgattgatggtattctttatgctttccaagaacagactacagaggactcagtaatgttgaacggctttggcacagtggttaatgctcttggcaaacgagtcaaaccatacttgcctcagatctgtggtacagttttgtggcgtttaaataacaaatctgctaaagttaggcaacaggcagctgacttgatttctcgaactgctgttgtcatgaagacttgtcaagaggaaaaattgatgggacacttgggtgttgtattgtatgagtatttgggtgaagagtaccctgaagtattgggcagcattcttggagcactgaaggccattgtaaatgtcataggtatgcataagatgactccaccaattaaagatctgctgcctagactcacccccatcttaaagaacagacatgaaaaagtacaagagaattgtattgatcttgttggtcgtattgctgacaggggagctgaatatgtatctgcaagagagtggatgaggatttgctttgagcttttagagctcttaaaagcccacaaaaaggctattcgtagagccacagtcaacacatttggttatattgcaaaggccattggccctcatgatgtattggctacacttctgaacaacctcaaagttcaagaaaggcagaacagagtttgtaccactgtagcaatagctattgttgcagaaacatgttcaccctttacagtactccctgccttaatgaatgaatacagagttcctgaactgaatgttcaaaatggagtgttaaaatcgctttccttcttgtttgaatatattggtgaaatgggaaaagactacatttatgccgtaacaccgttacttgaagatgctttaatggatagagaccttgtacacagacagacggctagtgcagtggtacagcacatgtcacttggggtttatggatttggttgtgaagattcgctgaatcacttgttgaactatgtatggcccaatgtgtttgagacatctcctcatgtaattcaggcagttatgggagccctagagggcctgagagttgctattggaccatgtagaatgttgcaatattgtttacagggtctgtttcacccagcccggaaagtcagagatgtatattggaaaatttacaactccatctacattggttcccaggacgctctcatagcacattacccaagaatctacaacgatgataagaacacctatattcgttatgaacttgactatatcttataattttattgtttattttgtgtttaatgcacagctacttcacaccttaaacttgctttgatttggtgatgtaaacttttaaacattgcagatcagtgtagaactggtcatagaggaagagctagaaatccagtagcatgatttttaaataacctgtctttgtttttgatgttaaacagtaaatgccagtagtgaccaagaacacagtgattatatacactatactggagggatttcatttttaattcatctttatgaagatttagaactcattccttgtgtttaaagggaatgtttaattgagaaataaacatttgtgtacaaaatgctaaaaaaaccagacgaactgttagcaaaccaagcaacaccactcaacaaatataacccgtctacctcccttgaacatcatgctcacaagaagcccccccatcaaccctcacccacacacgccgtcccaaaccacgacccccccccgagcccggcccacacaccccccccccccgcgccccctccaccccccccccaacgcggcaagaccgcactccagcacaaactagcgaaccagcaaaaccacacccccccggcggcaccacaaacgcgccgaatcgaccgccacagccaacgcccctcagctcccgcacaccccatcgtgcgacagctcacacaccaacccacccccacgtccccacacgatgcgccacgcatacactttagacgatgatcactgaccgcgcacaacgcctccgcacgacccccaccactcatacacacccaccgcgcactaccccccacccacaccatcccaccacagaccccccagcgccaccccacccgcgcacacaccacccccaccccacactaccaccacc

SEQ ID NO: 427444 - DNA, 5057 bp, Homo sapiens
agcggaagttcttgggagcgccagttccgtctgtgtgttcgagtggacaaaatggcgaagatcgccaagactcacgaagatattgaagcacagattcgagaaattcaaggcaagaaggcagctcttgatgaagctcaaggagtgggcctcgattctacaggttattatgaccaggaaatttatggtggaagtgacagcagatttgctggatacgtgacatcaattgctgcaactgaacttgaagatgatgacgatgactattcatcatctacgagtttgcttggtcagaagaagccaggatatcatgcccctgtggcattgcttaatgatataccacagtcaacagaacagtatgatccatttgctgagcacagacctccaaagattgcagaccgggaagatgaatacaaaaagcataggcggaccatgataatttccccagagcgtcttgatccttttgcagatggcttctattctgctgcttgaagtcagaactgctgatggagacaaaggcacgaaagtgtacgtattccggattagcaacccaggaacccatcacttctgaagactctaaactgtgctgtcattttgtttttatatgcattaaaatatttgttttaaactgctgtagatgtttgtgttcaaacaggttaaattgatcagcaaactcaataaaaagtaagatgtataattattaaagttttccatcaaaaaataatttaaatgattatggaataacataatatttagagcagggcagataaatcagttgaacctgcttattttttatttattgtactctttttcctgttgctgttcttttctgcaggagagggaagacccctgatcctaaaatgaatgctaggacttacatggatgtaatgcgagaacaacacttgactaaagaagaacgagaaattaggcaacagctagcagaaaaagctaaagctggagaactaaaagtcgtcaatggagcagcagcgtcccagcctccatcaaaacgaaaacggcgttgggatcaaacagctgatcagactcctggtgccactcccaaaaaactatcaagttgggatcaggcagagacccctgggcatactccttccttaagatgggatgagacaccaggtcgtgcaaagggaagcgagactcctggagcaaccccaggctcaaaaatatgggatcctacacctagccacacaccagcgggagctgctactcctggacgaggtgatacaccaggccatgcgacaccaggccatggaggcgcaacttccagtgctcgtaaaaacagatgggatgaaacccccaaaacagagagagatactcctgggcatggaagtggatgggctgagactcctcgaacagatcgaggtggagattctattggtgaaacaccgactcctggagccagtaaaagaaaatcacggtgggatgaaacaccagctagtcagatgggtggaagcactccagttctgacccctggaaagacaccaattggcacaccagccatgaacatggctacccctactccaggtcacataatgagtatgactcctgaacagcttcaggcttggcggtgggaaagagaaattgatgagagaaatcgcccactttctgatgaggaattagatgctatgttcccagaaggatataaggtacttcctcctccagctggttatgttcctattcgaactccagctcgaaagctgacagctactccaacacctttgggtggtatgactggtttccacatgcaaactgaagatcgaactatgaaaagtgttaatgaccagccatctggaaatcttccatttttaaaacctgatgatattcaatactttgataaactattggttgatgttgatgaatcaacacttagtccagaagagcaaaaagagagaaaaataatgaagttgcttttaaaaattaagaatggaacaccaccaatgagaaaggctgcattgcgtcagattactgataaagctcgtgaatttggagctggtcctttgtttaatcagattcttcctctgctgatgtctcctacacttgaggatcaagagcgtcatttacttgtgaaagttattgataggatactgtacaaacttgatgacttagttcgtccatatgtgcataagatcctcgtggtcattgaaccgctattgattgatgaagattactatgctagagtggaaggccgagagatcatttctaatttggcaaaggctgctggtctggctactatgatctctaccatgagacctgatatagataacatggatgagtatgtccgtaacacaacagctagagcttttgctgttgtagcctctgccctgggcattccttctttattgcccttcttaaaagctgtgtgcaaaagcaagaagtcctggcaagcgagacacactggtattaagattgtacaacagatagctattcttatgggctgtgccatcttgccacatcttagaagtttagttgaaatcattgaacatggtcttgtggatgagcagcagaaagttcggaccatcagtgctttggccattgctgccttggctgaagcagcaactccttatggtatcgaatcttttgattctgtgttaaagcctttatggaagggtatccgccaacacagaggaaagggtttggctgctttcttgaaggctattgggtatcttattcctcttatggatgcagaatatgccaactactatactagagaagtgatgttaatccttattcgagaattccagtctcctgatgaggaaatgaaaaaaattgtgctgaaggtggtaaaacagtgttgtgggacagatggtgtagaagcaaactacattaaaacagagattcttcctcccttttttaaacacttctggcagcacaggatggctttggatagaagaaattaccgacagttagttgatactactgtggagttggcaaacaaagtaggtgcagcagaaattatatccaggattgtggatgatctgaaagatgaagccgaacagtacagaaaaatggtgatggagacaattgagaaaattatgggcaatttgggagcagcagatattgatcataaacttgaagaacaactgattgatggtattctttatgctttccaagaacagactacagaggactcagtaatgttgaacggctttggcacagtggttaatgctcttggcaaacgagtcaaaccatacttgcctcagatctgtggtacagttttgtggcgtttaaataacaaatctgctaaagttaggcaacaggcagctgacttgatttctcgaactgctgttgtcatgaagacttgtcaagaggaaaaattgatgggacacttgggtgttgtattgtatgagtatttgggtgaagagtaccctgaagtattgggcagcattcttggagcactgaaggccattgtaaatgtcataggtatgcataagatgactccaccaattaaagatctgctgcctagactcacccccatcttaaagaacagacatgaaaaagtacaagagaattgtattgatcttgttggtcgtattgctgacaggggagctgaatatgtatctgcaagagagtggatgaggatttgctttgagcttttagagctcttaaaagcccacaaaaaggctattcgtagagccacagtcaacacatttggttatattgcaaaggccattggccctcatgatgtattggctacacttctgaacaacctcaaagttcaagaaaggcagaacagagtttgtaccactgtagcaatagctattgttgcagaaacatgttcaccctttacagtactccctgccttaatgaatgaatacagagttcctgaactgaatgttcaaaatggagtgttaaaatcgctttccttcttgtttgaatatattggtgaaatgggaaaagactacatttatgccgtaacaccgttacttgaagatgctttaatggatagagaccttgtacacagacagacggctagtgcagtggtacagcacatgtcacttggggtttatggatttggttgtgaagattcgctgaatcacttgttgaactatgtatggcccaatgtgtttgagacatctcctcatgtaattcaggcagttatgggagccctagagggcctgagagttgctattggaccatgtagaatgttgcaatattgtttacagggtctgtttcacccagcccggaaagtcagagatgtatattggaaaatttacaactccatctacattggttcccaggacgctctcatagcacattacccaagaatctacaacgatgataagaacacctatattcgttatgaacttgactatatcttataattttattgtttattttgtgtttaatgcacagctacttcacaccttaaacttgctttgatttggtgatgtaaacttttaaacattgcagatcagtgtagaactggtcatagaggaagagctagaaatccagtagcatgatttttaaataacctgtctttgtttttgatgttaaacagtaaatgccagtagtgaccaagaacacagtgattatatacactatactggagggatttcatttttaattcatctttatgaagatttagaactcattccttgtgtttaaagggaatgtttaattgagaaataaacatttgtgtacaaaatgctaatttgtgtgtgttttttgaacatgacttgtaaaatgcggaactttgataaagtattggtttatgtggaataagtggcttaatttcattttctgtcacatggtttatagaaagtagttagctgaataaaaactatataaagtgatggcatctttgtcaaaattccattgttgtgttaataatgacagcaagaagagtagcctcaggggatgttcccctcaaactagcacaaccattccatcatcgtagaaaagtagcacttttgctaaactgtcttgaatattttgtacttacatagcgcctttcatctcttgatttctcaaaatgctttatgaacacatttaaagaaagtggtttaagtcttgtccaacacttgacaggtctgctgtgtttagcaagt

SEQ ID NO: 427445 - DNA, 5063 bp, Homo sapiens
agcggaagttcttgggagcgccagttccgtctgtgtgttcgagtggacaaaatggcgaagatcgccaagactcacgaagatattgaagcacagattcgagaaattcaaggcaagaaggcagctcttgatgaagctcaaggagtgggcctcgattctacaggttattatgaccaggaaatttatggtggaagtgacagcagatttgctggatacgtgacatcaattgctgcaactgaacttgaagatgatgacgatgactattcatcatctacgagtttgcttggtcagaagaagccaggatatcatgcccctgtggcattgcttaatgatataccacagtcaacagaacagtatgatccatttgctgagcacagacctccaaagattgcagaccgggaagatgaatacaaaaagcataggcggaccatgataatttccccagagcgtcttgatccttttgcagatggcttctattctgctgcttgaagtcagaactgctgatggagacaaaggcacgaaagtgtacgtattccggattagcaacccaggaacccatcacttctgaagactctaaactgtgctgtcattttgtttttatatgcattaaaatatttgttttaaactgctgtagatgtttgtgttcaaacaggttaaattgatcagcaaactcaataaaaagtaagatgtataattattaaagttttccatcaaaaaataatttaaatgattatggaataacataatatttagagcagggcagataaatcagttgaacctgcttattttttatttattgtactctttttcctgttgctgttcttttctgcaggagagggaagacccctgatcctaaaatgaatgctaggacttacatggatgtaatgcgagaacaacacttgactaaagaagaacgagaaattaggcaacagctagcagaaaaagctaaagctggagaactaaaagtcgtcaatggagcagcagcgtcccagcctccatcaaaacgaaaacggcgttgggatcaaacagctgatcagactcctggtgccactcccaaaaaactatcaagttgggatcaggcagagacccctgggcatactccttccttaagatgggatgagacaccaggtcgtgcaaagggaagcgagactcctggagcaaccccaggctcaaaaatatgggatcctacacctagccacacaccagcgggagctgctactcctggacgaggtgatacaccaggccatgcgacaccaggccatggaggcgcaacttccagtgctcgtaaaaacagatgggatgaaacccccaaaacagagagagatactcctgggcatggaagtggatgggctgagactcctcgaacagatcgaggtggagattctattggtgaaacaccgactcctggagccagtaaaagaaaatcacggtgggatgaaacaccagctagtcagatgggtggaagcactccagttctgacccctggaaagacaccaattggcacaccagccatgaacatggctacccctactccaggtcacataatgagtatgactcctgaacagcttcaggcttggcggtgggaaagagaaattgatgagagaaatcgcccactttctgatgaggaattagatgctatgttcccagaaggatataaggtacttcctcctccagctggttatgttcctattcgaactccagctcgaaagctgacagctactccaacacctttgggtggtatgactggtttccacatgcaaactgaagatcgaactatgaaaagtgttaatgaccagccatctggaaatcttccatttttaaaacctgatgatattcaatactttgataaactattggttgatgttgatgaatcaacacttagtccagaagagcaaaaagagagaaaaataatgaagttgcttttaaaaattaagaatggaacaccaccaatgagaaaggctgcattgcgtcagattactgataaagctcgtgaatttggagctggtcctttgtttaatcagattcttcctctgctgatgtctcctacacttgaggatcaagagcgtcatttacttgtgaaagttattgataggatactgtacaaacttgatgacttagttcgtccatatgtgcataagatcctcgtggtcattgaaccgctattgattgatgaagattactatgctagagtggaaggccgagagatcatttctaatttggcaaaggctgctggtctggctactatgatctctaccatgagacctgatatagataacatggatgagtatgtccgtaacacaacagctagagcttttgctgttgtagcctctgccctgggcattccttctttattgcccttcttaaaagctgtgtgcaaaagcaagaagtcctggcaagcgagacacactggtattaagattgtacaacagatagctattcttatgggctgtgccatcttgccacatcttagaagtttagttgaaatcattgaacatggtcttgtggatgagcagcagaaagttcggaccatcagtgctttggccattgctgccttggctgaagcagcaactccttatggtatcgaatcttttgattctgtgttaaagcctttatggaagggtatccgccaacacagaggaaagggtttggctgctttcttgaaggctattgggtatcttattcctcttatggatgcagaatatgccaactactatactagagaagtgatgttaatccttattcgagaattccagtctcctgatgaggaaatgaaaaaaattgtgctgaaggtggtaaaacagtgttgtgggacagatggtgtagaagcaaactacattaaaacagagattcttcctcccttttttaaacacttctggcagcacaggatggctttggatagaagaaattaccgacagttagttgatactactgtggagttggcaaacaaagtaggtgcagcagaaattatatccaggattgtggatgatctgaaagatgaagccgaacagtacagaaaaatggtgatggagacaattgagaaaattatgggcaatttgggagcagcagatattgatcataaacttgaagaacaactgattgatggtattctttatgctttccaagaacagactacagaggactcagtaatgttgaacggctttggcacagtggttaatgctcttggcaaacgagtcaaaccatacttgcctcagatctgtggtacagttttgtggcgtttaaataacaaatctgctaaagttaggcaacaggcagctgacttgatttctcgaactgctgttgtcatgaagacttgtcaagaggaaaaattgatgggacacttgggtgttgtattgtatgagtatttgggtgaagagtaccctgaagtattgggcagcattcttggagcactgaaggccattgtaaatgtcataggtatgcataagatgactccaccaattaaagatctgctgcctagactcacccccatcttaaagaacagacatgaaaaagtacaagagaattgtattgatcttgttggtcgtattgctgacaggggagctgaatatgtatctgcaagagagtggatgaggatttgctttgagcttttagagctcttaaaagcccacaaaaaggctattcgtagagccacagtcaacacatttggttatattgcaaaggccattggccctcatgatgtattggctacacttctgaacaacctcaaagttcaagaaaggcagaacagagtttgtaccactgtagcaatagctattgttgcagaaacatgttcaccctttacagtactccctgccttaatgaatgaatacagagttcctgaactgaatgttcaaaatggagtgttaaaatcgctttccttcttgtttgaatatattggtgaaatgggaaaagactacatttatgccgtaacaccgttacttgaagatgctttaatggatagagaccttgtacacagacagacggctagtgcagtggtacagcacatgtcacttggggtttatggatttggttgtgaagattcgctgaatcacttgttgaactatgtatggcccaatgtgtttgagacatctcctcatgtaattcaggcagttatgggagccctagagggcctgagagttgctattggaccatgtagaatgttgcaatattgtttacagggtctgtttcacccagcccggaaagtcagagatgtatattggaaaatttacaactccatctacattggttcccaggacgctctcatagcacattacccaagaatctacaacgatgataagaacacctatattcgttatgaacttgactatatcttataattttattgtttattttgtgtttaatgcacagctacttcacaccttaaacttgctttgatttggtgatgtaaacttttaaacattgcagatcagtgtagaactggtcatagaggaagagctagaaatccagtagcatgatttttaaataacctgtctttgtttttgatgttaaacagtaaatgccagtagtgaccaagaacacagtgattatatacactatactggagggatttcatttttaattcatctttatgaagatttagaactcattccttgtgtttaaagggaatgtttaattgagaaataaacatttgtgtacaaaatgaaaaaaaaaaaaaaaaaaaaaaaaaaaaaaaaaaaaaaaaaaaaaaaaaacaaaaaaaaaataaacaaacaaaaaaaaccaaaaaaaaaaaaaacaaaaaaaaaaaagagggggggggacacgacaagtaccacagagggatagaaacaagatgagcacagaagaaacagagacgctaccacacacgcgcatacaacagacagacgcacgcggggagacgaaaaaaaaaaaagaacgaaggaaaacaggcaaacgtaagagcgcacaatagaaagagagaaccagaatgaaggggaggaagaagcaagagcaggacacacaacaacagcaacgatagcgcaccatgaccgaaacaccaaaagagaagcaggacaatgaaaggtccaaagagaagcgaacacaccaac

SEQ ID NO: 427446 - DNA, 2405 bp, Homo sapiens
aaaaaagggaggaagaatctctgttttaatgtagtttgcttctacaccatctgtcccacaacactgttttaccacttctggcagcacaggatggctttggatagaagaaattaccgacagttagttgatactactgtggagttggcaaacaaagtaggtgcagcagaaattatatccaggattgtggatgatctgaaagatgaagccgaacagtacagaaaaatggtgatggagacaattgagaaaattatgggcaatttgggagcagcagatattgatcataaacttgaagaacaactgattgatggtattctttatgctttccaagaacagactacagaggactcagtaatgttgaacggctttggcacagtggttaatgctcttggcaaacgagtcaaaccatacttgcctcagatctgtggtacagttttgtggcgtttaaataacaaatctgctaaagttaggcaacaggcagctgacttgatttctcgaactgctgttgtcatgaagacttgtcaagaggaaaaattgatgggacacttgggtgttgtattgtatgagtatttgggtgaagagtaccctgaagtattgggcagcattcttggagcactgaaggccattgtaaatgtcataggtatgcataagatgactccaccaattaaagatctgctgcctagactcacccccatcttaaagaacagacatgaaaaagtacaagagaattgtattgatcttgttggtcgtattgctgacaggggagctgaatatgtatctgcaagagagtggatgaggatttgctttgagcttttagagctcttaaaagcccacaaaaaggctattcgtagagccacagtcaacacatttggttatattgcaaaggccattggccctcatgatgtattggctacacttctgaacaacctcaaagttcaagaaaggcagaacagagtttgtaccactgtagcaatagctattgttgcagaaacatgttcaccctttacagtactccctgccttaatgaatgaatacagagttcctgaactgaatgttcaaaatggagtgttaaaatcgctttccttcttgtttgaatatattggtgaaatgggaaaagactacatttatgccgtaacaccgttacttgaagatgctttaatggatagagaccttgtacacagacagacggctagtgcagtggtacagcacatgtcacttggggtttatggatttggttgtgaagattcgctgaatcacttgttgaactatgtatggcccaatgtgtttgagacatctcctcatgtaattcaggcagttatgggagccctagagggcctgagagttgctattggaccatgtagaatgttgcaatattgtttacagggtctgtttcacccagcccggaaagtcagagatgtatattggaaaatttacaactccatctacattggttcccaggacgctctcatagcacattacccaagaatctacaacgatgataagaacacctatattcgttatgaacttgactatatcttataattttattgtttattttgtgtttaatgcacagctacttcacaccttaaacttgctttgatttggtgatgtaaacttttaaacattgcagatcagtgtagaactggtcatagaggaagagctagaaatccagtagcatgatttttaaataacctgtctttgtttttgatgttaaacagtaaatgccagtagtgaccaagaacacagtgattatatacactatactggagggatttcatttttaattcatctttatgaagatttagaactcattccttgtgtttaaagggaatgtttaattgagaaataaacatttgtgtacaaaatgctaaaaaaaccagacgaactgttagcaaaccaagcaacaccactcaacaaatataacccgtctacctcccttgaacatcatgctcacaagaagcccccccatcaaccctcacccacacacgccgtcccaaaccacgacccccccccgagcccggcccacacaccccccccccccgcgccccctccaccccccccccaacgcggcaagaccgcactccagcacaaactagcgaaccagcaaaaccacacccccccggcggcaccacaaacgcgccgaatcgaccgccacagccaacgcccctcagctcccgcacaccccatcgtgcgacagctcacacaccaacccacccccacgtccccacacgatgcgccacgcatacactttagacgatgatcactgaccgcgcacaacgcctccgcacgacccccaccactcatacacacccaccgcgcactaccccccacccacaccatcccaccacagaccccccagcgccaccccacccgcgcacacaccacccccaccccacactaccaccacc

SEQ ID NO: 427447 - DNA, 4598 bp, Homo sapiens
agcggaagttcttgggagcgccagttccgtctgtgtgttcgagtggacaaaatggcgaagatcgccaagactcacgaagatattgaagcacagattcgagaaattcaaggcaagaaggcagctcttgatgaagctcaaggagtgggcctcgattctacaggttattatgaccaggaaatttatggtggaagtgacagcagatttgctggatacgtgacatcaattgctgcaactgaacttgaagatgatgacgatgactattcatcatctacgagtttgcttggtcagaagaagccaggatatcatgcccctgtggcattgcttaatgatataccacagtcaacagaacagtatgatccatttgctgagcacagacctccaaagattgcagaccgggaagatgaatacaaaaagcataggcggaccatgataatttccccagagcgtcttgatccttttgcagatggcttctattctgctgcttgaagtcagaactgctgatggagacaaaggcacgaaagtgtacgtattccggattagcaacccaggaacccatcacttctgaagactctaaactgtgctgtcattttgtttttatatgcattaaaatatttgttttaaactgctgtagatgtttgtgttcaaacaggttaaattgatcagcaaactcaataaaaagtaagatgtataattattaaagttttccatcaaaaaataatttaaatgattatggaataacataatatttagagcagggcagataaatcagttgaacctgcttattttttatttattgtactctttttcctgttgctgttcttttctgcaggagagggaagacccctgatcctaaaatgaatgctaggacttacatggatgtaatgcgagaacaacacttgactaaagaagaacgagaaattaggcaacagctagcagaaaaagctaaagctggagaactaaaagtcgtcaatggagcagcagcgtcccagcctccatcaaaacgaaaacggcgttgggatcaaacagctgatcagactcctggtgccactcccaaaaaactatcaagttgggatcaggcagagacccctgggcatactccttccttaagatgggatgagacaccaggtcgtgcaaagggaagcgagactcctggagcaaccccaggctcaaaaatatgggatcctacacctagccacacaccagcgggagctgctactcctggacgaggtgatacaccaggccatgcgacaccaggccatggaggcgcaacttccagtgctcgtaaaaacagatgggatgaaacccccaaaacagagagagatactcctgggcatggaagtggatgggctgagactcctcgaacagatcgaggtggagattctattggtgaaacaccgactcctggagccagtaaaagaaaatcacggtgggatgaaacaccagctagtcagatgggtggaagcactccagttctgacccctggaaagacaccaattggcacaccagccatgaacatggctacccctactccaggtcacataatgagtatgactcctgaacagcttcaggcttggcggtgggaaagagaaattgatgagagaaatcgcccactttctgatgaggaattagatgctatgttcccagaaggatataaggtacttcctcctccagctggttatgttcctattcgaactccagctcgaaagctgacagctactccaacacctttgggtggtatgactggtttccacatgcaaactgaagatcgaactatgaaaagtgttaatgaccagccatctggaaatcttccatttttaaaacctgatgatattcaatactttgataaactattggttgatgttgatgaatcaacacttagtccagaagagcaaaaagagagaaaaataatgaagttgcttttaaaaattaagaatggaacaccaccaatgagaaaggctgcattgcgtcagattactgataaagctcgtgaatttggagctggtcctttgtttaatcagattcttcctctgctgatgtctcctacacttgaggatcaagagcgtcatttacttgtgaaagttattgataggatactgtacaaacttgatgacttagttcgtccatatgtgcataagatcctcgtggtcattgaaccgctattgattgatgaagattactatgctagagtggaaggccgagagatcatttctaatttggcaaaggctgctggtctggctactatgatctctaccatgagacctgatatagataacatggatgagtatgtccgtaacacaacagctagagcttttgctgttgtagcctctgccctgggcattccttctttattgcccttcttaaaagctgtgtgcaaaagcaagaagtcctggcaagcgagacacactggtattaagattgtacaacagatagctattcttatgggctgtgccatcttgccacatcttagaagtttagttgaaatcattgaacatggtcttgtggatgagcagcagaaagttcggaccatcagtgctttggccattgctgccttggctgaagcagcaactccttatggtatcgaatcttttgattctgtgttaaagcctttatggaagggtatccgccaacacagaggaaagggtttggctgctttcttgaaggctattgggtatcttattcctcttatggatgcagaatatgccaactactatactagagaagtgatgttaatccttattcgagaattccagtctcctgatgaggaaatgaaaaaaattgtgctgaaggtggtaaaacagtgttgtgggacagatggtgtagaagcaaactacattaaaacagagattcttcctcccttttttaaacacttctggcagcacaggatggctttggatagaagaaattaccgacagttagttgatactactgtggagttggcaaacaaagtaggtgcagcagaaattatatccaggattgtggatgatctgaaagatgaagccgaacagtacagaaaaatggtgatggagacaattgagaaaattatgggcaatttgggagcagcagatattgatcataaacttgaagaacaactgattgatggtattctttatgctttccaagaacagactacagaggactcagtaatgttgaacggctttggcacagtggttaatgctcttggcaaacgagtcaaaccatacttgcctcagatctgtggtacagttttgtggcgtttaaataacaaatctgctaaagttaggcaacaggcagctgacttgatttctcgaactgctgttgtcatgaagacttgtcaagaggaaaaattgatgggacacttgggtgttgtattgtatgagtatttgggtgaagagtaccctgaagtattgggcagcattcttggagcactgaaggccattgtaaatgtcataggtatgcataagatgactccaccaattaaagatctgctgcctagactcacccccatcttaaagaacagacatgaaaaagtacaagagaattgtattgatcttgttggtcgtattgctgacaggggagctgaatatgtatctgcaagagagtggatgaggatttgctttgagcttttagagctcttaaaagcccacaaaaaggctattcgtagagccacagtcaacacatttggttatattgcaaaggccattggccctcatgatgtattggctacacttctgaacaacctcaaagttcaagaaaggcagaacagagtttgtaccactgtagcaatagctattgttgcagaaacatgttcaccctttacagtactccctgccttaatgaatgaatacagagttcctgaactgaatgttcaaaatggagtgttaaaatcgctttccttcttgtttgaatatattggtgaaatgggaaaagactacatttatgccgtaacaccgttacttgaagatgctttaatggatagagaccttgtacacagacagacggctagtgcagtggtacagcacatgtcacttggggtttatggatttggttgtgaagattcgctgaatcacttgttgaactatgtatggcccaatgtgtttgagacatctcctcatgtaattcaggcagttatgggagccctagagggcctgagagttgctattggaccatgtagaatgttgcaatattgtttacagggtctgtttcacccagcccggaaagtcagagatgtatattggccaagaatctacaacgatgataagaacacctatattcgttatgaacttgactatatcttataattttattgtttattttgtgtttaatgcacagctacttcacaccttaaacttgctttgatttggtgatgtaaacttttaaacattgcagatcagtgtagaactggtcatagaggaagagctagaaatccagtagcatgatttttaaataacctgtctttgtttttgatgttaaacagtaaatgccagtagtgaccaagaacacagtgattatatacactatactggagggatttcatttttaattcatctttatgaagatttagaactcattccttgtgtttaaagggaatgtttaattgagaaataaacatttgtgtacaa

SEQ ID NO: 427448 - DNA, 1567 bp, Homo sapiens
ccgatccttatgagacagagtgtgcacattcggttatattgcaaaggcatggccctcatgatgtattggctacacttctgaacaacctcaaagttcaagaaaggcagaacagagtttgtaccactgtagcaatagctattgttgcagaaacatgttcaccctttacagtactccctgccttaatgaatgaatacagagttcctgaactgaatgttcaaaatggagtgttaaaatcgctttccttcttgtttgaatatattggtgaaatgggaaaagactacatttatgccgtaacaccgttacttgaagatgctttaatggatagagaccttgtacacagacagacggctagtgcagtggtacagcacatgtcacttggggtttatggatttggttgtgaagattcgctgaatcacttgttgaactatgtatggcccaatgtgtttgagacatctcctcatgtaattcaggcagttatgggagccctagagggcctgagagttgctattggaccatgtagaatgttgcaatattgtttacagggtctgtttcacccagcccggaaagtcagagatgtatattggaaaatttacaactccatctacattggttcccaggacgctctcatagcacattacccaagaatctacaacgatgataagaacacctatattcgttatgaacttgactatatcttataattttattgtttattttgtgtttaatgcacagctacttcacaccttaaacttgctttgatttggtgatgtaaacttttaaacattgcagatcagtgtagaactggtcatagaggaagagctagaaatccagtagcatgatttttaaataacctgtctttgtttttgatgttaaacagtaaatgccagtagtgaccaagaacacagtgattatatacactatactggagggatttcatttttaattcatctttatgaagatttagaactcattccttgtgtttaaagggaatgtttaattgagaaataaacatttgtgtacaaaatgctaaaaaaaccagacgaactgttagcaaaccaagcaacaccactcaacaaatataacccgtctacctcccttgaacatcatgctcacaagaagcccccccatcaaccctcacccacacacgccgtcccaaaccacgacccccccccgagcccggcccacacaccccccccccccgcgccccctccaccccccccccaacgcggcaagaccgcactccagcacaaactagcgaaccagcaaaaccacacccccccggcggcaccacaaacgcgccgaatcgaccgccacagccaacgcccctcagctcccgcacaccccatcgtgcgacagctcacacaccaacccacccccacgtccccacacgatgcgccacgcatacactttagacgatgatcactgaccgcgcacaacgcctccgcacgacccccaccactcatacacacccaccgcgcactaccccccacccacaccatcccaccacagaccccccagcgccaccccacccgcgcacacaccacccccaccccacactaccaccacc

SEQ ID NO: 427449 - DNA, 4080 bp, Homo sapiens
agcggaagttcttgggagcgccagttccgtctgtgtgttcgagtggacaaaatggcgaagatcgccaagactcacgaagatattgaagcacagattcgagaaattcaaggcaagaaggcagctcttgatgaagctcaaggagtgggcctcgattctacaggttattatgaccaggaaatttatggtggaagtgacagcagatttgctggatacgtgacatcaattgctgcaactgaacttgaagatgatgacgatgactattcatcatctacgagtttgcttggtcagaagaagccaggatatcatgcccctgtggcattgcttaatgatataccacagtcaacagaacagtatgatccatttgctgagcacagacctccaaagattgcagaccgggaagatgaatacaaaaagcataggcggaccatgataatttccccagagcgtcttgatccttttgcagatggcttctattctgctgcttgaagtcagaactgctgatggagacaaaggcacgaaagtgtacgtattccggattagcaacccaggaacccatcacttctgaagactctaaactgtgctgtcattttgtttttatatgcattaaaatatttgttttaaactgctgtagatgtttgtgttcaaacaggttaaattgatcagcaaactcaataaaaagtaagatgtataattattaaagttttccatcaaaaaataatttaaatgattatggaataacataatatttagagcagggcagataaatcagttgaacctgcttattttttatttattgtactctttttcctgttgctgttcttttctgcaggagagggaagacccctgatcctaaaatgaatgctaggacttacatggatgtaatgcgagaacaacacttgactaaagaagaacgagaaattaggcaacagctagcagaaaaagctaaagctggagaactaaaagtcgtcaatggagcagcagcgtcccagcctccatcaaaacgaaaacggcgttgggatcaaacagctgatcagactcctggtgccactcccaaaaaactatcaagttgggatcaggcagagacccctgggcatactccttccttaagatgggatgagacaccaggtcgtgcaaagggaagcgagactcctggagcaaccccaggctcaaaaatatgggatcctacacctagccacacaccagcgggagctgctactcctggacgaggtgatacaccaggccatgcgacaccaggccatggaggcgcaacttccagtgctcgtaaaaacagatgggatgaaacccccaaaacagagagagatactcctgggcatggaagtggatgggctgagactcctcgaacagatcgaggtggagattctattggtgaaacaccgactcctggagccagtaaaagaaaatcacggtgggatgaaacaccagctagtcagatgggtggaagcactccagttctgacccctggaaagacaccaattggcacaccagccatgaacatggctacccctactccaggtcacataatgagtatgactcctgaacagcttcaggcttggcggtgggaaagagaaattgatgagagaaatcgcccactttctgatgaggaattagatgctatgttcccagaaggatataaggtacttcctcctccagctggttatgttcctattcgaactccagctcgaaagctgacagctactccaacacctttgggtggtatgactggtttccacatgcaaactgaagatcgaactatgaaaagtgttaatgaccagccatctggaaatcttccatttttaaaacctgatgatattcaatactttgataaactattggttgatgttgatgaatcaacacttagtccagaagagcaaaaagagagaaaaataatgaagttgcttttaaaaattaagaatggaacaccaccaatgagaaaggctgcattgcgtcagattactgataaagctcgtgaatttggagctggtcctttgtttaatcagattcttcctctgctgatgtctcctacacttgaggatcaagagcgtcatttacttgtgaaagttattgataggatactgtacaaacttgatgacttagttcgtccatatgtgcataagatcctcgtggtcattgaaccgctattgattgatgaagattactatgctagagtggaaggccgagagatcatttctaatttggcaaaggctgctggtctggctactatgatctctaccatgagacctgatatagataacatggatgagtatgtccgtaacacaacagctagagcttttgctgttgtagcctctgccctgggcattccttctttattgcccttcttaaaagctgtgtgcaaaagcaagaagtcctggcaagcgagacacactggtattaagattgtacaacagatagctattcttatgggctgtgccatcttgccacatcttagaagtttagttgaaatcattgaacatggtcttgtggatgagcagcagaaagttcggaccatcagtgctttggccattgctgccttggctgaagcagcaactccttatggtatcgaatcttttgattctgtgttaaagcctttatggaagggtatccgccaacacagaggaaagggtttggctgctttcttgaaggctattgggtatcttattcctcttatggatgcagaatatgccaactactatactagagaagtgatgttaatccttattcgagaattccagtctcctgatgaggaaatgaaaaaaattgtgctgaaggtggtaaaacagtgttgtgggacagatggtgtagaagcaaactacattaaaacagagattcttcctcccttttttaaacacttctggcagcacaggatggctttggatagaagaaattaccgacagttagttgatactactgtggagttggcaaacaaagtaggtgcagcagaaattatatccaggattgtggatgatctgaaagatgaagccgaacagtacagaaaaatggtgatggagacaattgagaaaattatgggcaatttgggagcagcagatattgatcataaacttgaagaacaactgattgatggtattctttatgctttccaagaacagactacagaggactcagtaatgttgaacggctttggcacagtggttaatgctcttggcaaacgagtcaaaccatacttgcctcagatctgtggtacagttttgtggcgtttaaataacaaatctgctaaagttaggcaacaggcagctgacttgatttctcgaactgctgttgtcatgaagacttgtcaagaggaaaaattgatgggacacttgggtgttgtattgtatgagtatttgggtgaagagtaccctgaagtattgggcagcattcttggagcactgaaggccattgtaaatgtcataggtatggaatttgctggttacataagactttttcttgttttaactttctttttcttttttttttcgtaagtaaaatcttatttaggagttgggaggtttttgttagctttttaaaagcacttcaagattgtagttaagtcgggggatgtcacaaaagtcttgtttcccaaaacccatttatattttactttaaagagaaaaaaagggtaagtttaggacctacatgagaggtgggagtagtcacagctcaaaaagctttgaagtcatggaatacaggaccctagtagaaatagtgtgtcaggtgaaatatattctgccatgttctgctgcggggtgaaaaggcaatcctaaagttttaatttagttttagaacaatatatatatatttaaaccttgaattagcgattatgacaggttttttgcttgtgatcagtttcaaggaatataatcagagaaaagtgaactgatcaaattattgtctttatttacatacccaagttttaaatactgtccattcagttttctaacccgtaatacagctatattacaaatggtcttggatatggagagcaaagtttttattccattagggcagtatgaagaaaacaaatggtttcttatatttaatcttttttttaaattgattataact

SEQ ID NO: 427450 - DNA, 1717 bp, Homo sapiens
agcggaagttcttgggagcgccagttccgtctgtgtgttcgagtggacaaaatggcgaagatcgccaagactcacgaagatattgaagcacagattcgagaaattcaaggcaagaaggcagctcttgatgaagctcaaggagtgggcctcgattctacaggttattatgaccaggaaatttatggtggaagtgacagcagatttgctggatacgtgacatcaattgctgcaactgaacttgaagatgatgacgatgactattcatcatctacgagtttgcttggtcagaagaagccaggatatcatgcccctgtggcattgcttaatgatataccacagtcaacagaacagtatgatccatttgctgagcacagacctccaaagattgcagaccgggaagatgaatacaaaaagcataggcggaccatgataatttccccagagcgtcttgatccttttgcagatggcttctattctgctgcttgaagtcagaactgctgatggagacaaaggcacgaaagtgtacgtattccggattagcaacccaggaacccatcacttctgaagactctaaactgtgctgtcattttgtttttatatgcattaaaatatttgttttaaactgctgtagatgtttgtgttcaaacaggttaaattgatcagcaaactcaataaaaagtaagatgtataattattaaagttttccatcaaaaaataatttaaatgattatggaataacataatatttagagcagggcagataaatcagttgaacctgcttattttttatttattgtactctttttcctgttgctgttcttttctgcaggagagggaagacccctgatcctaaaatgaatgctaggacttacatggatgtaatgcgagaacaacacttgactaaagaagaacgagaaattaggcaacagctagcagaaaaagctaaagctggagaactaaaagtcgtcaatggagcagcagcgtcccagcctccatcaaaacgaaaacggcgttgggatcaaacagctgatcagactcctggtgccactcccaaaaaactatcaagttgggatcaggcagagacccctgggcatactccttccttaagatgggatgagacaccaggtcgtgcaaagggaagcgagactcctggagcaaccccaggctcaaaaatatgggatcctacacctagccacacaccagcgggagctgctactcctggacgaggtgatacaccaggccatgcgacaccaggccatggaggcgcaacttccagtgctcgtaaaaacagatgggatgaaacccccaaaacagagagagatactcctgggcatggaagtggatgggctgagactcctcgaacagatcgaggtggagattctattggtgaaacaccgactcctggagccagtaaaagaaaatcacggtgggatgaaacaccagctagtcagatgggtggaagcactccagttctgacccctggaaagacaccaattggcacaccagccatgaacatggctacccctactccaggtcacataatgagtatgactcctgaacagcttcaggcttggcggtgggaaagagaaattgatgagagaaatcgcccactttctgatgaggaattagatgctatgttcccagaaggatataaggtagtacatcaaatttgaatgaggtggtatttaggatatacatttattttaaatagtgaaaa

SEQ ID NO: 427451 - DNA, 622 bp, Homo sapiens
atgggctgagactcctcgaacagatcgaggtggagattctattggtgaaacaccgactcctggagccagtaaaagaaaatcacggtgggatgaaacaccagctagtcagatgggtggaagcactccagttctgacccctggaaagacaccaattggcacaccagccatgaacatggctacccctactccaggtagaactgtctcattggacataattgtttttttctccataaattatttaattttttcctttgtggtattctgtgtactattaatgtcaacttctagtaagaataaggagatatacaaatttaagtcttggtttgcgtttataatataaaagcaaataataggattgatcttaactgtcttttatctcaatgtatgtaataatacagtcttgtactatagattatataaaaatttgcttttcttggtaggtcacataatgagtatgactcctgaacagcttcaggcttggcggtgggaaagagaaattgatgagagaaatcgcccactttctgatgaggaattagatgctatgttcccagaaggatataaggtagtacatcaaatttgaatgaggtggtatttaggatatacatttattttaaatagtgaa

SEQ ID NO: 427452 - DNA, 4769 bp, Homo sapiens
ctgccgccgccgccccccagaggcgccggagcccggaatcccgctcggagccagccagccgtcccgagctaccagcaggtttcattgaaaacagatcctgcaaaagttccaggtgcccacactggaaacttggagatcctgcttcccagaccacagctgtggggaacttggggtggagcagagaagtttctgtattcagctgcccaggcagaggagaatggggtctccacagcctgaagaatgaagacacgacagaataaagactcgatgtcaatgaggagtggacggaagaaagaggcccctgggccccgggaagaactgagatcgaggggccgggcctcccctggaggggtcagcacgtccagcagtgatggcaaagctgagaagtccaggcagacagccaagaaggcccgagtagaggaagcctccaccccaaaggtcaacaagcagggtcggagtgaggagatctcagagagtgaaagtgaggagaccaatgcaccaaaaaagaccaaaactgagcaggaactccctcggccacagtctccctccgatctggatagcttggacgggcggagccttaatgatgatggcagcagcgaccctagggatatcgaccaggacaaccgaagcacgtcccccagtatctacagccctggaagtgtggagaatgactctgactcatcttctggcctgtcccagggcccagcccgcccctaccacccacctccactctttcctccttcccctcaaccgccagacagcacccctcgacagccagaggctagctttgaaccccatccttctgtgacacccactggatatcatgctcccatggagccccccacatctcgaatgttccaggctcctcctggggcccctccccctcacccacagctctatcctgggggcactggtggagttttgtctggacccccaatgggtcccaaggggggaggggctgcctcatcagtggggggccctaatgggggtaagcagcaccccccacccactactcccatttcagtatcaagctctggggctagtggtgctcccccaacaaagccgcctaccactccagtgggtggtgggaacctaccttctgctccaccaccagccaacttcccccatgtgacaccgaacctgcctcccccacctgccctgagacccctcaacaatgcatcagcctctccccctggcctgggggcccaaccactacctggtcatctgccctctccccacgccatgggacagggtatgggtggacttcctcctggcccagagaagggcccaactctggctccttcaccccactctctgcctcctgcttcctcttctgctccagcgccccccatgaggtttccttattcatcctctagtagtagctctgcagcagcctcctcttccagttcttcctcctcttcctctgcctcccccttcccagcttcccaggcattgcccagctacccccactctttccctcccccaacaagcctctctgtctccaatcagccccccaagtatactcagccttctctcccatcccaggctgtgtggagccagggtcccccaccacctcctccctatggccgcctcttagccaacagcaatgcccatccaggccccttccctccctctactggggcccagtccaccgcccacccaccagtctcaacacatcaccatcaccaccagcaacagcaacagcagcagcagcagcagcagcagcagcagcagcagcagcagcatcacggaaactctgggccccctcctcctggagcatttccccacccactggagggcggtagctcccaccacgcacacccttacgccatgtctccctccctggggtctctgaggccctacccaccagggccagcacacctgcccccacctcacagccaggtgtcctacagccaagcaggccccaatggccctccagtctcttcctcttccaactcttcctcttccacttctcaagggtcctacccatgttcacacccctccccttcccagggccctcaaggggcgccctaccctttcccaccggtgcctacggtcaccacctcttcggctaccctttccacggtcattgccaccgtggcttcctcgccagcaggctacaaaacggcctccccacctgggcccccaccgtacggaaagagagccccgtccccgggggcctacaagacagccaccccacccggatacaaacccgggtcgcctccctccttccgaacggggaccccaccgggctatcgaggaacctcgccacctgcaggcccagggaccttcaagccgggctcgcccaccgtgggacctgggcccctgccacctgcggggccctcaggcctgccatcgctgccaccaccacctgcggcccctgcctcagggccgcccctgagcgccacgcagatcaaacaggagccggctgaggagtatgagacccccgagagcccggtgcccccagcccgcagcccctcgccccctcccaaggtggtagatgtacccagccatgccagtcagtctgccaggttcaacaaacacctggatcgcggcttcaactcgtgcgcgcgcagcgacctgtacttcgtgccactggagggctccaagctggccaagaagcgggccgacctggtggagaaggtgcggcgcgaggccgagcagcgcgcgcgcgaagaaaaggagcgcgagcgcgagcgggaacgcgagaaagagcgcgagcgcgagaaggagcgcgagcttgaacgcagcgtgaagttggctcaggagggccgtgctccggtggaatgcccatctctgggcccagtgccccatcgccctccatttgaaccgggcagtgcggtggctacagtgcccccctacctgggtcctgacactccagccttgcgcactctcagtgaatatgcccggcctcatgtcatgtctcctggcaatcgcaaccatccattctacgtgcccctgggggcagtggacccggggctcctgggttacaatgtcccggccctgtacagcagtgatccagctgcccgggagagggaacgggaagcccgtgaacgagacctccgtgaccgcctcaagcctggctttgaggtgaagcctagtgagctggaacccctacatggggtccctgggccgggcttggatccctttccccgacatgggggcctggctctgcagcctggcccacctggcctgcaccctttcccctttcatccgagcctggggcccctggagcgagaacgtctagcgctggcagctgggccagccctgcggcctgacatgtcctatgctgagcggctggcagctgagaggcagcacgcagaaagggtggcggccctgggcaatgacccactggcccggctgcagatgctcaatgtgactccccatcaccaccagcactcccacatccactcgcacctgcacctgcaccagcaagatgctatccatgcagcctctgcctcggtgcaccctctcattgaccccctggcctcagggtctcaccttacccggatcccctacccagctggaactctccctaaccccctgcttcctcaccctctgcacgagaacgaagttcttcgtcaccagctctttgctgccccttaccgggacctgccggcctccctttctgccccgatgtcagcagctcatcagctgcaggccatgcacgcacagtcagctgagctgcagcgcttggcgctggaacagcagcagtggctgcatgcccatcacccgctgcacagtgtgccgctgcctgcccaggaggactactacagtcacctgaagaaggaaagcgacaagccactgtagaacctgcgatcaagagagcaccatggctcctacattggaccttggagcacccccaccctccccccaccgtgcccttggcctgccacccagagccaagagggtgctgctcagttgcagggcctccgcagctggacagagagtgggggagggagggacagacagaaggccaaggcccgatgtggtgtgcagaggtggggaggtggcgaggatggggacagaaagcgcacagaatcttggaccaggtctctcttccttgtcccccctgcttttctcctcccccatgcccaacccctgtggccgccgcccctcccctgccccgttggtgtgattatttcatctgttagatgtggctgttttgcgtagcatcgtgtgccacccctgcccctccccgatccctgtgtgcgcgccccctctgcaatgtatgccccttgccccttccccacactaataatttatatatataaatatctatatgacgctcttaaaaaaacatcccaaccaaaaccaaccaaacaaaaacatcctcacaactccccaggaaaaaaaaaaaaaactcgaggttaaagcagcagtgccaataatgagacccagctgggaaggactcggtgatacccactgggatcttttatcctttgttgcaaaagtgtggacacttttgacagcttggcagattttaactccagaagcactttatgaaatggtacactgactaatccagaagacatttccaacagtttgccagtggttcctcactacactggtactgaaagtgtaatttcttagagccaaaaaactggagaaacaaatatcctgccacctctaacaagtacatgagtacttgatttttatggtatagagcagagccttttcttcctcttcttgatagatgaggccatggtgtaaatggaagtttcagagaggacaaaataaaacggaattccatttttctctcactgtaa

SEQ ID NO: 427453 - DNA, 4766 bp, Homo sapiens
gacgccatactggacgccaagtgggaggaacttcaaggctgtcccctgcgggcctcccgctctgcttctgcgaaggtttcattgaaaacagatcctgcaaaagttccaggtgcccacactggaaacttggagatcctgcttcccagaccacagctgtggggaacttggggtggagcagagaagtttctgtattcagctgcccaggcagaggagaatggggtctccacagcctgaagaatgaagacacgacagaataaagactcgatgtcaatgaggagtggacggaagaaagaggcccctgggccccgggaagaactgagatcgaggggccgggcctcccctggaggggtcagcacgtccagcagtgatggcaaagctgagaagtccaggcagacagccaagaaggcccgagtagaggaagcctccaccccaaaggtcaacaagcagggtcggagtgaggagatctcagagagtgaaagtgaggagaccaatgcaccaaaaaagaccaaaactgagcaggaactccctcggccacagtctccctccgatctggatagcttggacgggcggagccttaatgatgatggcagcagcgaccctagggatatcgaccaggacaaccgaagcacgtcccccagtatctacagccctggaagtgtggagaatgactctgactcatcttctggcctgtcccagggcccagcccgcccctaccacccacctccactctttcctccttcccctcaaccgccagacagcacccctcgacagccagaggctagctttgaaccccatccttctgtgacacccactggatatcatgctcccatggagccccccacatctcgaatgttccaggctcctcctggggcccctccccctcacccacagctctatcctgggggcactggtggagttttgtctggacccccaatgggtcccaaggggggaggggctgcctcatcagtggggggccctaatgggggtaagcagcaccccccacccactactcccatttcagtatcaagctctggggctagtggtgctcccccaacaaagccgcctaccactccagtgggtggtgggaacctaccttctgctccaccaccagccaacttcccccatgtgacaccgaacctgcctcccccacctgccctgagacccctcaacaatgcatcagcctctccccctggcctgggggcccaaccactacctggtcatctgccctctccccacgccatgggacagggtatgggtggacttcctcctggcccagagaagggcccaactctggctccttcaccccactctctgcctcctgcttcctcttctgctccagcgccccccatgaggtttccttattcatcctctagtagtagctctgcagcagcctcctcttccagttcttcctcctcttcctctgcctcccccttcccagcttcccaggcattgcccagctacccccactctttccctcccccaacaagcctctctgtctccaatcagccccccaagtatactcagccttctctcccatcccaggctgtgtggagccagggtcccccaccacctcctccctatggccgcctcttagccaacagcaatgcccatccaggccccttccctccctctactggggcccagtccaccgcccacccaccagtctcaacacatcaccatcaccaccagcaacagcaacagcagcagcagcagcagcagcagcagcagcagcagcagcagcatcacggaaactctgggccccctcctcctggagcatttccccacccactggagggcggtagctcccaccacgcacacccttacgccatgtctccctccctggggtctctgaggccctacccaccagggccagcacacctgcccccacctcacagccaggtgtcctacagccaagcaggccccaatggccctccagtctcttcctcttccaactcttcctcttccacttctcaagggtcctacccatgttcacacccctccccttcccagggccctcaaggggcgccctaccctttcccaccggtgcctacggtcaccacctcttcggctaccctttccacggtcattgccaccgtggcttcctcgccagcaggctacaaaacggcctccccacctgggcccccaccgtacggaaagagagccccgtccccgggggcctacaagacagccaccccacccggatacaaacccgggtcgcctccctccttccgaacggggaccccaccgggctatcgaggaacctcgccacctgcaggcccagggaccttcaagccgggctcgcccaccgtgggacctgggcccctgccacctgcggggccctcaggcctgccatcgctgccaccaccacctgcggcccctgcctcagggccgcccctgagcgccacgcagatcaaacaggagccggctgaggagtatgagacccccgagagcccggtgcccccagcccgcagcccctcgccccctcccaaggtggtagatgtacccagccatgccagtcagtctgccaggttcaacaaacacctggatcgcggcttcaactcgtgcgcgcgcagcgacctgtacttcgtgccactggagggctccaagctggccaagaagcgggccgacctggtggagaaggtgcggcgcgaggccgagcagcgcgcgcgcgaagaaaaggagcgcgagcgcgagcgggaacgcgagaaagagcgcgagcgcgagaaggagcgcgagcttgaacgcagcgtgaagttggctcaggagggccgtgctccggtggaatgcccatctctgggcccagtgccccatcgccctccatttgaaccgggcagtgcggtggctacagtgcccccctacctgggtcctgacactccagccttgcgcactctcagtgaatatgcccggcctcatgtcatgtctcctggcaatcgcaaccatccattctacgtgcccctgggggcagtggacccggggctcctgggttacaatgtcccggccctgtacagcagtgatccagctgcccgggagagggaacgggaagcccgtgaacgagacctccgtgaccgcctcaagcctggctttgaggtgaagcctagtgagctggaacccctacatggggtccctgggccgggcttggatccctttccccgacatgggggcctggctctgcagcctggcccacctggcctgcaccctttcccctttcatccgagcctggggcccctggagcgagaacgtctagcgctggcagctgggccagccctgcggcctgacatgtcctatgctgagcggctggcagctgagaggcagcacgcagaaagggtggcggccctgggcaatgacccactggcccggctgcagatgctcaatgtgactccccatcaccaccagcactcccacatccactcgcacctgcacctgcaccagcaagatgctatccatgcagcctctgcctcggtgcaccctctcattgaccccctggcctcagggtctcaccttacccggatcccctacccagctggaactctccctaaccccctgcttcctcaccctctgcacgagaacgaagttcttcgtcaccagctctttgctgccccttaccgggacctgccggcctccctttctgccccgatgtcagcagctcatcagctgcaggccatgcacgcacagtcagctgagctgcagcgcttggcgctggaacagcagcagtggctgcatgcccatcacccgctgcacagtgtgccgctgcctgcccaggaggactactacagtcacctgaagaaggaaagcgacaagccactgtagaacctgcgatcaagagagcaccatggctcctacattggaccttggagcacccccaccctccccccaccgtgcccttggcctgccacccagagccaagagggtgctgctcagttgcagggcctccgcagctggacagagagtgggggagggagggacagacagaaggccaaggcccgatgtggtgtgcagaggtggggaggtggcgaggatggggacagaaagcgcacagaatcttggaccaggtctctcttccttgtcccccctgcttttctcctcccccatgcccaacccctgtggccgccgcccctcccctgccccgttggtgtgattatttcatctgttagatgtggctgttttgcgtagcatcgtgtgccacccctgcccctccccgatccctgtgtgcgcgccccctctgcaatgtatgccccttgccccttccccacactaataatttatatatataaatatctatatgacgctcttaaaaaaacatcccaaccaaaaccaaccaaacaaaaacatcctcacaactccccaggaaaaaaaaaaaaaactcgaggttaaagcagcagtgccaataatgagacccagctgggaaggactcggtgatacccactgggatcttttatcctttgttgcaaaagtgtggacacttttgacagcttggcagattttaactccagaagcactttatgaaatggtacactgactaatccagaagacatttccaacagtttgccagtggttcctcactacactggtactgaaagtgtaatttcttagagccaaaaaactggagaaacaaatatcctgccacctctaacaagtacatgagtacttgatttttatggtatagagcagagccttttcttcctcttcttgatagatgaggccatggtgtaaatggaagtttcagagaggacaaaataaaacggaattccatttttctctcactgtaa

SEQ ID NO: 427454 - DNA, 5052 bp, Homo sapiens
ctgccgccgccgccccccagaggcgccggagcccggaatcccgctcggagccagccagccgtcccgagctaccagcaggtttcattgaaaacagatcctgcaaaagttccaggtgcccacactggaaacttggagatcctgcttcccagaccacagctgtggggaacttggggtggagcagagaagtttctgtattcagctgcccaggcagaggagaatggggtctccacagcctgaagaatgaagacacgacagaataaagactcgatgtcaatgaggagtggacggaagaaagaggcccctgggccccgggaagaactgagatcgaggggccgggcctcccctggaggggtcagcacgtccagcagtgatggcaaagctgagaagtccaggcagacagccaagaaggcccgagtagaggaagcctccaccccaaaggtcaacaagcagggtcggagtgaggagatctcagagagtgaaagtgaggagaccaatgcaccaaaaaagaccaaaactgagcaggaactccctcggccacagtctccctccgatctggatagcttggacgggcggagccttaatgatgatggcagcagcgaccctagggatatcgaccaggacaaccgaagcacgtcccccagtatctacagccctggaagtgtggagaatgactctgactcatcttctggcctgtcccagggcccagcccgcccctaccacccacctccactctttcctccttcccctcaaccgccagacagcacccctcgacagccagaggctagctttgaaccccatccttctgtgacacccactggatatcatgctcccatggagccccccacatctcgaatgttccaggctcctcctggggcccctccccctcacccacagctctatcctgggggcactggtggagttttgtctggacccccaatgggtcccaaggggggaggggctgcctcatcagtggggggccctaatgggggtaagcagcaccccccacccactactcccatttcagtatcaagctctggggctagtggtgctcccccaacaaagccgcctaccactccagtgggtggtgggaacctaccttctgctccaccaccagccaacttcccccatgtgacaccgaacctgcctcccccacctgccctgagacccctcaacaatgcatcagcctctccccctggcctgggggcccaaccactacctggtcatctgccctctccccacgccatgggacagggtatgggtggacttcctcctggcccagagaagggcccaactctggctccttcaccccactctctgcctcctgcttcctcttctgctccagcgccccccatgaggtttccttattcatcctctagtagtagctctgcagcagcctcctcttccagttcttcctcctcttcctctgcctcccccttcccagcttcccaggcattgcccagctacccccactctttccctcccccaacaagcctctctgtctccaatcagccccccaagtatactcagccttctctcccatcccaggctgtgtggagccagggtcccccaccacctcctccctatggccgcctcttagccaacagcaatgcccatccaggccccttccctccctctactggggcccagtccaccgcccacccaccagtctcaacacatcaccatcaccaccagcaacagcaacagcagcagcagcagcagcagcagcagcagcagcagcagcagcatcacggaaactctgggccccctcctcctggagcatttccccacccactggagggcggtagctcccaccacgcacacccttacgccatgtctccctccctggggtctctgaggccctacccaccagggccagcacacctgcccccacctcacagccaggtgtcctacagccaagcaggccccaatggccctccagtctcttcctcttccaactcttcctcttccacttctcaagggtcctacccatgttcacacccctccccttcccagggccctcaaggggcgccctaccctttcccaccggtgcctacggtcaccacctcttcggctaccctttccacggtcattgccaccgtggcttcctcgccagcaggctacaaaacggcctccccacctgggcccccaccgtacggaaagagagccccgtccccgggggcctacaagacagccaccccacccggatacaaacccgggtcgcctccctccttccgaacggggaccccaccgggctatcgaggaacctcgccacctgcaggcccagggaccttcaagccgggctcgcccaccgtgggacctgggcccctgccacctgcggggccctcaggcctgccatcgctgccaccaccacctgcggcccctgcctcagggccgcccctgagcgccacgcagatcaaacaggagccggctgaggagtatgagacccccgagagcccggtgcccccagcccgcagcccctcgccccctcccaaggtggtagatgtacccagccatgccagtcagtctgccaggtgagcggccaggtggggcggaggtgggcctggaaaggggacgacgacaaggcggcgacgagagagggagtagcagggaggggccttgcgctggtgtagtgttttagaaaagcacgcccctctcctccgtccaggcctagtggccagtgaggcccgcagcagctcacagcctgcaggggtggttttgaggcgggggctacaagcactcgccggggccgcggcgctgcgggctccatcgggcagctcgcaccgcctgagcgcccgctgcttccacgcccggcaggttcaacaaacacctggatcgcggcttcaactcgtgcgcgcgcagcgacctgtacttcgtgccactggagggctccaagctggccaagaagcgggccgacctggtggagaaggtgcggcgcgaggccgagcagcgcgcgcgcgaagaaaaggagcgcgagcgcgagcgggaacgcgagaaagagcgcgagcgcgagaaggagcgcgagcttgaacgcagcgtgaagttggctcaggagggccgtgctccggtggaatgcccatctctgggcccagtgccccatcgccctccatttgaaccgggcagtgcggtggctacagtgcccccctacctgggtcctgacactccagccttgcgcactctcagtgaatatgcccggcctcatgtcatgtctcctggcaatcgcaaccatccattctacgtgcccctgggggcagtggacccggggctcctgggttacaatgtcccggccctgtacagcagtgatccagctgcccgggagagggaacgggaagcccgtgaacgagacctccgtgaccgcctcaagcctggctttgaggtgaagcctagtgagctggaacccctacatggggtccctgggccgggcttggatccctttccccgacatgggggcctggctctgcagcctggcccacctggcctgcaccctttcccctttcatccgagcctggggcccctggagcgagaacgtctagcgctggcagctgggccagccctgcggcctgacatgtcctatgctgagcggctggcagctgagaggcagcacgcagaaagggtggcggccctgggcaatgacccactggcccggctgcagatgctcaatgtgactccccatcaccaccagcactcccacatccactcgcacctgcacctgcaccagcaagatgctatccatgcagcctctgcctcggtgcaccctctcattgaccccctggcctcagggtctcaccttacccggatcccctacccagctggaactctccctaaccccctgcttcctcaccctctgcacgagaacgaagttcttcgtcaccagctctttgctgccccttaccgggacctgccggcctccctttctgccccgatgtcagcagctcatcagctgcaggccatgcacgcacagtcagctgagctgcagcgcttggcgctggaacagcagcagtggctgcatgcccatcacccgctgcacagtgtgccgctgcctgcccaggaggactactacagtcacctgaagaaggaaagcgacaagccactgtagaacctgcgatcaagagagcaccatggctcctacattggaccttggagcacccccaccctccccccaccgtgcccttggcctgccacccagagccaagagggtgctgctcagttgcagggcctccgcagctggacagagagtgggggagggagggacagacagaaggccaaggcccgatgtggtgtgcagaggtggggaggtggcgaggatggggacagaaagcgcacagaatcttggaccaggtctctcttccttgtcccccctgcttttctcctcccccatgcccaacccctgtggccgccgcccctcccctgccccgttggtgtgattatttcatctgttagatgtggctgttttgcgtagcatcgtgtgccacccctgcccctccccgatccctgtgtgcgcgccccctctgcaatgtatgccccttgccccttccccacactaataatttatatatataaatatctatatgacgctcttaaaaaaacatcccaaccaaaaccaaccaaacaaaaacatcctcacaactccccaggaaaaaaaaaaaaaactcgaggttaaagcagcagtgccaataatgagacccagctgggaaggactcggtgatacccactgggatcttttatcctttgttgcaaaagtgtggacacttttgacagcttggcagattttaactccagaagcactttatgaaatggtacactgactaatccagaagacatttccaacagtttgccagtggttcctcactacactggtactgaaagtgtaatttcttagagccaaaaaactggagaaacaaatatcctgccacctctaacaagtacatgagtacttgatttttatggtatagagcagagccttttcttcctcttcttgatagatgaggccatggtgtaaatggaagtttcagagaggacaaaataaaacggaattccatttttctctcactgtaa

SEQ ID NO: 427455 - DNA, 5034 bp, Homo sapiens
ctgccgccgccgccccccagaggcgccggagcccggaatcccgctcggagccagccagccgtcccgagctaccagcaggtttcattgaaaacagatcctgcaaaagttccaggtgcccacactggaaacttggagatcctgcttcccagaccacagctgtggggaacttggggtggagcagagaagtttctgtattcagctgcccaggcagaggagaatggggtctccacagcctgaagaatgaagacacgacagaataaagactcgatgtcaatgaggagtggacggaagaaagaggcccctgggccccgggaagaactgagatcgaggggccgggcctcccctggaggggtcagcacgtccagcagtgatggcaaagctgagaagtccaggcagacagccaagaaggcccgagtagaggaagcctccaccccaaaggtcaacaagcagggtcggagtgaggagatctcagagagtgaaagtgaggagaccaatgcaccaaaaaagaccaaaactgagcaggaactccctcggccacagtctccctccgatctggatagcttggacgggcggagccttaatgatgatggcagcagcgaccctagggatatcgaccaggacaaccgaagcacgtcccccagtatctacagccctggaagtgtggagaatgactctgactcatcttctggcctgtcccagggcccagcccgcccctaccacccacctccactctttcctccttcccctcaaccgccagacagcacccctcgacagccagaggctagctttgaaccccatccttctgtgacacccactggatatcatgctcccatggagccccccacatctcgaatgttccaggctcctcctggggcccctccccctcacccacagctctatcctgggggcactggtggagttttgtctggacccccaatgggtcccaaggggggaggggctgcctcatcagtggggggccctaatgggggtaagcagcaccccccacccactactcccatttcagtatcaagctctggggctagtggtgctcccccaacaaagccgcctaccactccagtgggtggtgggaacctaccttctgctccaccaccagccaacttcccccatgtgacaccgaacctgcctcccccacctgccctgagacccctcaacaatgcatcagcctctccccctggcctgggggcccaaccactacctggtcatctgccctctccccacgccatgggacagggtatgggtggacttcctcctggcccagagaagggcccaactctggctccttcaccccactctctgcctcctgcttcctcttctgctccagcgccccccatgaggtttccttattcatcctctagtagtagctctgcagcagcctcctcttccagttcttcctcctcttcctctgcctcccccttcccagcttcccaggcattgcccagctacccccactctttccctcccccaacaagcctctctgtctccaatcagccccccaagtatactcagccttctctcccatcccaggctgtgtggagccagggtcccccaccacctcctccctatggccgcctcttagccaacagcaatgcccatccaggccccttccctccctctactggggcccagtccaccgcccacccaccagtctcaacacatcaccatcaccaccagcaacagcaacagcagcagcagcagcagcagcagcatcacggaaactctgggccccctcctcctggagcatttccccacccactggagggcggtagctcccaccacgcacacccttacgccatgtctccctccctggggtctctgaggccctacccaccagggccagcacacctgcccccacctcacagccaggtgtcctacagccaagcaggccccaatggccctccagtctcttcctcttccaactcttcctcttccacttctcaagggtcctacccatgttcacacccctccccttcccagggccctcaaggggcgccctaccctttcccaccggtgcctacggtcaccacctcttcggctaccctttccacggtcattgccaccgtggcttcctcgccagcaggctacaaaacggcctccccacctgggcccccaccgtacggaaagagagccccgtccccgggggcctacaagacagccaccccacccggatacaaacccgggtcgcctccctccttccgaacggggaccccaccgggctatcgaggaacctcgccacctgcaggcccagggaccttcaagccgggctcgcccaccgtgggacctgggcccctgccacctgcggggccctcaggcctgccatcgctgccaccaccacctgcggcccctgcctcagggccgcccctgagcgccacgcagatcaaacaggagccggctgaggagtatgagacccccgagagcccggtgcccccagcccgcagcccctcgccccctcccaaggtggtagatgtacccagccatgccagtcagtctgccaggtgagcggccaggtggggcggaggtgggcctggaaaggggacgacgacaaggcggcgacgagagagggagtagcagggaggggccttgcgctggtgtagtgttttagaaaagcacgcccctctcctccgtccaggcctagtggccagtgaggcccgcagcagctcacagcctgcaggggtggttttgaggcgggggctacaagcactcgccggggccgcggcgctgcgggctccatcgggcagctcgcaccgcctgagcgcccgctgcttccacgcccggcaggttcaacaaacacctggatcgcggcttcaactcgtgcgcgcgcagcgacctgtacttcgtgccactggagggctccaagctggccaagaagcgggccgacctggtggagaaggtgcggcgcgaggccgagcagcgcgcgcgcgaagaaaaggagcgcgagcgcgagcgggaacgcgagaaagagcgcgagcgcgagaaggagcgcgagcttgaacgcagcgtgaagttggctcaggagggccgtgctccggtggaatgcccatctctgggcccagtgccccatcgccctccatttgaaccgggcagtgcggtggctacagtgcccccctacctgggtcctgacactccagccttgcgcactctcagtgaatatgcccggcctcatgtcatgtctcctggcaatcgcaaccatccattctacgtgcccctgggggcagtggacccggggctcctgggttacaatgtcccggccctgtacagcagtgatccagctgcccgggagagggaacgggaagcccgtgaacgagacctccgtgaccgcctcaagcctggctttgaggtgaagcctagtgagctggaacccctacatggggtccctgggccgggcttggatccctttccccgacatgggggcctggctctgcagcctggcccacctggcctgcaccctttcccctttcatccgagcctggggcccctggagcgagaacgtctagcgctggcagctgggccagccctgcggcctgacatgtcctatgctgagcggctggcagctgagaggcagcacgcagaaagggtggcggccctgggcaatgacccactggcccggctgcagatgctcaatgtgactccccatcaccaccagcactcccacatccactcgcacctgcacctgcaccagcaagatgctatccatgcagcctctgcctcggtgcaccctctcattgaccccctggcctcagggtctcaccttacccggatcccctacccagctggaactctccctaaccccctgcttcctcaccctctgcacgagaacgaagttcttcgtcaccagctctttgctgccccttaccgggacctgccggcctccctttctgccccgatgtcagcagctcatcagctgcaggccatgcacgcacagtcagctgagctgcagcgcttggcgctggaacagcagcagtggctgcatgcccatcacccgctgcacagtgtgccgctgcctgcccaggaggactactacagtcacctgaagaaggaaagcgacaagccactgtagaacctgcgatcaagagagcaccatggctcctacattggaccttggagcacccccaccctccccccaccgtgcccttggcctgccacccagagccaagagggtgctgctcagttgcagggcctccgcagctggacagagagtgggggagggagggacagacagaaggccaaggcccgatgtggtgtgcagaggtggggaggtggcgaggatggggacagaaagcgcacagaatcttggaccaggtctctcttccttgtcccccctgcttttctcctcccccatgcccaacccctgtggccgccgcccctcccctgccccgttggtgtgattatttcatctgttagatgtggctgttttgcgtagcatcgtgtgccacccctgcccctccccgatccctgtgtgcgcgccccctctgcaatgtatgccccttgccccttccccacactaataatttatatatataaatatctatatgacgctcttaaaaaaacatcccaaccaaaaccaaccaaacaaaaacatcctcacaactccccaggaaaaaaaaaaaaaactcgaggttaaagcagcagtgccaataatgagacccagctgggaaggactcggtgatacccactgggatcttttatcctttgttgcaaaagtgtggacacttttgacagcttggcagattttaactccagaagcactttatgaaatggtacactgactaatccagaagacatttccaacagtttgccagtggttcctcactacactggtactgaaagtgtaatttcttagagccaaaaaactggagaaacaaatatcctgccacctctaacaagtacatgagtacttgatttttatggtatagagcagagccttttcttcctcttcttgatagatgaggccatggtgtaaatggaagtttcagagaggacaaaataaaacggaattccatttttctctcactgtaa

SEQ ID NO: 427456 - DNA, 4773 bp, Homo sapiens
tccttgaggaaggaatagggttttacaggcgggaaacaagactggctgctagggagcagccaagaatgtgaggaaagtgagaaatccccagatggtaagaggtgggcttgagcaagagtactcaccacatcacagtacaacagtgtgctgtgaggggaaatgattttatgcaagagaggccccaaatctcagggaagcaggaaaggaaaagagaaaaaatgagtcttcccttttctacagcaggaactccctcggccacagtctccctccgatctggatagcttggacgggcggagccttaatgatgatggcagcagcgaccctagggatatcgaccaggacaaccgaagcacgtcccccagtatctacagccctggaagtgtggagaatgactctgactcatcttctggcctgtcccagggcccagcccgcccctaccacccacctccactctttcctccttcccctcaaccgccagacagcacccctcgacagccagaggctagctttgaaccccatccttctgtgacacccactggatatcatgctcccatggagccccccacatctcgaatgttccaggctcctcctggggcccctccccctcacccacagctctatcctgggggcactggtggagttttgtctggacccccaatgggtcccaaggggggaggggctgcctcatcagtggggggccctaatgggggtaagcagcaccccccacccactactcccatttcagtatcaagctctggggctagtggtgctcccccaacaaagccgcctaccactccagtgggtggtgggaacctaccttctgctccaccaccagccaacttcccccatgtgacaccgaacctgcctcccccacctgccctgagacccctcaacaatgcatcagcctctccccctggcctgggggcccaaccactacctggtcatctgccctctccccacgccatgggacagggtatgggtggacttcctcctggcccagagaagggcccaactctggctccttcaccccactctctgcctcctgcttcctcttctgctccagcgccccccatgaggtttccttattcatcctctagtagtagctctgcagcagcctcctcttccagttcttcctcctcttcctctgcctcccccttcccagcttcccaggcattgcccagctacccccactctttccctcccccaacaagcctctctgtctccaatcagccccccaagtatactcagccttctctcccatcccaggctgtgtggagccagggtcccccaccacctcctccctatggccgcctcttagccaacagcaatgcccatccaggccccttccctccctctactggggcccagtccaccgcccacccaccagtctcaacacatcaccatcaccaccagcaacagcaacagcagcagcagcagcagcagcagcagcagcagcagcagcagcatcacggaaactctgggccccctcctcctggagcatttccccacccactggagggcggtagctcccaccacgcacacccttacgccatgtctccctccctggggtctctgaggccctacccaccagggccagcacacctgcccccacctcacagccaggtgtcctacagccaagcaggccccaatggccctccagtctcttcctcttccaactcttcctcttccacttctcaagggtcctacccatgttcacacccctccccttcccagggccctcaaggggcgccctaccctttcccaccggtgcctacggtcaccacctcttcggctaccctttccacggtcattgccaccgtggcttcctcgccagcaggctacaaaacggcctccccacctgggcccccaccgtacggaaagagagccccgtccccgggggcctacaagacagccaccccacccggatacaaacccgggtcgcctccctccttccgaacggggaccccaccgggctatcgaggaacctcgccacctgcaggcccagggaccttcaagccgggctcgcccaccgtgggacctgggcccctgccacctgcggggccctcaggcctgccatcgctgccaccaccacctgcggcccctgcctcagggccgcccctgagcgccacgcagatcaaacaggagccggctgaggagtatgagacccccgagagcccggtgcccccagcccgcagcccctcgccccctcccaaggtggtagatgtacccagccatgccagtcagtctgccaggtgagcggccaggtggggcggaggtgggcctggaaaggggacgacgacaaggcggcgacgagagagggagtagcagggaggggccttgcgctggtgtagtgttttagaaaagcacgcccctctcctccgtccaggcctagtggccagtgaggcccgcagcagctcacagcctgcaggggtggttttgaggcgggggctacaagcactcgccggggccgcggcgctgcgggctccatcgggcagctcgcaccgcctgagcgcccgctgcttccacgcccggcaggttcaacaaacacctggatcgcggcttcaactcgtgcgcgcgcagcgacctgtacttcgtgccactggagggctccaagctggccaagaagcgggccgacctggtggagaaggtgcggcgcgaggccgagcagcgcgcgcgcgaagaaaaggagcgcgagcgcgagcgggaacgcgagaaagagcgcgagcgcgagaaggagcgcgagcttgaacgcagcgtgaagttggctcaggagggccgtgctccggtggaatgcccatctctgggcccagtgccccatcgccctccatttgaaccgggcagtgcggtggctacagtgcccccctacctgggtcctgacactccagccttgcgcactctcagtgaatatgcccggcctcatgtcatgtctcctggcaatcgcaaccatccattctacgtgcccctgggggcagtggacccggggctcctgggttacaatgtcccggccctgtacagcagtgatccagctgcccgggagagggaacgggaagcccgtgaacgagacctccgtgaccgcctcaagcctggctttgaggtgaagcctagtgagctggaacccctacatggggtccctgggccgggcttggatccctttccccgacatgggggcctggctctgcagcctggcccacctggcctgcaccctttcccctttcatccgagcctggggcccctggagcgagaacgtctagcgctggcagctgggccagccctgcggcctgacatgtcctatgctgagcggctggcagctgagaggcagcacgcagaaagggtggcggccctgggcaatgacccactggcccggctgcagatgctcaatgtgactccccatcaccaccagcactcccacatccactcgcacctgcacctgcaccagcaagatgctatccatgcagcctctgcctcggtgcaccctctcattgaccccctggcctcagggtctcaccttacccggatcccctacccagctggaactctccctaaccccctgcttcctcaccctctgcacgagaacgaagttcttcgtcaccagctctttgctgccccttaccgggacctgccggcctccctttctgccccgatgtcagcagctcatcagctgcaggccatgcacgcacagtcagctgagctgcagcgcttggcgctggaacagcagcagtggctgcatgcccatcacccgctgcacagtgtgccgctgcctgcccaggaggactactacagtcacctgaagaaggaaagcgacaagccactgtagaacctgcgatcaagagagcaccatggctcctacattggaccttggagcacccccaccctccccccaccgtgcccttggcctgccacccagagccaagagggtgctgctcagttgcagggcctccgcagctggacagagagtgggggagggagggacagacagaaggccaaggcccgatgtggtgtgcagaggtggggaggtggcgaggatggggacagaaagcgcacagaatcttggaccaggtctctcttccttgtcccccctgcttttctcctcccccatgcccaacccctgtggccgccgcccctcccctgccccgttggtgtgattatttcatctgttagatgtggctgttttgcgtagcatcgtgtgccacccctgcccctccccgatccctgtgtgcgcgccccctctgcaatgtatgccccttgccccttccccacactaataatttatatatataaatatctatatgacgctcttaaaaaaacatcccaaccaaaaccaaccaaacaaaaacatcctcacaactccccaggaaaaaaaaaaaaaactcgaggttaaagcagcagtgccaataatgagacccagctgggaaggactcggtgatacccactgggatcttttatcctttgttgcaaaagtgtggacacttttgacagcttggcagattttaactccagaagcactttatgaaatggtacactgactaatccagaagacatttccaacagtttgccagtggttcctcactacactggtactgaaagtgtaatttcttagagccaaaaaactggagaaacaaatatcctgccacctctaacaagtacatgagtacttgatttttatggtatagagcagagccttttcttcctcttcttgatagatgaggccatggtgtaaatggaagtttcagagaggacaaaataaaacggaattccatttttctctcactgtaa

SEQ ID NO: 427457 - DNA, 4896 bp, Homo sapiens
ctgccgccgccgccccccagaggcgccggagcccggaatcccgctcggagccagccagccgtcccgagctaccagcaggtttcattgaaaacagatcctgcaaaagttccaggtgcccacactggaaacttggagatcctgcttcccagaccacagctgtggggaacttggggtggagcagagaagtttctgtattcagctgcccaggcagaggagaatggggtctccacagcctgaagaatgaagacacgacagaataaagactcgatgtcaatgaggagtggacggaagaaagaggcccctgggccccgggaagaactgagatcgaggggccgggcctcccctggaggggtcagcacgtccagcagtgatggcaaagctgagaagtccaggcagacagccaagaaggcccgagtagaggaagcctccaccccaaaggtcaacaagcagggtcggagtgaggagatctcagagagtgaaagtgaggagaccaatgcaccaaaaaagaccaaaactgagcaggaactccctcggccacagtctccctccgatctggatagcttggacgggcggagccttaatgatgatggcagcagcgaccctagggatatcgaccaggacaaccgaagcacgtcccccagtatctacagccctggaagtgtggagaatgactctgactcatcttctggcctgtcccagggcccagcccgcccctaccacccacctccactctttcctccttcccctcaaccgccagacagcacccctcgacagccagaggctagctttgaaccccatccttctgtgacacccactggatatcatgctcccggtaagcagcaccccccacccactactcccatttcagtatcaagctctggggctagtggtgctcccccaacaaagccgcctaccactccagtgggtggtgggaacctaccttctgctccaccaccagccaacttcccccatgtgacaccgaacctgcctcccccacctgccctgagacccctcaacaatgcatcagcctctccccctggcctgggggcccaaccactacctggtcatctgccctctccccacgccatgggacagggtatgggtggacttcctcctggcccagagaagggcccaactctggctccttcaccccactctctgcctcctgcttcctcttctgctccagcgccccccatgaggtttccttattcatcctctagtagtagctctgcagcagcctcctcttccagttcttcctcctcttcctctgcctcccccttcccagcttcccaggcattgcccagctacccccactctttccctcccccaacaagcctctctgtctccaatcagccccccaagtatactcagccttctctcccatcccaggctgtgtggagccagggtcccccaccacctcctccctatggccgcctcttagccaacagcaatgcccatccaggccccttccctccctctactggggcccagtccaccgcccacccaccagtctcaacacatcaccatcaccaccagcaacagcaacagcagcagcagcagcagcagcagcagcagcagcagcagcagcatcacggaaactctgggccccctcctcctggagcatttccccacccactggagggcggtagctcccaccacgcacacccttacgccatgtctccctccctggggtctctgaggccctacccaccagggccagcacacctgcccccacctcacagccaggtgtcctacagccaagcaggccccaatggccctccagtctcttcctcttccaactcttcctcttccacttctcaagggtcctacccatgttcacacccctccccttcccagggccctcaaggggcgccctaccctttcccaccggtgcctacggtcaccacctcttcggctaccctttccacggtcattgccaccgtggcttcctcgccagcaggctacaaaacggcctccccacctgggcccccaccgtacggaaagagagccccgtccccgggggcctacaagacagccaccccacccggatacaaacccgggtcgcctccctccttccgaacggggaccccaccgggctatcgaggaacctcgccacctgcaggcccagggaccttcaagccgggctcgcccaccgtgggacctgggcccctgccacctgcggggccctcaggcctgccatcgctgccaccaccacctgcggcccctgcctcagggccgcccctgagcgccacgcagatcaaacaggagccggctgaggagtatgagacccccgagagcccggtgcccccagcccgcagcccctcgccccctcccaaggtggtagatgtacccagccatgccagtcagtctgccaggtgagcggccaggtggggcggaggtgggcctggaaaggggacgacgacaaggcggcgacgagagagggagtagcagggaggggccttgcgctggtgtagtgttttagaaaagcacgcccctctcctccgtccaggcctagtggccagtgaggcccgcagcagctcacagcctgcaggggtggttttgaggcgggggctacaagcactcgccggggccgcggcgctgcgggctccatcgggcagctcgcaccgcctgagcgcccgctgcttccacgcccggcaggttcaacaaacacctggatcgcggcttcaactcgtgcgcgcgcagcgacctgtacttcgtgccactggagggctccaagctggccaagaagcgggccgacctggtggagaaggtgcggcgcgaggccgagcagcgcgcgcgcgaagaaaaggagcgcgagcgcgagcgggaacgcgagaaagagcgcgagcgcgagaaggagcgcgagcttgaacgcagcgtgaagttggctcaggagggccgtgctccggtggaatgcccatctctgggcccagtgccccatcgccctccatttgaaccgggcagtgcggtggctacagtgcccccctacctgggtcctgacactccagccttgcgcactctcagtgaatatgcccggcctcatgtcatgtctcctggcaatcgcaaccatccattctacgtgcccctgggggcagtggacccggggctcctgggttacaatgtcccggccctgtacagcagtgatccagctgcccgggagagggaacgggaagcccgtgaacgagacctccgtgaccgcctcaagcctggctttgaggtgaagcctagtgagctggaacccctacatggggtccctgggccgggcttggatccctttccccgacatgggggcctggctctgcagcctggcccacctggcctgcaccctttcccctttcatccgagcctggggcccctggagcgagaacgtctagcgctggcagctgggccagccctgcggcctgacatgtcctatgctgagcggctggcagctgagaggcagcacgcagaaagggtggcggccctgggcaatgacccactggcccggctgcagatgctcaatgtgactccccatcaccaccagcactcccacatccactcgcacctgcacctgcaccagcaagatgctatccatgcagcctctgcctcggtgcaccctctcattgaccccctggcctcagggtctcaccttacccggatcccctacccagctggaactctccctaaccccctgcttcctcaccctctgcacgagaacgaagttcttcgtcaccagctctttgctgccccttaccgggacctgccggcctccctttctgccccgatgtcagcagctcatcagctgcaggccatgcacgcacagtcagctgagctgcagcgcttggcgctggaacagcagcagtggctgcatgcccatcacccgctgcacagtgtgccgctgcctgcccaggaggactactacagtcacctgaagaaggaaagcgacaagccactgtagaacctgcgatcaagagagcaccatggctcctacattggaccttggagcacccccaccctccccccaccgtgcccttggcctgccacccagagccaagagggtgctgctcagttgcagggcctccgcagctggacagagagtgggggagggagggacagacagaaggccaaggcccgatgtggtgtgcagaggtggggaggtggcgaggatggggacagaaagcgcacagaatcttggaccaggtctctcttccttgtcccccctgcttttctcctcccccatgcccaacccctgtggccgccgcccctcccctgccccgttggtgtgattatttcatctgttagatgtggctgttttgcgtagcatcgtgtgccacccctgcccctccccgatccctgtgtgcgcgccccctctgcaatgtatgccccttgccccttccccacactaataatttatatatataaatatctatatgacgctcttaaaaaaacatcccaaccaaaaccaaccaaacaaaaacatcctcacaactccccaggaaaaaaaaaaaaaactcgaggttaaagcagcagtgccaataatgagacccagctgggaaggactcggtgatacccactgggatcttttatcctttgttgcaaaagtgtggacacttttgacagcttggcagattttaactccagaagcactttatgaaatggtacactgactaatccagaagacatttccaacagtttgccagtggttcctcactacactggtactgaaagtgtaatttcttagagccaaaaaactggagaaacaaatatcctgccacctctaacaagtacatgagtacttgatttttatggtatagagcagagccttttcttcctcttcttgatagatgaggccatggtgtaaatggaagtttcagagaggacaaaataaaacggaattccatttttctctcactgtaa

SEQ ID NO: 427458 - DNA, 3353 bp, Homo sapiens
tctagaggatccctgtggagaggggttcaccacgctggccagtgggtctcaaactcctgaccccaagtgattcgcccacctcggcctcccaaagtgctggggattgcagtcaccacgcacacccttacgccatgtctccctccctggggtctctgaggccctacccaccagggccagcacacctgcccccacctcacagccaggtgtcctacagccaagcaggccccaatggccctccagtctcttcctcttccaactcttcctcttccacttctcaagggtcctacccatgttcacacccctccccttcccagggccctcaaggggcgccctaccctttcccaccggtgcctacggtcaccacctcttcggctaccctttccacggtcattgccaccgtggcttcctcgccagcaggctacaaaacggcctccccacctgggcccccaccgtacggaaagagagccccgtccccgggggcctacaagacagccaccccacccggatacaaacccgggtcgcctccctccttccgaacggggaccccaccgggctatcgaggaacctcgccacctgcaggcccagggaccttcaagccgggctcgcccaccgtgggacctgggcccctgccacctgcggggccctcaggcctgccatcgctgccaccaccacctgcggcccctgcctcagggccgcccctgagcgccacgcagatcaaacaggagccggctgaggagtatgagacccccgagagcccggtgcccccagcccgcagcccctcgccccctcccaaggtggtagatgtacccagccatgccagtcagtctgccaggtgagcggccaggtggggcggaggtgggcctggaaaggggacgacgacaaggcggcgacgagagagggagtagcagggaggggccttgcgctggtgtagtgttttagaaaagcacgcccctctcctccgtccaggcctagtggccagtgaggcccgcagcagctcacagcctgcaggggtggttttgaggcgggggctacaagcactcgccggggccgcggcgctgcgggctccatcgggcagctcgcaccgcctgagcgcccgctgcttccacgcccggcaggttcaacaaacacctggatcgcggcttcaactcgtgcgcgcgcagcgacctgtacttcgtgccactggagggctccaagctggccaagaagcgggccgacctggtggagaaggtgcggcgcgaggccgagcagcgcgcgcgcgaagaaaaggagcgcgagcgcgagcgggaacgcgagaaagagcgcgagcgcgagaaggagcgcgagcttgaacgcagcgtgaagttggctcaggagggccgtgctccggtggaatgcccatctctgggcccagtgccccatcgccctccatttgaaccgggcagtgcggtggctacagtgcccccctacctgggtcctgacactccagccttgcgcactctcagtgaatatgcccggcctcatgtcatgtctcctggcaatcgcaaccatccattctacgtgcccctgggggcagtggacccggggctcctgggttacaatgtcccggccctgtacagcagtgatccagctgcccgggagagggaacgggaagcccgtgaacgagacctccgtgaccgcctcaagcctggctttgaggtgaagcctagtgagctggaacccctacatggggtccctgggccgggcttggatccctttccccgacatgggggcctggctctgcagcctggcccacctggcctgcaccctttcccctttcatccgagcctggggcccctggagcgagaacgtctagcgctggcagctgggccagccctgcggcctgacatgtcctatgctgagcggctggcagctgagaggcagcacgcagaaagggtggcggccctgggcaatgacccactggcccggctgcagatgctcaatgtgactccccatcaccaccagcactcccacatccactcgcacctgcacctgcaccagcaagatgctatccatgcagcctctgcctcggtgcaccctctcattgaccccctggcctcagggtctcaccttacccggatcccctacccagctggaactctccctaaccccctgcttcctcaccctctgcacgagaacgaagttcttcgtcaccagctctttgctgccccttaccgggacctgccggcctccctttctgccccgatgtcagcagctcatcagctgcaggccatgcacgcacagtcagctgagctgcagcgcttggcgctggaacagcagcagtggctgcatgcccatcacccgctgcacagtgtgccgctgcctgcccaggaggactactacagtcacctgaagaaggaaagcgacaagccactgtagaacctgcgatcaagagagcaccatggctcctacattggaccttggagcacccccaccctccccccaccgtgcccttggcctgccacccagagccaagagggtgctgctcagttgcagggcctccgcagctggacagagagtgggggagggagggacagacagaaggccaaggcccgatgtggtgtgcagaggtggggaggtggcgaggatggggacagaaagcgcacagaatcttggaccaggtctctcttccttgtcccccctgcttttctcctcccccatgcccaacccctgtggccgccgcccctcccctgccccgttggtgtgattatttcatctgttagatgtggctgttttgcgtagcatcgtgtgccacccctgcccctccccgatccctgtgtgcgcgccccctctgcaatgtatgccccttgccccttccccacactaataatttatatatataaatatctatatgacgctcttaaaaaaacatcccaaccaaaaccaaccaaacaaaaacatcctcacaactccccaggaaaaaaaaaaaaaactcgaggttaaagcagcagtgccaataatgagacccagctgggaaggactcggtgatacccactgggatcttttatcctttgttgcaaaagtgtggacacttttgacagcttggcagattttaactccagaagcactttatgaaatggtacactgactaatccagaagacatttccaacagtttgccagtggttcctcactacactggtactgaaagtgtaatttcttagagccaaaaaactggagaaacaaatatcctgccacctctaacaagtacatgagtacttgatttttatggtatagagcagagccttttcttcctcttcttgatagatgaggccatggtgtaaatggaagtttcagagaggacaaaataaaacggaattccatttttctctcactgtaa

SEQ ID NO: 427459 - DNA, 4981 bp, Homo sapiens
ctgccgccgccgccccccagaggcgccggagcccggaatcccgctcggagccagccagccgtcccgagctaccagcaggtttcattgaaaacagatcctgcaaaagttccaggtgcccacactggaaacttggagatcctgcttcccagaccacagctgtggggaacttggggtggagcagagaagtttctgtattcagctgcccaggcagaggagaatggggtctccacagcctgaagaatgaagacacgacagaataaagactcgatgtcaatgaggagtggacggaagaaagaggcccctgggccccgggaagaactgagatcgaggggccgggcctcccctggaggggtcagcacgtccagcagtgatggcaaagctgagaagtccaggcagacagccaagaaggcccgagtagaggaagcctccaccccaaaggtcaacaagcagggtcggagtgaggagatctcagagagtgaaagtgaggagaccaatgcaccaaaaaagaccaaaactgagcaggaactccctcggccacagtctccctccgatctggatagcttggacgggcggagccttaatgatgatggcagcagcgaccctagggatatcgaccaggacaaccgaagcacgtcccccagtatctacagccctggaagtgtggagaatgactctgactcatcttctggcctgtcccagggcccagcccgcccctaccacccacctccactctttcctccttcccctcaaccgccagacagcacccctcgacagccagaggctagctttgaaccccatccttctgtgacacccactggatatcatgctcccatggagccccccacatctcgaatgttccaggctcctcctggggcccctccccctcacccacagctctatcctgggggcactggtggagttttgtctggacccccaatgggtcccaaggggggaggggctgcctcatcagtggggggccctaatgggggtaagcagcaccccccacccactactcccatttcagtatcaagctctggggctagtggtgctcccccaacaaagccgcctaccactccagtgggtggtgggaacctaccttctgctccaccaccagccaacttcccccatgtgacaccgaacctgcctcccccacctgccctgagacccctcaacaatgcatcagcctctccccctggcctgggggcccaaccactacctggtcatctgccctctccccacgccatgggacagggtatgggtggacttcctcctggcccagagaagggcccaactctggctccttcaccccactctctgcctcctgcttcctcttctgctccagcgccccccatgaggtttccttattcatcctctagtagtagctctgcagcagcctcctcttccagttcttcctcctcttcctctgcctcccccttcccagcttcccaggcattgcccagctacccccactctttccctcccccaacaagcctctctgtctccaatcagccccccaagtatactcagccttctctcccatcccaggctgtgtggagccagggtcccccaccacctcctccctatggccgcctcttagccaacagcaatgcccatccaggccccttccctccctctactggggcccagtccaccgcccacccaccagtctcaacacatcaccatcaccaccagcaacagcaacagcagcagcagcagcagcagcagcagcagcagcagcagcagcatcacggaaactctgggccccctcctcctggagcatttccccacccactggagggcggtagctcccaccacgcacacccttacgccatgtctccctccctggggtctctgaggccctacccaccagggccagcacacctgcccccacctcacagccaggtgtcctacagccaagcaggccccaatggccctccagtctcttcctcttccaactcttcctcttccacttctcaagggtcctacccatgttcacacccctccccttcccagggccctcaaggggcgccctaccctttcccaccggtgcctacggtcaccacctcttcggctaccctttccacggtcattgccaccgtggcttcctcgccagcaggctacaaaacggcctccccacctgggcccccaccgtacggaaagagagccccgtccccgggggcctacaagacagccaccccacccggatacaaacccgggtcgcctccctccttccgaacggggaccccaccgggctatcgaggaacctcgccacctgcaggcccagggaccttcaagccgggctcgcccaccgtgggacctgggcccctgccacctgcggggccctcaggcctgccatcgctgccaccaccacctgcggcccctgcctcagggccgcccctgagcgccacgcagatcaaacaggagccggctgaggagtatgagacccccgagagcccggtgcccccagcccgcagcccctcgccccctcccaaggtggtagatgtacccagccatgccagtcagtctgccaggtgagcggccaggtggggcggaggtgggcctggaaaggggacgacgacaaggcggcgacgagagagggagtagcagggaggggccttgcgctggtgtagtgttttagaaaagcacgcccctctcctccgtccaggcctagtggccagtgaggcccgcagcagctcacagcctgcaggggtggttttgaggcgggggctacaagcactcgccggggccgcggcgctgcgggctccatcgggcagctcgcaccgcctgagcgcccgctgcttccacgcccggcaggttcaacaaacacctggatcgcggcttcaactcgtgcgcgcgcagcgacctgtacttcgtgccactggagggctccaagctggccaagaagcgggccgacctggtggagaaggtgcggcgcgaggccgagcagcgcgcgcgcgaagaaaaggagcgcgagcgcgagcgggaacgcgagaaagagcgcgagcgcgagaaggagcgcgagcttgaacgcagcgtgaagttggctcaggagggccgtgctccggtggaatgcccatctctgggcccagtgccccatcgccctccatttgaaccgggcagtgcggtggctacagtgcccccctacctgggtcctgacactccagccttgcgcactctcagtgaatatgcccggcctcatgtcatgtctcctggcaatcgcaaccatccattctacgtgcccctgggggcagtggacccggggctcctgggttacaatgtcccggccctgtacagcagtgatccagctgcccgggagagggaacgggaagcccgtgaacgagacctccgtgaccgcctcaagcctggctttgaggtgaagcctagtgagctggaacccctacatggggtccctgggccgggcttggatccctttccccgacatgggggcctggctctgcagcctggcccacctggcctgcaccctttcccctttcatccgagcctggggcccctggagcgagaacgtctagcgctggcagctgggccagccctgcggcctgacatgtcctatgctgagcggctggcaggtgactccccatcaccaccagcactcccacatccactcgcacctgcacctgcaccagcaagatgctatccatgcagcctctgcctcggtgcaccctctcattgaccccctggcctcagggtctcaccttacccggatcccctacccagctggaactctccctaaccccctgcttcctcaccctctgcacgagaacgaagttcttcgtcaccagctctttgctgccccttaccgggacctgccggcctccctttctgccccgatgtcagcagctcatcagctgcaggccatgcacgcacagtcagctgagctgcagcgcttggcgctggaacagcagcagtggctgcatgcccatcacccgctgcacagtgtgccgctgcctgcccaggaggactactacagtcacctgaagaaggaaagcgacaagccactgtagaacctgcgatcaagagagcaccatggctcctacattggaccttggagcacccccaccctccccccaccgtgcccttggcctgccacccagagccaagagggtgctgctcagttgcagggcctccgcagctggacagagagtgggggagggagggacagacagaaggccaaggcccgatgtggtgtgcagaggtggggaggtggcgaggatggggacagaaagcgcacagaatcttggaccaggtctctcttccttgtcccccctgcttttctcctcccccatgcccaacccctgtggccgccgcccctcccctgccccgttggtgtgattatttcatctgttagatgtggctgttttgcgtagcatcgtgtgccacccctgcccctccccgatccctgtgtgcgcgccccctctgcaatgtatgccccttgccccttccccacactaataatttatatatataaatatctatatgacgctcttaaaaaaacatcccaaccaaaaccaaccaaacaaaaacatcctcacaactccccaggaaaaaaaaaaaaaactcgaggttaaagcagcagtgccaataatgagacccagctgggaaggactcggtgatacccactgggatcttttatcctttgttgcaaaagtgtggacacttttgacagcttggcagattttaactccagaagcactttatgaaatggtacactgactaatccagaagacatttccaacagtttgccagtggttcctcactacactggtactgaaagtgtaatttcttagagccaaaaaactggagaaacaaatatcctgccacctctaacaagtacatgagtacttgatttttatggtatagagcagagccttttcttcctcttcttgatagatgaggccatggtgtaaatggaagtttcagagaggacaaaataaaacggaattccatttttctctcactgtaa

SEQ ID NO: 427460 - DNA, 2334 bp, Homo sapiens
gaagttctagaggatcccaattcaacacttcttgccccctggctacaaaattgaggtgcaaaccaatgacatggtgaatgtgacaactccgtggcaggttcatcagattcccacccatggcatccagccacagcctcaaccaccaccccaacatccttcccagccttcagcccagtcagccccagctcctgcccagccagctcctcagcccccacctgccaaagtcagcaagccctcccaaccgcatcaccgcgagcgcgagcgggaacgcgagaaagagcgcgagcgcgagaaggagcgcgagcttgaacgcagcgtgaagttggctcaggagggccgtgctccggtggaatgcccatctctgggcccagtgccccatcgccctccatttgaaccgggcagtgcggtggctacagtgcccccctacctgggtcctgacactccagccttgcgcactctcagtgaatatgcccggcctcatgtcatgtctcctggcaatcgcaaccatccattctacgtgcccctgggggcagtggacccggggctcctgggttacaatgtcccggccctgtacagcagtgatccagctgcccgggagagggaacgggaagcccgtgaacgagacctccgtgaccgcctcaagcctggctttgaggtgaagcctagtgagctggaacccctacatggggtccctgggccgggcttggatccctttccccgacatgggggcctggctctgcagcctggcccacctggcctgcaccctttcccctttcatccgagcctggggcccctggagcgagaacgtctagcgctggcagctgggccagccctgcggcctgacatgtcctatgctgagcggctggcagctgagaggcagcacgcagaaagggtggcggccctgggcaatgacccactggcccggctgcagatgctcaatgtgactccccatcaccaccagcactcccacatccactcgcacctgcacctgcaccagcaagatgctatccatgcagcctctgcctcggtgcaccctctcattgaccccctggcctcagggtctcaccttacccggatcccctacccagctggaactctccctaaccccctgcttcctcaccctctgcacgagaacgaagttcttcgtcaccagctctttgctgccccttaccgggacctgccggcctccctttctgccccgatgtcagcagctcatcagctgcaggccatgcacgcacagtcagctgagctgcagcgcttggcgctggaacagcagcagtggctgcatgcccatcacccgctgcacagtgtgccgctgcctgcccaggaggactactacagtcacctgaagaaggaaagcgacaagccactgtagaacctgcgatcaagagagcaccatggctcctacattggaccttggagcacccccaccctccccccaccgtgcccttggcctgccacccagagccaagagggtgctgctcagttgcagggcctccgcagctggacagagagtgggggagggagggacagacagaaggccaaggcccgatgtggtgtgcagaggtggggaggtggcgaggatggggacagaaagcgcacagaatcttggaccaggtctctcttccttgtcccccctgcttttctcctcccccatgcccaacccctgtggccgccgcccctcccctgccccgttggtgtgattatttcatctgttagatgtggctgttttgcgtagcatcgtgtgccacccctgcccctccccgatccctgtgtgcgcgccccctctgcaatgtatgccccttgccccttccccacactaataatttatatatataaatatctatatgacgctcttaaaaaaacatcccaaccaaaaccaaccaaacaaaaacatcctcacaactccccaggaaaaaaaaaaaaaactcgaggttaaagcagcagtgccaataatgagacccagctgggaaggactcggtgatacccactgggatcttttatcctttgttgcaaaagtgtggacacttttgacagcttggcagattttaactccagaagcactttatgaaatggtacactgactaatccagaagacatttccaacagtttgccagtggttcctcactacactggtactgaaagtgtaatttcttagagccaaaaaactggagaaacaaatatcctgccacctctaacaagtacatgagtacttgatttttatggtatagagcagagccttttcttcctcttcttgatagatgaggccatggtgtaaatggaagtttcagagaggacaaaataaaacggaattccatttttctctcactgtaa

SEQ ID NO: 427461 - DNA, 4920 bp, Homo sapiens
ctgccgccgccgccccccagaggcgccggagcccggaatcccgctcggagccagccagccgtcccgagctaccagcaggtttcattgaaaacagatcctgcaaaagttccaggtgcccacactggaaacttggagatcctgcttcccagaccacagctgtggggaacttggggtggagcagagaagtttctgtattcagctgcccaggcagaggagaatggggtctccacagcctgaagaatgaagacacgacagaataaagactcgatgtcaatgaggagtggacggaagaaagaggcccctgggccccgggaagaactgagatcgaggggccgggcctcccctggaggggtcagcacgtccagcagtgatggcaaagctgagaagtccaggcagacagccaagaaggcccgagtagaggaagcctccaccccaaaggtcaacaagcagggtcggagtgaggagatctcagagagtgaaagtgaggagaccaatgcaccaaaaaagaccaaaactgagcaggaactccctcggccacagtctccctccgatctggatagcttggacgggcggagccttaatgatgatggcagcagcgaccctagggatatcgaccaggacaaccgaagcacgtcccccagtatctacagccctggaagtgtggagaatgactctgactcatcttctggcctgtcccagggcccagcccgcccctaccacccacctccactctttcctccttcccctcaaccgccagacagcacccctcgacagccagaggctagctttgaaccccatccttctgtgacacccactggatatcatgctcccatggagccccccacatctcgaatgttccaggctcctcctggggcccctccccctcacccacagctctatcctgggggcactggtggagttttgtctggacccccaatgggtcccaaggggggaggggctgcctcatcagtggggggccctaatgggggtaagcagcaccccccacccactactcccatttcagtatcaagctctggggctagtggtgctcccccaacaaagccgcctaccactccagtgggtggtgggaacctaccttctgctccaccaccagccaacttcccccatgtgacaccgaacctgcctcccccacctgccctgagacccctcaacaatgcatcagcctctccccctggcctgggggcccaaccactacctggtcatctgccctctccccacgccatgggacagggtatgggtggacttcctcctggcccagagaagggcccaactctggctccttcaccccactctctgcctcctgcttcctcttctgctccagcgccccccatgaggtttccttattcatcctctagtagtagctctgcagcagcctcctcttccagttcttcctcctcttcctctgcctcccccttcccagcttcccaggcattgcccagctacccccactctttccctcccccaacaagcctctctgtctccaatcagccccccaagtatactcagccttctctcccatcccaggctgtgtggagccagggtcccccaccacctcctccctatggccgcctcttagccaacagcaatgcccatccaggccccttccctccctctactggggcccagtccaccgcccacccaccagtctcaacacatcaccatcaccaccagcaacagcaacagcagcagcagcagcagcagcagcagcagcagcagcagcagcatcacggaaactctgggccccctcctcctggagcatttccccacccactggagggcggtagctcccaccacgcacacccttacgccatgtctccctccctggggtctctgaggccctacccaccagggccagcacacctgcccccacctcacagccaggtgtcctacagccaagcaggccccaatggccctccagtctcttcctcttccaactcttcctcttccacttctcaagggtcctacccatgttcacacccctccccttcccagggccctcaaggggcgccctaccctttcccaccggtgcctacggtcaccacctcttcggctaccctttccacggtcattgccaccgtggcttcctcgccagcaggctacaaaacggcctccccacctgggcccccaccgtacggaaagagagccccgtccccgggggcctacaagacagccaccccacccggatacaaacccgggtcgcctccctccttccgaacggggaccccaccgggctatcgaggaacctcgccacctgcaggcccagggaccttcaagccgggctcgcccaccgtgggacctgggcccctgccacctgcggggccctcaggcctgccatcgctgccaccaccacctgcggcccctgcctcagggccgcccctgagcgccacgcagatcaaacaggagccggctgaggagtatgagacccccgagagcccggtgcccccagcccgcagcccctcgccccctcccaaggtggtagatgtacccagccatgccagtcagtctgccaggtgagcggccaggtggggcggaggtgggcctggaaaggggacgacgacaaggcggcgacgagagagggagtagcagggaggggccttgcgctggtgtagtgttttagaaaagcacgcccctctcctccgtccaggcctagtggccagtgaggcccgcagcagctcacagcctgcaggggtggttttgaggcgggggctacaagcactcgccggggccgcggcgctgcgggctccatcgggcagctcgcaccgcctgagcgcccgctgcttccacgcccggcaggttcaacaaacacctggatcgcggcttcaactcgtgcgcgcgcagcgacctgtacttcgtgccactggagggctccaagctggccaagaagcgggccgacctggtggagaaggtgcggcgcgaggccgagcagcgcgcgcgcgaagaaaaggagcgcgagcgcgagcgggaacgcgagaaagagcgcgagcgcgagaaggagcgcgagcttgaacgcagcgtgaagttggctcaggagggccgtgctccggtggaatgcccatctctgggcccagtgccccatcgccctccatttgaaccgggcagtgcggtggctacagtgcccccctacctgggtcctgacactccagccttgcgcactctcagtgaatatgcccggcctcatgtcatgtctcctggcaatcgcaaccatccattctacgtgcccctgggggcagtggacccggggctcctgggttacaatgtcccggccctgtacagcagtgatccagctgcccgggagagggaacgggaagcccgtgaacgagacctccgtgaccgcctcaagcctggctttgaggtgaagcctagtgagctggaacccctacatggggtccctgggccgggcttggatccctttccccgacatgggggcctggctctgcagcctggcccacctggcctgcaccctttcccctttcatccgagcctggggcccctggagcgagaacgtctagcgctggcagctgggccagccctgcggcctgacatgtcctatgctgagcggctggcagctgagaggcagcacgcagaaagggtggcggccctgggcaatgacccactggcccggctgcagatgctcaatgtgactccccatcaccaccagcactcccacatccactcgcacctgcacctgcaccagcaagatgctatccatgcagcctctgcctcggtgcaccctctcattgaccccctggcctcagggtctcaccttacccggatcccctacccagctggaactctccctaaccccctgcttcctcaccctctgcacgagaacgaagttcttcgtcaccagctctttgctgccccttaccgggacctgccggcctccctttctgccccgatgtcagcagctcatcagctgcaggccatgcacgcacagtcagctgagctgcagcgcttggcgctggaacagcagcagtggctgcatgcccatcacccgctgcacagtgtgccgctgcctgcccaggaggactactacagtcacctgaagaaggaaagcgacaagccactgtagaacctgcgatcaagagagcaccatggctcctacattggaccttggagcacccccaccctccccccaccgtgcccttggcctgccacccagagccaagagggtgctgctcagttgcagggcctccgcagctggacagagagtgggggagggagggacagacagaaggccaaggccctcccctgccccgttggtgtgattatttcatctgttagatgtggctgttttgcgtagcatcgtgtgccacccctgcccctccccgatccctgtgtgcgcgccccctctgcaatgtatgccccttgccccttccccacactaataatttatatatataaatatctatatgacgctcttaaaaaaacatcccaaccaaaaccaaccaaacaaaaacatcctcacaactccccaggaaaaaaaaaaaaaactcgaggttaaagcagcagtgccaataatgagacccagctgggaaggactcggtgatacccactgggatcttttatcctttgttgcaaaagtgtggacacttttgacagcttggcagattttaactccagaagcactttatgaaatggtacactgactaatccagaagacatttccaacagtttgccagtggttcctcactacactggtactgaaagtgtaatttcttagagccaaaaaactggagaaacaaatatcctgccacctctaacaagtacatgagtacttgatttttatggtatagagcagagccttttcttcctcttcttgatagatgaggccatggtgtaaatggaagtttcagagaggacaaaataaaacggaattccatttttctctcactgtaa

SEQ ID NO: 427462 - DNA, 4900 bp, Homo sapiens
ctgccgccgccgccccccagaggcgccggagcccggaatcccgctcggagccagccagccgtcccgagctaccagcaggtttcattgaaaacagatcctgcaaaagttccaggtgcccacactggaaacttggagatcctgcttcccagaccacagctgtggggaacttggggtggagcagagaagtttctgtattcagctgcccaggcagaggagaatggggtctccacagcctgaagaatgaagacacgacagaataaagactcgatgtcaatgaggagtggacggaagaaagaggcccctgggccccgggaagaactgagatcgaggggccgggcctcccctggaggggtcagcacgtccagcagtgatggcaaagctgagaagtccaggcagacagccaagaaggcccgagtagaggaagcctccaccccaaaggtcaacaagcagggtcggagtgaggagatctcagagagtgaaagtgaggagaccaatgcaccaaaaaagaccaaaactgagcaggaactccctcggccacagtctccctccgatctggatagcttggacgggcggagccttaatgatgatggcagcagcgaccctagggatatcgaccaggacaaccgaagcacgtcccccagtatctacagccctggaagtgtggagaatgactctgactcatcttctggcctgtcccagggcccagcccgcccctaccacccacctccactctttcctccttcccctcaaccgccagacagcacccctcgacagccagaggctagctttgaaccccatccttctgtgacacccactggatatcatgctcccatggagccccccacatctcgaatgttccaggctcctcctggggcccctccccctcacccacagctctatcctgggggcactggtggagttttgtctggacccccaatgggtcccaaggggggaggggctgcctcatcagtggggggccctaatgggggtaagcagcaccccccacccactactcccatttcagtatcaagctctggggctagtggtgctcccccaacaaagccgcctaccactccagtgggtggtgggaacctaccttctgctccaccaccagccaacttcccccatgtgacaccgaacctgcctcccccacctgccctgagacccctcaacaatgcatcagcctctccccctggcctgggggcccaaccactacctggtcatctgccctctccccacgccatgggacagggtatgggtggacttcctcctggcccagagaagggcccaactctggctccttcaccccactctctgcctcctgcttcctcttctgctccagcgccccccatgaggtttccttattcatcctctagtagtagctctgcagcagcctcctcttccagttcttcctcctcttcctctgcctcccccttcccagcttcccaggcattgcccagctacccccactctttccctcccccaacaagcctctctgtctccaatcagccccccaagtatactcagccttctctcccatcccaggctgtgtggagccagggtcccccaccacctcctccctatggccgcctcttagccaacagcaatgcccatccaggccccttccctccctctactggggcccagtccaccgcccacccaccagtctcaacacatcaccatcaccaccagcaacagcaacagcagcagcagcagcagcagcagcagcagcagcagcagcagcatcacggaaactctgggccccctcctcctggagcatttccccacccactggagggcggtagctcccaccacgcacacccttacgccatgtctccctccctggggtctctgaggccctacccaccagggccagcacacctgcccccacctcacagccaggtgtcctacagccaagcaggccccaatggccctccagtctcttcctcttccaactcttcctcttccacttctcaagggtcctacccatgttcacacccctccccttcccagggccctcaaggggcgccctaccctttcccaccggtgcctacggtcaccacctcttcggctaccctttccacggtcattgccaccgtggcttcctcgccagcaggctacaaaacggcctccccacctgggcccccaccgtacggaaagagagccccgtccccgggggcctacaagacagccaccccacccggatacaaacccgggtcgcctccctccttccgaacggggaccccaccgggctatcgaggaacctcgccacctgcaggcccagggaccttcaagccgggctcgcccaccgtgggacctgggcccctgccacctgcggggccctcaggcctgccatcgctgccaccaccacctgcggcccctgcctcagggccgcccctgagcgccacgcagatcaaacaggagccggctgaggagtatgagacccccgagagcccggtgcccccagcccgcagcccctcgccccctcccaaggtggtagatgtacccagccatgccagtcagtctgccaggtgagcggccaggtggggcggaggtgggcctggaaaggggacgacgacaaggcggcgacgagagagggagtagcagggaggggccttgcgctggtgtagtgttttagaaaagcacgcccctctcctccgtccaggcctagtggccagtgaggcccgcagcagctcacagcctgcaggggtggttttgaggcgggggctacaagcactcgccggggccgcggcgctgcgggctccatcgggcagctcgcaccgcctgagcgcccgctgcttccacgcccggcaggttcaacaaacacctggatcgcggcttcaactcgtgcgcgcgcagcgacctgtacttcgtgccactggagggctccaagctggccaagaagcgggccgacctggtggagaaggtgcggcgcgaggccgagcagcgcgcgcgcgaagaaaaggagcgcgagcgcgagcgggaacgcgagaaagagcgcgagcgcgagaaggagcgcgagcttgaacgcagcgtgaagttggctcaggagggccgtgctccggtggaatgcccatctctgggcccagtgccccatcgccctccatttgaaccgggcagtgcggtggctacagtgcccccctacctgggtcctgacactccagccttgcgcactctcagtgaatatgcccggcctcatgtcatgtctcctggcaatcgcaaccatccattctacgtgcccctgggggcagtggacccggggctcctgggttacaatgtcccggccctgtacagcagtgatccagctgcccgggagagggaacgggaagcccgtgaacgagacctccgtgaccgcctcaagcctggctttgaggtgaagcctagtgagctggaacccctacatggggtccctgggccgggcttggatccctttccccgacatgggggcctggctctgcagcctggcccacctggcctgcaccctttcccctttcatccgagcctggggcccctggagcgagaacgtctagcgctggcagctgggccagccctgcggcctgacatgtcctatgctgagcggctggcagctgagaggcagcacgcagaaagggtggcggccctgggcaatgacccactggcccggctgcagatgctcaataactctccctaaccccctgcttcctcaccctctgcacgagaacgaagttcttcgtcaccagctctttgctgccccttaccgggacctgccggcctccctttctgccccgatgtcagcagctcatcagctgcaggccatgcacgcacagtcagctgagctgcagcgcttggcgctggaacagcagcagtggctgcatgcccatcacccgctgcacagtgtgccgctgcctgcccaggaggactactacagtcacctgaagaaggaaagcgacaagccactgtagaacctgcgatcaagagagcaccatggctcctacattggaccttggagcacccccaccctccccccaccgtgcccttggcctgccacccagagccaagagggtgctgctcagttgcagggcctccgcagctggacagagagtgggggagggagggacagacagaaggccaaggcccgatgtggtgtgcagaggtggggaggtggcgaggatggggacagaaagcgcacagaatcttggaccaggtctctcttccttgtcccccctgcttttctcctcccccatgcccaacccctgtggccgccgcccctcccctgccccgttggtgtgattatttcatctgttagatgtggctgttttgcgtagcatcgtgtgccacccctgcccctccccgatccctgtgtgcgcgccccctctgcaatgtatgccccttgccccttccccacactaataatttatatatataaatatctatatgacgctcttaaaaaaacatcccaaccaaaaccaaccaaacaaaaacatcctcacaactccccaggaaaaaaaaaaaaaactcgaggttaaagcagcagtgccaataatgagacccagctgggaaggactcggtgatacccactgggatcttttatcctttgttgcaaaagtgtggacacttttgacagcttggcagattttaactccagaagcactttatgaaatggtacactgactaatccagaagacatttccaacagtttgccagtggttcctcactacactggtactgaaagtgtaatttcttagagccaaaaaactggagaaacaaatatcctgccacctctaacaagtacatgagtacttgatttttatggtatagagcagagccttttcttcctcttcttgatagatgaggccatggtgtaaatggaagtttcagagaggacaaaataaaacggaattccatttttctctcactgtaa

SEQ ID NO: 427463 - DNA, 1843 bp, Homo sapiens
cacgagggctcgtgcggtgacatattggttctccgaggctctggtactgggaggtgaatccattgagctccgcggagactggataccgggtacgccccggatagcaagagagagtcgtctcgcggaccagccttgacatgcgcggagcttctgcagcgtggcatacgaagcctagtgagctggaacccctacatggggtccctgggccgggcttggatccctttccccgacatgggggcctggctctgcagcctggcccacctggcctgcaccctttcccctttcatccgagcctggggcccctggagcgagaacgtctagcgctggcagctgggccagccctgcggcctgacatgtcctatgctgagcggctggcagctgagaggcagcacgcagaaagggtggcggccctgggcaatgacccactggcccggctgcagatgctcaatgtgactccccatcaccaccagcactcccacatccactcgcacctgcacctgcaccagcaagatgctatccatgcagcctctgcctcggtgcaccctctcattgaccccctggcctcagggtctcaccttacccggatcccctacccagctggaactctccctaaccccctgcttcctcaccctctgcacgagaacgaagttcttcgtcaccagctctttgctgccccttaccgggacctgccggcctccctttctgccccgatgtcagcagctcatcagctgcaggccatgcacgcacagtcagctgagctgcagcgcttggcgctggaacagcagcagtggctgcatgcccatcacccgctgcacagtgtgccgctgcctgcccaggaggactactacagtcacctgaagaaggaaagcgacaagccactgtagaacctgcgatcaagagagcaccatggctcctacattggaccttggagcacccccaccctccccccaccgtgcccttggcctgccacccagagccaagagggtgctgctcagttgcagggcctccgcagctggacagagagtgggggagggagggacagacagaaggccaaggcccgatgtggtgtgcagaggtggggaggtggcgaggatggggacagaaagcgcacagaatcttggaccaggtctctcttccttgtcccccctgcttttctcctcccccatgcccaacccctgtggccgccgcccctcccctgccccgttggtgtgattatttcatctgttagatgtggctgttttgcgtagcatcgtgtgccacccctgcccctccccgatccctgtgtgcgcgccccctctgcaatgtatgccccttgccccttccccacactaataatttatatatataaatatctatatgacgctcttaaaaaaacatcccaaccaaaaccaaccaaacaaaaacatcctcacaactccccaggaaaaaaaaaaaaaactcgaggttaaagcagcagtgccaataatgagacccagctgggaaggactcggtgatacccactgggatcttttatcctttgttgcaaaagtgtggacacttttgacagcttggcagattttaactccagaagcactttatgaaatggtacactgactaatccagaagacatttccaacagtttgccagtggttcctcactacactggtactgaaagtgtaatttcttagagccaaaaaactggagaaacaaatatcctgccacctctaacaagtacatgagtacttgatttttatggtatagagcagagccttttcttcctcttcttgatagatgaggccatggtgtaaatggaagtttcagagaggacaaaataaaacggaattccatttttctctcactgtaa

SEQ ID NO: 427464 - DNA, 1602 bp, Homo sapiens
cggtgcactggagctccaggaggcaagggtgatgctggtgcccctggtgaacctggggcccctggagcgagaacgtctagcgctggcagctgggccagccctgcggcctgacatgtcctatgctgagcggctggcagctgagaggcagcacgcagaaagggtggcggccctgggcaatgacccactggcccggctgcagatgctcaatgtgactccccatcaccaccagcactcccacatccactcgcacctgcacctgcaccagcaagatgctatccatgcagcctctgcctcggtgcaccctctcattgaccccctggcctcagggtctcaccttacccggatcccctacccagctggaactctccctaaccccctgcttcctcaccctctgcacgagaacgaagttcttcgtcaccagctctttgctgccccttaccgggacctgccggcctccctttctgccccgatgtcagcagctcatcagctgcaggccatgcacgcacagtcagctgagctgcagcgcttggcgctggaacagcagcagtggctgcatgcccatcacccgctgcacagtgtgccgctgcctgcccaggaggactactacagtcacctgaagaaggaaagcgacaagccactgtagaacctgcgatcaagagagcaccatggctcctacattggaccttggagcacccccaccctccccccaccgtgcccttggcctgccacccagagccaagagggtgctgctcagttgcagggcctccgcagctggacagagagtgggggagggagggacagacagaaggccaaggcccgatgtggtgtgcagaggtggggaggtggcgaggatggggacagaaagcgcacagaatcttggaccaggtctctcttccttgtcccccctgcttttctcctcccccatgcccaacccctgtggccgccgcccctcccctgccccgttggtgtgattatttcatctgttagatgtggctgttttgcgtagcatcgtgtgccacccctgcccctccccgatccctgtgtgcgcgccccctctgcaatgtatgccccttgccccttccccacactaataatttatatatataaatatctatatgacgctcttaaaaaaacatcccaaccaaaaccaaccaaacaaaaacatcctcacaactccccaggaaaaaaaaaaaaaactcgaggttaaagcagcagtgccaataatgagacccagctgggaaggactcggtgatacccactgggatcttttatcctttgttgcaaaagtgtggacacttttgacagcttggcagattttaactccagaagcactttatgaaatggtacactgactaatccagaagacatttccaacagtttgccagtggttcctcactacactggtactgaaagtgtaatttcttagagccaaaaaactggagaaacaaatatcctgccacctctaacaagtacatgagtacttgatttttatggtatagagcagagccttttcttcctcttcttgatagatgaggccatggtgtaaatggaagtttcagagaggacaaaataaaacggaattccatttttctctcactgtaa

SEQ ID NO: 427465 - DNA, 1790 bp, Homo sapiens
gtgtggtgttctagaggatccctcataggttcgcaggagggaatggtggcacccacctgtagtcccagcaactggggaggctgagatgggaggatcgcttgaggctggaagttgtgtgctatgatcctgctactggatcttgctagagtgctatgatcctactactgcactctgcactccagcctgggcaacatagcaaaactgcatctaaaaaaaacaaaaacaaaaaccatggacaatttaaaatgtagaggcttcatctgctgaaggacacatcagaaaaagactgccctttacctcagtggaaaggaccttgtaggcactaactaacaaataacacagcaattgaactctagggtattgatccctgcgaacctatgatcataggttcgcagggtgactccccatcaccaccagcactcccacatccactcgcacctgcacctgcaccagcaagatgctatccatgcagcctctgcctcggtgcaccctctcattgaccccctggcctcagggtctcaccttacccggatcccctacccagctggaactctccctaaccccctgcttcctcaccctctgcacgagaacgaagttcttcgtcaccagctctttgctgccccttaccgggacctgccggcctccctttctgccccgatgtcagcagctcatcagctgcaggccatgcacgcacagtcagctgagctgcagcgcttggcgctggaacagcagcagtggctgcatgcccatcacccgctgcacagtgtgccgctgcctgcccaggaggactactacagtcacctgaagaaggaaagcgacaagccactgtagaacctgcgatcaagagagcaccatggctcctacattggaccttggagcacccccaccctccccccaccgtgcccttggcctgccacccagagccaagagggtgctgctcagttgcagggcctccgcagctggacagagagtgggggagggagggacagacagaaggccaaggcccgatgtggtgtgcagaggtggggaggtggcgaggatggggacagaaagcgcacagaatcttggaccaggtctctcttccttgtcccccctgcttttctcctcccccatgcccaacccctgtggccgccgcccctcccctgccccgttggtgtgattatttcatctgttagatgtggctgttttgcgtagcatcgtgtgccacccctgcccctccccgatccctgtgtgcgcgccccctctgcaatgtatgccccttgccccttccccacactaataatttatatatataaatatctatatgacgctcttaaaaaaacatcccaaccaaaaccaaccaaacaaaaacatcctcacaactccccaggaaaaaaaaaaaaaactcgaggttaaagcagcagtgccaataatgagacccagctgggaaggactcggtgatacccactgggatcttttatcctttgttgcaaaagtgtggacacttttgacagcttggcagattttaactccagaagcactttatgaaatggtacactgactaatccagaagacatttccaacagtttgccagtggttcctcactacactggtactgaaagtgtaatttcttagagccaaaaaactggagaaacaaatatcctgccacctctaacaagtacatgagtacttgatttttatggtatagagcagagccttttcttcctcttcttgatagatgaggccatggtgtaaatggaagtttcagagaggacaaaataaaacggaattccatttttctctcactgtaa

SEQ ID NO: 427466 - DNA, 1407 bp, Homo sapiens
tgtggcgtctctagaggttcccctccatagcatcacttcccgtcaatagcatcgctccccgtcaaagcttctcgcccccgccagtgctgcctctgcctcggtgcaccctctcattgaccccctggcctcagggtctcaccttacccggatcccctacccagctggaactctccctaaccccctgcttcctcaccctctgcacgagaacgaagttcttcgtcaccagctctttgctgccccttaccgggacctgccggcctccctttctgccccgatgtcagcagctcatcagctgcaggccatgcacgcacagtcagctgagctgcagcgcttggcgctggaacagcagcagtggctgcatgcccatcacccgctgcacagtgtgccgctgcctgcccaggaggactactacagtcacctgaagaaggaaagcgacaagccactgtagaacctgcgatcaagagagcaccatggctcctacattggaccttggagcacccccaccctccccccaccgtgcccttggcctgccacccagagccaagagggtgctgctcagttgcagggcctccgcagctggacagagagtgggggagggagggacagacagaaggccaaggcccgatgtggtgtgcagaggtggggaggtggcgaggatggggacagaaagcgcacagaatcttggaccaggtctctcttccttgtcccccctgcttttctcctcccccatgcccaacccctgtggccgccgcccctcccctgccccgttggtgtgattatttcatctgttagatgtggctgttttgcgtagcatcgtgtgccacccctgcccctccccgatccctgtgtgcgcgccccctctgcaatgtatgccccttgccccttccccacactaataatttatatatataaatatctatatgacgctcttaaaaaaacatcccaaccaaaaccaaccaaacaaaaacatcctcacaactccccaggaaaaaaaaaaaaaactcgaggttaaagcagcagtgccaataatgagacccagctgggaaggactcggtgatacccactgggatcttttatcctttgttgcaaaagtgtggacacttttgacagcttggcagattttaactccagaagcactttatgaaatggtacactgactaatccagaagacatttccaacagtttgccagtggttcctcactacactggtactgaaagtgtaatttcttagagccaaaaaactggagaaacaaatatcctgccacctctaacaagtacatgagtacttgatttttatggtatagagcagagccttttcttcctcttcttgatagatgaggccatggtgtaaatggaagtttcagagaggacaaaataaaacggaattccatttttctctcactgtaa

SEQ ID NO: 427467 - DNA, 4312 bp, Homo sapiens
ctgccgccgccgccccccagaggcgccggagcccggaatcccgctcggagccagccagccgtcccgagctaccagcaggtttcattgaaaacagatcctgcaaaagttccaggtgcccacactggaaacttggagatcctgcttcccagaccacagctgtggggaacttggggtggagcagagaagtttctgtattcagctgcccaggcagaggagaatggggtctccacagcctgaagaatgaagacacgacagaataaagactcgatgtcaatgaggagtggacggaagaaagaggcccctgggccccgggaagaactgagatcgaggggccgggcctcccctggaggggtcagcacgtccagcagtgatggcaaagctgagaagtccaggcagacagccaagaaggcccgagtagaggaagcctccaccccaaaggtcaacaagcagggtcggagtgaggagatctcagagagtgaaagtgaggagaccaatgcaccaaaaaagaccaaaactgagcaggaactccctcggccacagtctccctccgatctggatagcttggacgggcggagccttaatgatgatggcagcagcgaccctagggatatcgaccaggacaaccgaagcacgtcccccagtatctacagccctggaagtgtggagaatgactctgactcatcttctggcctgtcccagggcccagcccgcccctaccacccacctccactctttcctccttcccctcaaccgccagacagcacccctcgacagccagaggctagctttgaaccccatccttctgtgacacccactggatatcatgctcccatggagccccccacatctcgaatgttccaggctcctcctggggcccctccccctcacccacagctctatcctgggggcactggtggagttttgtctggacccccaatgggtcccaaggggggaggggctgcctcatcagtggggggccctaatgggggtaagcagcaccccccacccactactcccatttcagtatcaagctctggggctagtggtgctcccccaacaaagccgcctaccactccagtgggtggtgggaacctaccttctgctccaccaccagccaacttcccccatgtgacaccgaacctgcctcccccacctgccctgagacccctcaacaatgcatcagcctctccccctggcctgggggcccaaccactacctggtcatctgccctctccccacgccatgggacagggtatgggtggacttcctcctggcccagagaagggcccaactctggctccttcaccccactctctgcctcctgcttcctcttctgctccagcgccccccatgaggtttccttattcatcctctagtagtagctctgcagcagcctcctcttccagttcttcctcctcttcctctgcctcccccttcccagcttcccaggcattgcccagctacccccactctttccctcccccaacaagcctctctgtctccaatcagccccccaagtatactcagccttctctcccatcccaggctgtgtggagccagggtcccccaccacctcctccctatggccgcctcttagccaacagcaatgcccatccaggccccttccctccctctactggggcccagtccaccgcccacccaccagtctcaacacatcaccatcaccaccagcaacagcaacagcagcagcagcagcagcagcagcagcagcagcagcagcagcatcacggaaactctgggccccctcctcctggagcatttccccacccactggagggcggtagctcccaccacgcacacccttacgccatgtctccctccctggggtctctgaggccctacccaccagggccagcacacctgcccccacctcacagccaggtgtcctacagccaagcaggccccaatggccctccagtctcttcctcttccaactcttcctcttccacttctcaagggtcctacccatgttcacacccctccccttcccagggccctcaaggggcgccctaccctttcccaccggtgcctacggtcaccacctcttcggctaccctttccacggtcattgccaccgtggcttcctcgccagcaggctacaaaacggcctccccacctgggcccccaccgtacggaaagagagccccgtccccgggggcctacaagacagccaccccacccggatacaaacccgggtcgcctccctccttccgaacggggaccccaccgggctatcgaggaacctcgccacctgcaggcccagggaccttcaagccgggctcgcccaccgtgggacctgggcccctgccacctgcggggccctcaggcctgccatcgctgccaccaccacctgcggcccctgcctcagggccgcccctgagcgccacgcagatcaaacaggagccggctgaggagtatgagacccccgagagcccggtgcccccagcccgcagcccctcgccccctcccaaggtggtagatgtacccagccatgccagtcagtctgccaggtgagcggccaggtggggcggaggtgggcctggaaaggggacgacgacaaggcggcgacgagagagggagtagcagggaggggccttgcgctggtgtagtgttttagaaaagcacgcccctctcctccgtccaggcctagtggccagtgaggcccgcagcagctcacagcctgcaggggtggttttgaggcgggggctacaagcactcgccggggccgcggcgctgcgggctccatcgggcagctcgcaccgcctgagcgcccgctgcttccacgcccggcaggttcaacaaacacctggatcgcggcttcaactcgtgcgcgcgcagcgacctgtacttcgtgccactggagggctccaagctggccaagaagcgggccgacctggtggagaaggtgcggcgcgaggccgagcagcgcgcgcgcgaagaaaaggagcgcgagcgcgagcgggaacgcgagaaagagcgcgagcgcgagaaggagcgcgagcttgaacgcagcgtgaagttggctcaggagggccgtgctccggtggaatgcccatctctgggcccagtgccccatcgccctccatttgaaccgggcagtgcggtggctacagtgcccccctacctgggtcctgacactccagccttgcgcactctcagtgaatatgcccggcctcatgtcatgtctcctggcaatcgcaaccatccattctacgtgcccctgggggcagtggacccggggctcctgggttacaatgtcccggccctgtacagcagtgatccagctgcccgggagagggaacgggaagcccgtgaacgagacctccgtgaccgcctcaagcctggctttgaggtgaagcctagtgagctggaacccctacatggggtccctgggccgggcttggatccctttccccgacatgggggcctggctctgcagcctggcccacctggcctgcaccctttcccctttcatccgagcctggggcccctggagcgagaacgtctagcgctggcagctgggccagccctgcggcctgacatgtcctatgctgagcggctggcagctgagaggcagcacgcagaaagggtggcggccctgggcaatgacccactggcccggctgcagatgctcaatcctcccctgccccgttggtgtgattatttcatctgttagatgtggctgttttgcgtagcatcgtgtgccacccctgcccctccccgatccctgtgtgcgcgccccctctgcaatgtatgccccttgccccttccccacactaataatttatatatataaatatctatatgacgctcttaaaaaaacatcccaaccaaaaccaaccaaacaaaaacatcctcacaactccccaggaaaaaaaaaaaaaactcgaggttaaagcagcagtgccaataatgagacccagctgggaaggactcggtgatacccactgggatcttttatcctttgttgcaaaagtgtggacacttttgacagcttggcagattttaactccagaagcactttatgaaatggtacactgactaatccagaagacatttccaacagtttgccagtggttcctcactacactggtactgaaagtgtaatttcttagagccaaaaaactggagaaacaaatatcctgccacctctaacaagtacatgagtacttgatttttatggtatagagcagagccttttcttcctcttcttgatagatgaggccatggtgtaaatggaagtttcagagaggacaaaataaaacggaattccatttttctctcactgtaa

SEQ ID NO: 427468 - DNA, 1462 bp, Homo sapiens
tggggggatgggcctagttgggcttggggagggatgaggaggtgcctagaggagctgggcatgggaataggagagctggagctctgcccaagagaagcacgagttttagtgtcagcctaagaggttcgaatcccaattccaccctaccactggcaacttacagaactgggtgtgttacctcactttttagttcattacctttgtatgtaaaggagctggctatcccctggtccagagcaggtacttgttatccgttggtcatatgccccttgcccttcctgctcacagctgccccttaccgggacctgccggcctccctttctgccccgatgtcagcagctcatcagctgcaggccatgcacgcacagtcagctgagctgcagcgcttggcgctggaacagcagcagtggctgcatgcccatcacccgctgcacagtgtgccgctgcctgcccaggaggactactacagtcacctgaagaaggaaagcgacaagccactgtagaacctgcgatcaagagagcaccatggctcctacattggaccttggagcacccccaccctccccccaccgtgcccttggcctgccacccagagccaagagggtgctgctcagttgcagggcctccgcagctggacagagagtgggggagggagggacagacagaaggccaaggcccgatgtggtgtgcagaggtggggaggtggcgaggatggggacagaaagcgcacagaatcttggaccaggtctctcttccttgtcccccctgcttttctcctcccccatgcccaacccctgtggccgccgcccctcccctgccccgttggtgtgattatttcatctgttagatgtggctgttttgcgtagcatcgtgtgccacccctgcccctccccgatccctgtgtgcgcgccccctctgcaatgtatgccccttgccccttccccacactaataatttatatatataaatatctatatgacgctcttaaaaaaacatcccaaccaaaaccaaccaaacaaaaacatcctcacaactccccaggaaaaaaaaaaaaaactcgaggttaaagcagcagtgccaataatgagacccagctgggaaggactcggtgatacccactgggatcttttatcctttgttgcaaaagtgtggacacttttgacagcttggcagattttaactccagaagcactttatgaaatggtacactgactaatccagaagacatttccaacagtttgccagtggttcctcactacactggtactgaaagtgtaatttcttagagccaaaaaactggagaaacaaatatcctgccacctctaacaagtacatgagtacttgatttttatggtatagagcagagccttttcttcctcttcttgatagatgaggccatggtgtaaatggaagtttcagagaggacaaaataaaacggaattccatttttctctcactgtaa

SEQ ID NO: 427469 - DNA, 3019 bp, Homo sapiens
ctgccgccgccgccccccagaggcgccggagcccggaatcccgctcggagccagccagccgtcccgagctaccagcaggtttcattgaaaacagatcctgcaaaagttccaggtgcccacactggaaacttggagatcctgcttcccagaccacagctgtggggaacttggggtggagcagagaagtttctgtattcagctgcccaggcagaggagaatggggtctccacagcctgaagaatgaagacacgacagaataaagactcgatgtcaatgaggagtggacggaagaaagaggcccctgggccccgggaagaactgagatcgaggggccgggcctcccctggaggggtcagcacgtccagcagtgatggcaaagctgagaagtccaggcagacagccaagaaggcccgagtagaggaagcctccaccccaaaggtcaacaagcagggtcggagtgaggagatctcagagagtgaaagtgaggagaccaatgcaccaaaaaagaccaaaactgagcaggaactccctcggccacagtctccctccgatctggatagcttggacgggcggagccttaatgatgatggcagcagcgaccctagggatatcgaccaggacaaccgaagcacgtcccccagtatctacagccctggaagtgtggagaatgactctgactcatcttctggcctgtcccagggcccagcccgcccctaccacccacctccactctttcctccttcccctcaaccgccagacagcacccctcgacagccagaggctagctttgaaccccatccttctgtgacacccactggatatcatgctcccatggagccccccacatctcgaatgttccaggctcctcctggggcccctccccctcacccacagctctatcctgggggcactggtggagttttgtctggacccccaatgggtcccaaggggggaggggctgcctcatcagtggggggccctaatgggggtaagcagcaccccccacccactactcccatttcagtatcaagctctggggctagtggtgctcccccaacaaagccgcctaccactccagtgggtggtgggaacctaccttctgctccaccaccagccaacttcccccatgtgacaccgaacctgcctcccccacctgccctgagacccctcaacaatgcatcagcctctccccctggcctgggggcccaaccactacctggtcatctgccctctccccacgccatgggacagggtatgggtggacttcctcctggcccagagaagggcccaactctggctccttcaccccactctctgcctcctgcttcctcttctgctccagcgccccccatgaggtttccttattcatcctctagtagtagctctgcagcagcctcctcttccagttcttcctcctcttcctctgcctcccccttcccagcttcccaggcattgcccagctacccccactctttccctcccccaacaagcctctctgtctccaatcagccccccaagtatactcagccttctctcccatcccaggctgtgtggagccagggtcccccaccacctcctccctatggccgcctcttagccaacagcaatgcccatccaggccccttccctccctctactggggcccagtccaccgcccacccaccagtctcaacacatcaccatcaccaccagcaacagcaacagcagcagcagcagcagcagcagcagcagcagcagcagcagcatcacggaaactctgggccccctcctcctggagcatttccccacccactggagggcggtagctcccaccacgcacacccttacgccatgtctccctccctggggtctctgaggccctacccaccagggccagcacacctgcccccacctcacagccaggtgtcctacagccaagcaggccccaatggccctccagtctcttcctcttccaactcttcctcttccacttctcaagggtcctacccatgttcacacccctccccttcccagggccctcaaggggcgccctaccctttcccaccggtgcctacggtcaccacctcttcggctaccctttccacggtcattgccaccgtggcttcctcgccagcaggctacaaaacggcctccccacctgggcccccaccgtacggaaagagagccccgtccccgggggcctacaagacagccaccccacccggatacaaacccgggtcgcctccctccttccgaacggggaccccaccgggctatcgaggaacctcgccacctgcaggcccagggaccttcaagccgggctcgcccaccgtgggacctgggcccctgccacctgcggggccctcaggcctgccatcgctgccaccaccacctgcggcccctgcctcagggccgcccctgagcgccacgcagatcaaacaggagccggctgaggagtatgagacccccgagagcccggtgcccccagcccgcagcccctcgccccctcccaaggtggtagatgtacccagccatgccagtcagtctgccaggttcaacaaacacctggatcgcggcttcaactcgtgcgcgcgcagcgacctgtacttcgtgccactggagggctccaagctggccaagaagcgggccgacctggtggagaaggtgcggcgcgaggccgagcagcgcgcgcgcgaagaaaaggagcgcgagcgcgagcgggaacgcgagaaagagcgcgagcgcgagaaggagcgcgagcttgaacgcagcgtgaagttggctcaggagggccgtgctccggtggaatgcccatctctgggcccagtgccccatcgccctccatttgaaccgggcagtgcggtggctacagtgcccccctacctgggtcctgacactccagccttgcgcactctcagtgaatatgcccggcctcatgtcatgtctcctggcaatcgcaagtctgatcacgtctgtcctgggcagtgggtccctattgtcctcatcctgagtccatctccctagctgggcccccgtgctg

SEQ ID NO: 427470 - DNA, 2286 bp, Homo sapiens
ctgccgccgccgccccccagaggcgccggagcccggaatcccgctcggagccagccagccgtcccgagctaccagcaggtttcattgaaaacagatcctgcaaaagttccaggtgcccacactggaaacttggagatcctgcttcccagaccacagctgtggggaacttggggtggagcagagaagtttctgtattcagctgcccaggcagaggagaatggggtctccacagcctgaagaatgaagacacgacagaataaagactcgatgtcaatgaggagtggacggaagaaagaggcccctgggccccgggaagaactgagatcgaggggccgggcctcccctggaggggtcagcacgtccagcagtgatggcaaagctgagaagtccaggcagacagccaagaaggcccgagtagaggaagcctccaccccaaaggtcaacaagcagggtcggagtgaggagatctcagagagtgaaagtgaggagaccaatgcaccaaaaaagaccaaaactgagcaggaactccctcggccacagtctccctccgatctggatagcttggacgggcggagccttaatgatgatggcagcagcgaccctagggatatcgaccaggacaaccgaagcacgtcccccagtatctacagccctggaagtgtggagaatgactctgactcatcttctggcctgtcccagggcccagcccgcccctaccacccacctccactctttcctccttcccctcaaccgccagacagcacccctcgacagccagaggctagctttgaaccccatccttctgtgacacccactggatatcatgctcccatggagccccccacatctcgaatgttccaggctcctcctggggcccctccccctcacccacagctctatcctgggggcactggtggagttttgtctggacccccaatgggtcccaaggggggaggggctgcctcatcagtggggggccctaatgggggtaagcagcaccccccacccactactcccatttcagtatcaagctctggggctagtggtgctcccccaacaaagccgcctaccactccagtgggtggtgggaacctaccttctgctccaccaccagccaacttcccccatgtgacaccgaacctgcctcccccacctgccctgagacccctcaacaatgcatcagcctctccccctggcctgggggcccaaccactacctggtcatctgccctctccccacgccatgggacagggtatgggtggacttcctcctggcccagagaagggcccaactctggctccttcaccccactctctgcctcctgcttcctcttctgctccagcgccccccatgaggtttccttattcatcctctagtagtagctctgcagcagcctcctcttccagttcttcctcctcttcctctgcctcccccttcccagcttcccaggcattgcccagctacccccactctttccctcccccaacaagcctctctgtctccaatcagccccccaagtatactcagccttctctcccatcccaggctgtgtggagccagggtcccccaccacctcctccctatggccgcctcttagccaacagcaatgcccatccaggccccttccctccctctactggggcccagtccaccgcccacccaccagtctcaacacatcaccatcaccaccagcaacagcaacagcagcagcagcagcagcagcagcagcagcagcagcagcagcatcacggaaactctgggccccctcctcctggagcatttccccacccactggagggcggtagctcccaccacgcacacccttacgccatgtctccctccctggggtctctgaggccctacccaccagggccagcacacctgcccccacctcacagccaggtgtcctacagccaagcaggccccaatggccctccagtctcttcctcttccaactcttcctcttccacttctcaagggtcctacccatgttcacacccctccccttcccagggccctcaaggggcgccctaccctttcccaccggtgcctacggtcaccacctcttcggctaccctttccacggtcattgccaccgtggcttcctcgccagcaggctacaaaacggcctccccacctgggcccccaccgtacggaaagagagccccgtccccgggggcctacaagacagccaccccacagagagagcgtcgacgctctctctgtgggggggtgtggagtgagcaggagcagctgaaacaacgctgggcacggaggataactgct

SEQ ID NO: 427471 - DNA, 2150 bp, Homo sapiens
ctgccgccgccgccccccagaggcgccggagcccggaatcccgctcggagccagccagccgtcccgagctaccagcaggtttcattgaaaacagatcctgcaaaagttccaggtgcccacactggaaacttggagatcctgcttcccagaccacagctgtggggaacttggggtggagcagagaagtttctgtattcagctgcccaggcagaggagaatggggtctccacagcctgaagaatgaagacacgacagaataaagactcgatgtcaatgaggagtggacggaagaaagaggcccctgggccccgggaagaactgagatcgaggggccgggcctcccctggaggggtcagcacgtccagcagtgatggcaaagctgagaagtccaggcagacagccaagaaggcccgagtagaggaagcctccaccccaaaggtcaacaagcagggtcggagtgaggagatctcagagagtgaaagtgaggagaccaatgcaccaaaaaagaccaaaactgagcaggaactccctcggccacagtctccctccgatctggatagcttggacgggcggagccttaatgatgatggcagcagcgaccctagggatatcgaccaggacaaccgaagcacgtcccccagtatctacagccctggaagtgtggagaatgactctgactcatcttctggcctgtcccagggcccagcccgcccctaccacccacctccactctttcctccttcccctcaaccgccagacagcacccctcgacagccagaggctagctttgaaccccatccttctgtgacacccactggatatcatgctcccatggagccccccacatctcgaatgttccaggctcctcctggggcccctccccctcacccacagctctatcctgggggcactggtggagttttgtctggacccccaatgggtcccaaggggggaggggctgcctcatcagtggggggccctaatgggggtaagcagcaccccccacccactactcccatttcagtatcaagctctggggctagtggtgctcccccaacaaagccgcctaccactccagtgggtggtgggaacctaccttctgctccaccaccagccaacttcccccatgtgacaccgaacctgcctcccccacctgccctgagacccctcaacaatgcatcagcctctccccctggcctgggggcccaaccactacctggtcatctgccctctccccacgccatgggacagggtatgggtggacttcctcctggcccagagaagggcccaactctggctccttcaccccactctctgcctcctgcttcctcttctgctccagcgccccccatgaggtttccttattcatcctctagtagtagctctgcagcagcctcctcttccagttcttcctcctcttcctctgcctcccccttcccagcttcccaggcattgcccagctacccccactctttccctcccccaacaagcctctctgtctccaatcagccccccaagtatactcagccttctctcccatcccaggctgtgtggagccagggtcccccaccacctcctccctatggccgcctcttagccaacagcaatgcccatccaggccccttccctccctctactggggcccagtccaccgcccacccaccagtctcaacacatcaccatcaccaccagcaacagcaacagcagcagcagcagcagcagcagcagcagcagcagcagcagcatcacggaaactctgggccccctcctcctggagcatttccccacccactggagggcggtagctcccaccacgcacacccttacgccatgtctccctccctggggtctctgaggccctacccaccagggccagcacacctgcccccacctcacagccaggtgtcctacagccaagcaggccccaatggccctccagtctcttcctcttccaactcttcctcttccacttctcaagggtcctacccatgttcacacccctccccttcccagggccctcaaggggcgccctaccctttcccaccggtgcctacggtcaccacctcttcggctaccctttccacggtcattgccaccgtggcaagggtagccgaagaggtggtgaccgtagacacctggctgtgaggtgc

SEQ ID NO: 427472 - DNA, 2186 bp, Homo sapiens
ctgccgccgccgccccccagaggcgccggagcccggaatcccgctcggagccagccagccgtcccgagctaccagcaggtttcattgaaaacagatcctgcaaaagttccaggtgcccacactggaaacttggagatcctgcttcccagaccacagctgtggggaacttggggtggagcagagaagtttctgtattcagctgcccaggcagaggagaatggggtctccacagcctgaagaatgaagacacgacagaataaagactcgatgtcaatgaggagtggacggaagaaagaggcccctgggccccgggaagaactgagatcgaggggccgggcctcccctggaggggtcagcacgtccagcagtgatggcaaagctgagaagtccaggcagacagccaagaaggcccgagtagaggaagcctccaccccaaaggtcaacaagcagggtcggagtgaggagatctcagagagtgaaagtgaggagaccaatgcaccaaaaaagaccaaaactgagcaggaactccctcggccacagtctccctccgatctggatagcttggacgggcggagccttaatgatgatggcagcagcgaccctagggatatcgaccaggacaaccgaagcacgtcccccagtatctacagccctggaagtgtggagaatgactctgactcatcttctggcctgtcccagggcccagcccgcccctaccacccacctccactctttcctccttcccctcaaccgccagacagcacccctcgacagccagaggctagctttgaaccccatccttctgtgacacccactggatatcatgctcccatggagccccccacatctcgaatgttccaggctcctcctggggcccctccccctcacccacagctctatcctgggggcactggtggagttttgtctggacccccaatgggtcccaaggggggaggggctgcctcatcagtggggggccctaatgggggtaagcagcaccccccacccactactcccatttcagtatcaagctctggggctagtggtgctcccccaacaaagccgcctaccactccagtgggtggtgggaacctaccttctgctccaccaccagccaacttcccccatgtgacaccgaacctgcctcccccacctgccctgagacccctcaacaatgcatcagcctctccccctggcctgggggcccaaccactacctggtcatctgccctctccccacgccatgggacagggtatgggtggacttcctcctggcccagagaagggcccaactctggctccttcaccccactctctgcctcctgcttcctcttctgctccagcgccccccatgaggtttccttattcatcctctagtagtagctctgcagcagcctcctcttccagttcttcctcctcttcctctgcctcccccttcccagcttcccaggcattgcccagctacccccactctttccctcccccaacaagcctctctgtctccaatcagccccccaagtatactcagccttctctcccatcccaggctgtgtggagccagggtcccccaccacctcctccctatggccgcctcttagccaacagcaatgcccatccaggccccttccctccctctactggggcccagtccaccgcccacccaccagtctcaacacatcaccatcaccaccagcaacagcaacagcagcagcagcagcagcagcagcagcagcagcagcagcagcatcacggaaactctgggccccctcctcctggagcatttccccacccactggagggcggtagctcccaccacgcacacccttacgccatgtctccctccctggggtctctgaggccctacccaccagggccagcacacctgcccccacctcacagccaggtgtcctacagccaagcagcagcagcagcagcagcagcagcagcagcagcagcagcagcatcacggaaactctgggccccgccacatgcccatgcgcctgggcaagtccaagcttgtgtacgccgccaacccgcgagcgtgggaagcgggcccgagactcagggcctcaccccaccgcaaaccggacccacgcccccgccgtgtaagcggacacgacgggtgtgcggtccgccccctacgccccatgggggctggttcggtcagtggaaagcgggcccccctga

SEQ ID NO: 427473 - DNA, 1973 bp, Homo sapiens
ctgccgccgccgccccccagaggcgccggagcccggaatcccgctcggagccagccagccgtcccgagctaccagcaggtttcattgaaaacagatcctgcaaaagttccaggtgcccacactggaaacttggagatcctgcttcccagaccacagctgtggggaacttggggtggagcagagaagtttctgtattcagctgcccaggcagaggagaatggggtctccacagcctgaagaatgaagacacgacagaataaagactcgatgtcaatgaggagtggacggaagaaagaggcccctgggccccgggaagaactgagatcgaggggccgggcctcccctggaggggtcagcacgtccagcagtgatggcaaagctgagaagtccaggcagacagccaagaaggcccgagtagaggaagcctccaccccaaaggtcaacaagcagggtcggagtgaggagatctcagagagtgaaagtgaggagaccaatgcaccaaaaaagaccaaaactgagcaggaactccctcggccacagtctccctccgatctggatagcttggacgggcggagccttaatgatgatggcagcagcgaccctagggatatcgaccaggacaaccgaagcacgtcccccagtatctacagccctggaagtgtggagaatgactctgactcatcttctggcctgtcccagggcccagcccgcccctaccacccacctccactctttcctccttcccctcaaccgccagacagcacccctcgacagccagaggctagctttgaaccccatccttctgtgacacccactggatatcatgctcccatggagccccccacatctcgaatgttccaggctcctcctggggcccctccccctcacccacagctctatcctgggggcactggtggagttttgtctggacccccaatgggtcccaaggggggaggggctgcctcatcagtggggggccctaatgggggtaagcagcaccccccacccactactcccatttcagtatcaagctctggggctagtggtgctcccccaacaaagccgcctaccactccagtgggtggtgggaacctaccttctgctccaccaccagccaacttcccccatgtgacaccgaacctgcctcccccacctgccctgagacccctcaacaatgcatcagcctctccccctggcctgggggcccaaccactacctggtcatctgccctctccccacgccatgggacagggtatgggtggacttcctcctggcccagagaagggcccaactctggctccttcaccccactctctgcctcctgcttcctcttctgctccagcgccccccatgaggtttccttattcatcctctagtagtagctctgcagcagcctcctcttccagttcttcctcctcttcctctgcctcccccttcccagcttcccaggcattgcccagctacccccactctttccctcccccaacaagcctctctgtctccaatcagccccccaagtatactcagccttctctcccatcccaggctgtgtggagccagggtcccccaccacctcctccctatggccgcctcttagccaacagcaatgcccatccaggccccttccctccctctactggggcccagtccaccgcccacccaccagtctcaacacatcaccatcaccaccagcaacagcaacagcagcagcagcagcagcagcagcatcacggaaactctgggccccctcctcctggagcatttccccacccactggagggcggtagctcccaccacgcacacccttacgccatgtctccctccctggggtctctgaggccctacccaccagggccagcacacctgcccccacaatcctaggcctacccgccgcagtactgatcattctatttccccctctattgatccccacctccaaatatctcatcaacaaccgactaatcaccacccaa

SEQ ID NO: 427474 - DNA, 1990 bp, Homo sapiens
ctgccgccgccgccccccagaggcgccggagcccggaatcccgctcggagccagccagccgtcccgagctaccagcaggtttcattgaaaacagatcctgcaaaagttccaggtgcccacactggaaacttggagatcctgcttcccagaccacagctgtggggaacttggggtggagcagagaagtttctgtattcagctgcccaggcagaggagaatggggtctccacagcctgaagaatgaagacacgacagaataaagactcgatgtcaatgaggagtggacggaagaaagaggcccctgggccccgggaagaactgagatcgaggggccgggcctcccctggaggggtcagcacgtccagcagtgatggcaaagctgagaagtccaggcagacagccaagaaggcccgagtagaggaagcctccaccccaaaggtcaacaagcagggtcggagtgaggagatctcagagagtgaaagtgaggagaccaatgcaccaaaaaagaccaaaactgagcaggaactccctcggccacagtctccctccgatctggatagcttggacgggcggagccttaatgatgatggcagcagcgaccctagggatatcgaccaggacaaccgaagcacgtcccccagtatctacagccctggaagtgtggagaatgactctgactcatcttctggcctgtcccagggcccagcccgcccctaccacccacctccactctttcctccttcccctcaaccgccagacagcacccctcgacagccagaggctagctttgaaccccatccttctgtgacacccactggatatcatgctcccatggagccccccacatctcgaatgttccaggctcctcctggggcccctccccctcacccacagctctatcctgggggcactggtggagttttgtctggacccccaatgggtcccaaggggggaggggctgcctcatcagtggggggccctaatgggggtaagcagcaccccccacccactactcccatttcagtatcaagctctggggctagtggtgctcccccaacaaagccgcctaccactccagtgggtggtgggaacctaccttctgctccaccaccagccaacttcccccatgtgacaccgaacctgcctcccccacctgccctgagacccctcaacaatgcatcagcctctccccctggcctgggggcccaaccactacctggtcatctgccctctccccacgccatgggacagggtatgggtggacttcctcctggcccagagaagggcccaactctggctccttcaccccactctctgcctcctgcttcctcttctgctccagcgccccccatgaggtttccttattcatcctctagtagtagctctgcagcagcctcctcttccagttcttcctcctcttcctctgcctcccccttcccagcttcccaggcattgcccagctacccccactctttccctcccccaacaagcctctctgtctccaatcagccccccaagtatactcagccttctctcccatcccaggctgtgtggagccagggtcccccaccacctcctccctatggccgcctcttagccaacagcaatgcccatccaggccccttccctccctctactggggcccagtccaccgcccacccaccagtctcaacacatcaccatcaccaccagcaacagcaacagcagcagcagcagcagcagcagcagcagcagcagcagcagcagcagcagcagcagcagcagcatcacggaaactctgggccccgccacatgcccatgcgcctgggcaagtccaagcttgtgtacgccgccaacccgcgagcgtgggaagcgggcccgagactcagggcctcaccccaccgcaaaccggacccacgcccccgccgtgtaagcggacacgacgggtgtgcggtccgccccctacgccccatgggggctggttcggtcagtggaaagcgggcccccctga

SEQ ID NO: 427475 - DNA, 1570 bp, Homo sapiens
  misc_feature (1524)..(1524): n is a, c, g, or t
ctgccgccgccgccccccagaggcgccggagcccggaatcccgctcggagccagccagccgtcccgagctaccagcaggtttcattgaaaacagatcctgcaaaagttccaggtgcccacactggaaacttggagatcctgcttcccagaccacagctgtggggaacttggggtggagcagagaagtttctgtattcagctgcccaggcagaggagaatggggtctccacagcctgaagaatgaagacacgacagaataaagactcgatgtcaatgaggagtggacggaagaaagaggcccctgggccccgggaagaactgagatcgaggggccgggcctcccctggaggggtcagcacgtccagcagtgatggcaaagctgagaagtccaggcagacagccaagaaggcccgagtagaggaagcctccaccccaaaggtcaacaagcagggtcggagtgaggagatctcagagagtgaaagtgaggagaccaatgcaccaaaaaagaccaaaactgagcaggaactccctcggccacagtctccctccgatctggatagcttggacgggcggagccttaatgatgatggcagcagcgaccctagggatatcgaccaggacaaccgaagcacgtcccccagtatctacagccctggaagtgtggagaatgactctgactcatcttctggcctgtcccagggcccagcccgcccctaccacccacctccactctttcctccttcccctcaaccgccagacagcacccctcgacagccagaggctagctttgaaccccatccttctgtgacacccactggatatcatgctcccatggagccccccacatctcgaatgttccaggctcctcctggggcccctccccctcacccacagctctatcctgggggcactggtggagttttgtctggacccccaatgggtcccaaggggggaggggctgcctcatcagtggggggccctaatgggggtaagcagcaccccccacccactactcccatttcagtatcaagctctggggctagtggtgctcccccaacaaagccgcctaccactccagtgggtggtgggaacctaccttctgctccaccaccagccaacttcccccatgtgacaccgaacctgcctcccccacctgccctgagacccctcaacaatgcatcagcctctccccctggcctgggggcccaaccactacctggtcatctgccctctccccacgccatgggacagggtatgggtggacttcctcctggcccagagaagggcccaactctggctccttcaccccactctctgcctcctgcttcctcttctgctccagcgccccccatgaggtttccttattcatcctctagtagtagctctgcagcagcctcctcttccagttcttcctcctcttcctctgcctcccccttcccagcttcccaggcattgcccagctacccccactctttccctcccccaacaagcctctctgtctccaatcagcccccagcatcacangtgacacacccctcttcctgtcacaaatgcttcctcagtacccaca

SEQ ID NO: 427476 - DNA, 1578 bp, Homo sapiens
  misc_feature (1511)..(1511): n is a, c, g, or t
ctgccgccgccgccccccagaggcgccggagcccggaatcccgctcggagccagccagccgtcccgagctaccagcaggtttcattgaaaacagatcctgcaaaagttccaggtgcccacactggaaacttggagatcctgcttcccagaccacagctgtggggaacttggggtggagcagagaagtttctgtattcagctgcccaggcagaggagaatggggtctccacagcctgaagaatgaagacacgacagaataaagactcgatgtcaatgaggagtggacggaagaaagaggcccctgggccccgggaagaactgagatcgaggggccgggcctcccctggaggggtcagcacgtccagcagtgatggcaaagctgagaagtccaggcagacagccaagaaggcccgagtagaggaagcctccaccccaaaggtcaacaagcagggtcggagtgaggagatctcagagagtgaaagtgaggagaccaatgcaccaaaaaagaccaaaactgagcaggaactccctcggccacagtctccctccgatctggatagcttggacgggcggagccttaatgatgatggcagcagcgaccctagggatatcgaccaggacaaccgaagcacgtcccccagtatctacagccctggaagtgtggagaatgactctgactcatcttctggcctgtcccagggcccagcccgcccctaccacccacctccactctttcctccttcccctcaaccgccagacagcacccctcgacagccagaggctagctttgaaccccatccttctgtgacacccactggatatcatgctcccatggagccccccacatctcgaatgttccaggctcctcctggggcccctccccctcacccacagctctatcctgggggcactggtggagttttgtctggacccccaatgggtcccaaggggggaggggctgcctcatcagtggggggccctaatgggggtaagcagcaccccccacccactactcccatttcagtatcaagctctggggctagtggtgctcccccaacaaagccgcctaccactccagtgggtggtgggaacctaccttctgctccaccaccagccaacttcccccatgtgacaccgaacctgcctcccccacctgccctgagacccctcaacaatgcatcagcctctccccctggcctgggggcccaaccactacctggtcatctgccctctccccacgccatgggacagggtatgggtggacttcctcctggcccagagaagggcccaactctggctccttcaccccactctctgcctcctgcttcctcttctgctccagcgccccccatgaggtttccttattcatcctctagtagtagctctgcagcagcctcctcccgagttcaagtgattcttgtgtctgagcctcccaagtagctgggattacaggtgcaagccgaccacacccgagctattttcagtatgttgagcagatccgggcgttgccntcatgtcggccaggcgggccttgaactccgtagcctcaggtggccgcccaccttgcgtcccaaagtg

SEQ ID NO: 427477 - DNA, 774 bp, Homo sapiens
ggtgatgggcatgcagccactgctgctgttccagcgccaagcgctgcagctcagctgactgtgcgtgcatggcctgcagctgatgagctgctgacatcggggcagaaagggaggccggcacctcccctgccccgttggtgtgattatttcatctgttagatgtggctgttttgcgtagcatcgtgtgccacccctgcccctccccgatccctgtgtgcgcgccccctctgcaatgtatgccccttgccccttccccacactaataatttatatatataaatatctatatgacgctcttaaaaaaacatcccaaccaaaaccaaccaaacaaaaacatcctcacaactccccaggaaaaaaaaaaaaaactcgaggttaaagcagcagtgccaataatgagacccagctgggaaggactcggtgatacccactgggatcttttatcctttgttgcaaaagtgtggacacttttgacagcttggcagattttaactccagaagcactttatgaaatggtacactgactaatccagaagacatttccaacagtttgccagtggttcctcactacactggtactgaaagtgtaatttcttagagccaaaaaactggagaaacaaatatcctgccacctctaacaagtacatgagtacttgatttttatggtatagagcagagccttttcttcctcttcttgatagatgaggccatggtgtaaatggaagtttcagagaggacaaaataaaacggaattccatttttctctcactgtaa

SEQ ID NO: 427478 - DNA, 4873 bp, Homo sapiens
ggctcgagcggccgcccgggcaggttgagatcgtgtttcatttcaggaagatatatgcgtcaggaaaatttctatcttcttttgtattatcaaggagatatttggagcagagtcaaccctctcagttacataaaataaaaaatggcatattcttggcaaacggatccaaatcctaatgaatcacacgaaaagcagtatgaacaccaagaatttctctttgtaaatcaaccccattcttctagccaagtcagtctgggttttgatcagatagtagatgagatcagtggcaaaattccacactacgagagtgaaattgatgaaaacaccttttttgtgcccactgcaccaaaatgggactcaacagggcattcattaaatgaagcacaccaaatatccttgaatgaattcacttctaaaagccgtgaactctcctggcatcaagttagcaaagcaccagcaattggttttagtccttctgtgttaccaaaacctcaaaatacgaataaagaatgctcctggggaagccccataggaaaacatcatggtgctgatgattccagattcagtattttagctccatcattcacaagtttggataaaattaatctagagaaagaattagaaaatgaaaatcataactaccatataggatttgaaagtagcattcctccaacaaattcatccttctcaagtgacttcatgccgaaagaagagaataaaaggagtggacatgtgaacattgtggaaccatctttgatgcttttgaaaggctctcttcaacccggaatgtgggaaagtacatggcagaagaatatagagtcaataggttgttccattcagctagtggaagtacctcaaagcagcaatacgagtctggcctctttttgcaacaaagtaaaaaaaatcagagaaagatatcatgcagctgatgttaatttcaattctgggaagatctggagcactactacagcatttccgtatcagctcttttctaagaccaagtttaatatacatatttttattgataactcaacacaacctcttcattttatgccatgtgctaattatcttgtcaaagatctaattgcagaaattctgcatttttgcacaaatgaccagctactccccaaagatcatattctaagtgtatgtggctctgaagaatttttacaaaacgaccactgtttggggagccacaaaatgtttcaaaaagataaatctgttattcagctccacctgcagaaaagtagggaagctccaggaaagctatctcgaaagcatgaagaggaccacagtcagttttatctgaatcaacttctagaatttatgcatatttggaaagtatccagacaatgtctcttaacactcatcagaaaatatgacttccacctgaaatacctattgaaaacccaggaaaacgtgtataatattattgaagaagttaaaaaaatatgcagtgttctagggtgtgtggaaaccaaacaaattacagatgcagtaaatgaactaagtctaattcttcagagaaaaggagagaatttttatcaaagttcagagacttcagcaaaaggcttgatagagaaggtaacaactgaactatccacatccatctaccagctaatcaatgtctactgtaacagcttttatgcagattttcagcctgtaaatgtacctagatgcacttcctatctaaatcccgggcttccttcccacctcagcttcacagtgtatgcagcacacaacattccagaaacctgggtgcacaggatcaattttccccttgaaataaagtcacttccaagggaatccatgctcactgtaaaactgtttgggattgcctgtgcaaccaacaatgcaaatttactggcgtggacttgtcttccactgtttccaaaagaaaaatccattctcgggtctatgctgttcagcatgacattacagagtgagcctcccgtagaaatgataactccaggagtgtgggatgtaagtcagccatccccggtgaccctgcagattgattttccagctactgggtgggagtatatgaaacctgattctgaagagaatagaagtaatcttgaagagccactaaaggagtgtataaaacatattgccagactttcacagaaacagactcccctactactctctgaagaaaagaaaagatatttatggttttatcgcttctactgcaataatgaaaactgctcccttcctttagtcctgggtagtgcccctggatgggatgaaaggactgtttcagaaatgcataccattttgagaagatggacattttctcaacctttagaggctcttgggcttttgacttccagttttccagatcaagaaattcgtaaagtggcagttcaacaattagacaacctcttgaatgatgaactactggaatatctcccacagctagttcaggctgtcaagtttgaatggaaccttgagagtcctttagtgcaacttctactccaccgctccttgcagagcatccaggttgcccatcgtctttactggctgctaaaaaatgcagaaaatgaagcttattttaaaagctggtatcagaagctactagctgctctccaattctgtgcaggtaaagccttgaatgatgagttttccaaggagcagaaacttatcaaaattctgggagatattggggaaagagtcaagtctgccagtgaccatcaaagacaggaggtactgaagaaagaaattggcagactagaagagttctttcaagatgtaaatacttgtcatcttcctctgaaccctgccctatgtataaaagggattgatcacgatgcatgttcatattttacatctaatgctttgccattgaagattactttcatcaatgctaatctgatgggcaaaaacatcagcattatttttaaggctggagatgatcttcgtcaggatatgcttgttctgcagcttattcaagtgatggacaatatttggctgcaggaaggcttggatatgcaaatgatcatttatagatgtctatccacaggaaaagaccaacgattggtgcagatggtacctgatgctgtgaccctagcaaagattcatcgccattctggactgataggaccattgaaagaaaataccattaaaaagtggttcagtcagcacaaccacttaaaggcagattatgaaaaggccttgaggaactttttctactcctgtgctggctggtgtgtggtaacattcatcctgggagtatgtgaccgtcacaatgataatatcatgctgacaaagtcgggccacatgtttcatattgactttggaaaattcttaggtcatgcacaaacatttggagggataaaaagggaccgagctcctttcatttttacttcagagatggaatactttattacagagggtgggaaaaacccacagcattttcaagattttgtggaactttgctgtcgtgcttataatattatcagaaagcacagccaactgctcttgaacctgctggaaatgatgctgtatgcaggactgcctgagctaagtggaattcaagacctgaaatatgtgtataataatcttcgtccacaagacacagacctggaagcaacaagtcattttaccaagaaaataaaggaaagtctggagtgtttccctgttaaattgaataacttgatccacacacttgcacaaatgtcagccataagccctgccaaatctacttcacagacttttcctcaggaatcctgtttgctgagtacaactaggtcgattgaaagagcaacaattttagggttcagcaagaaatccagtaatctgtatctgatccaggtgacacacagcaacaacgaaacaagcctgacagaaaaatcatttgagcagttttcaaaacttcacagccaacttcagaagcagtttgcatcactgactctcccagagtttcctcattggtggcacctaccttttacaaattcagatcacagaagattcagagatctaaatcattacatggaacagatattaaatgtatcacatgaagttacaaacagtgattgtgtacttagctttttcctctctgaggctgtgcaacaaacagttgaatcatcacctgtgtacctaggtgagaagaagtttccagacaagaagcctaaggtgcagttagtcatatcctacgaggatgtgaagctgaccatactagtgaaacacatgaaaaacattcatctcccagatggctctgcgcccagtgcacatgttgaattttatcttttaccatatcccagtgaagttcgtaggaggaaaacaaaatctgttccaaaatgtacggaccccacttacaatgaaattgtagtatatgatgaagtcacagagctccaaggacatgtcttaatgcttattgtgaagagtaaaactgtatttgtgggagcaattaacatccgactctgtagtgtcccactcgataaagaaaaatggtatccattaggaaacagtataatttgaccattgctatgaacatatgcattattcattaactacttgtatttttttcacttccgggcctctgaatcacataagtaaggcatctttgttgtcaaagacagcacagggtattaaggacacagaaaaaaaatcagaattagtcttttgtgttgtttattttctacctgtgctttcattgttttttcataatcttttctccttcagtggagtactgattgcatgaaatttgatgtgtaaaataataaaagacctttattaaatcattttaatatattttaaattaaacataggtttacatttgttttaattgtgtgcctacagttaaaagcagtatttttaatgtattttataagaaagacaatcaaataaacctcatcaattaattcaagatcta

SEQ ID NO: 427479 - DNA, 4208 bp, Homo sapiens
ggctcgagcggccgcccgggcaggttgagatcgtgtttcatttcaggaagatatatgcgtcaggaaaatttctatcttcttttgtattatcaaggagatatttggagcagagtcaaccctctcagttacataaaataaaaaatggcatattcttggcaaacggatccaaatcctaatgaatcacacgaaaagcagtatgaacaccaagaatttctctttgtaaatcaaccccattcttctagccaagtcagtctgggttttgatcagatagtagatgagatcagtggcaaaattccacactacgagagtgaaattgatgaaaacaccttttttgtgcccactgcaccaaaatgggactcaacagggcattcattaaatgaagcacaccaaatatccttgaatgaattcacttctaaaagccgtgaactctcctggcatcaagttagcaaagcaccagcaattggttttagtccttctgtgttaccaaaacctcaaaatacgaataaagaatgctcctggggaagccccataggaaaacatcatggtgctgatgattccagattcagtattttagctccatcattcacaagtttggataaaattaatctagagaaagaattagaaaatgaaaatcataactaccatataggatttgaaagtagcattcctccaacaaattcatccttctcaagtgacttcatgccgaaagaagagaataaaaggagtggacatgtgaacattgtggaaccatctttgatgcttttgaaaggctctcttcaacccggaatgtgggaaagtacatggcagaagaatatagagtcaataggttgttccattcagctagtggaagtacctcaaagcagcaatacgagtctggcctctttttgcaacaaagtaaaaaaaatcagagaaagatatcatgcagctgatgttaatttcaattctgggaagatctggagcactactacagcatttccgtatcagctcttttctaagaccaagtttaatatacatatttttattgataactcaacacaacctcttcattttatgccatgtgctaattatcttgtcaaagatctaattgcagaaattctgcatttttgcacaaatgaccagctactccccaaagatcatattctaagtgtatgtggctctgaagaatttttacaaaacgaccactgtttggggagccacaaaatgtttcaaaaagataaatctgttattcagctccacctgcagaaaagtagggaagctccaggaaagctatctcgaaagcatgaagaggaccacagtcagttttatctgaatcaacttctagaatttatgcatatttggaaagtatccagacaatgtctcttaacactcatcagaaaatatgacttccacctgaaatacctattgaaaacccaggaaaacgtgtataatattattgaagaagttaaaaaaatatgcagtgttctagggtgtgtggaaaccaaacaaattacagatgcagtaaatgaactaagtctaattcttcagagaaaaggagagaatttttatcaaagttcagagacttcagcaaaaggcttgatagagaaggtaacaactgaactatccacatccatctaccagctaatcaatgtctactgtaacagcttttatgcagattttcagcctgtaaatgtacctagatgcacttcctatctaaatcccgggcttccttcccacctcagcttcacagtgtatgcagcacacaacattccagaaacctgggtgcacagctacaaagcgttttcttttacctgttggcttacatatgctggaaagaagctgtgccaagtgagaaactacagaaatattccagacaagaaattattttttttcttggtcaactggaatgaaacgatcaattttccccttgaaataaagtcacttccaagggaatccatgctcactgtaaaactgtttgggattgcctgtgcaaccaacaatgcaaatttactggcgtggacttgtcttccactgtttccaaaagaaaaatccattctcgggtctatgctgttcagcatgacattacagagtgagcctcccgtagaaatgataactccaggagtgtgggatgtaagtcagccatccccggtgaccctgcagattgattttccagctactgggtgggagtatatgaaacctgattctgaagagaatagaagtaatcttgaagagccactaaaggagtgtataaaacatattgccagactttcacagaaacagactcccctactactctctgaagaaaagaaaagatatttatggttttatcgcttctactgcaataatgaaaactgctcccttcctttagtcctgggtagtgcccctggatgggatgaaaggactgtttcagaaatgcataccattttgagaagatggacattttctcaacctttagaggctcttgggcttttgacttccagttttccagatcaagaaattcgtaaagtggcagttcaacaattagacaacctcttgaatgatgaactactggaatatctcccacagctagttcaggctgtcaagtttgaatggaaccttgagagtcctttagtgcaacttctactccaccgctccttgcagagcatccaggttgcccatcgtctttactggctgctaaaaaatgcagaaaatgaagcttattttaaaagctggtatcagaagctactagctgctctccaattctgtgcaggtaaagccttgaatgatgagttttccaaggagcagaaacttatcaaaattctgggagatattggggaaagagtcaagtctgccagtgaccatcaaagacaggaggtactgaagaaagaaattggcagactagaagagttctttcaagatgtaaatacttgtcatcttcctctgaaccctgccctatgtataaaagggattgatcacgatgcatgttcatattttacatctaatgctttgccattgaagattactttcatcaatgctaatctgatgggcaaaaacatcagcattatttttaaggctggagatgatcttcgtcaggatatgcttgttctgcagcttattcaagtgatggacaatatttggctgcaggaaggcttggatatgcaaatgatcatttatagatgtctatccacaggaaaagaccaacgattggtgcagatggtacctgatgctgtgaccctagcaaagattcatcgccattctggactgataggaccattgaaagaaaataccattaaaaagtggttcagtcagcacaaccacttaaaggcagattatgaaaaggccttgaggaactttttctactcctgtgctggctggtgtgtggtaacattcatcctgggagtatgtgaccgtcacaatgataatatcatgctgacaaagtcgggccacatgtttcatattgactttggaaaattcttaggtcatgcacaaacatttggagggataaaaagggaccgagctcctttcatttttacttcagagatggaatactttattacagagggtgggaaaaacccacagcattttcaagattttgtggaactttgctgtcgtgcttataatattatcagaaagcacagccaactgctcttgaacctgctggaaatgatgctgtatgcaggactgcctgagctaagtggaattcaagacctgaaatatgtgtataataatcttcgtccacaagacacagacctggaagcaacaagtcattttaccaagaaaataaaggaaagtctggagtgtttccctgttaaattgaataacttgatccacacacttgcacaaatgtcagccataagccctgccaaatctacttcacagacttttcctcaggaatcctgtttgctgagtacaactaggtcgattgaaagagcaacaattttagggttcagcaagaaatccagtaatctgtatctgatccaggtgacacacagcaacaacgaaacaagcctgacagaaaaatcatttgagcagttttcaaaacttcacagccaacttcagaagcagtttgcatcactgactctcccagagtttcctcattggtggcacctaccttttacaaattcagatcacagaagattcagagatctaaatcattacatggaacagatattaaatgtatcacatgaagttacaaacgtatgttataattaatttttctatttttacataaaacatcaactattttatatttt

SEQ ID NO: 427480 - DNA, 2197 bp, Homo sapiens
ggctcgagcggccgcccgggcaggttgagatcgtgtttcatttcaggaagatatatgcgtcaggaaaatttctatcttcttttgtattatcaaggagatatttggagcagagtcaaccctctcagttacataaaataaaaaatggcatattcttggcaaacggatccaaatcctaatgaatcacacgaaaagcagtatgaacaccaagaatttctctttgtaaatcaaccccattcttctagccaagtcagtctgggttttgatcagatagtagatgagatcagtggcaaaattccacactacgagagtgaaattgatgaaaacaccttttttgtgcccactgcaccaaaatgggactcaacagggcattcattaaatgaagcacaccaaatatccttgaatgaattcacttctaaaagccgtgaactctcctggcatcaagttagcaaagcaccagcaattggttttagtccttctgtgttaccaaaacctcaaaatacgaataaagaatgctcctggggaagccccataggaaaacatcatggtgctgatgattccagattcagtattttagctccatcattcacaagtttggataaaattaatctagagaaagaattagaaaatgaaaatcataactaccatataggatttgaaagtagcattcctccaacaaattcatccttctcaagtgacttcatgccgaaagaagagaataaaaggagtggacatgtgaacattgtggaaccatctttgatgcttttgaaaggctctcttcaacccggaatgtgggaaagtacatggcagaagaatatagagtcaataggttgttccattcagctagtggaagtacctcaaagcagcaatacgagtctggcctctttttgcaacaaagtaaaaaaaatcagagaaagatatcatgcagctgatgttaatttcaattctgggaagatctggagcactactacagcatttccgtatcagctcttttctaagaccaagtttaatatacatatttttattgataactcaacacaacctcttcattttatgccatgtgctaattatcttgtcaaagatctaattgcagaaattctgcatttttgcacaaatgaccagctactccccaaagatcatattctaagtgtatgtggctctgaagaatttttacaaaacgaccactgtttggggagccacaaaatgtttcaaaaagataaatctgttattcagctccacctgcagaaaagtagggaagctccaggaaagctatctcgaaagcatgaagaggaccacagtcagttttatctgaatcaacttctagaatttatgcatatttggaaagtatccagacaatgtctcttaacactcatcagaaaatatgacttccacctgaaatacctattgaaaacccaggaaaacgtgtataatattattgaagaagttaaaaaaatatgcagtgttctagggtgtgtggaaaccaaacaaattacagatgcagtaaatgaactaagtctaattcttcagagaaaaggagagaatttttatcaaagttcagagacttcagcaaaaggcttgatagagaaggtaacaactgaactatccacatccatctaccagctaatcaatgtctactgtaacagcttttatgcagattttcagcctgtaaatgtacctagatgcacttcctatctaaatcccgggcttccttcccacctcagcttcacagtgtatgcagcacacaacattccagaaacctgggtgcacagctacaaagcgttttcttttacctgttggcttacatatgctggaaagaagctgtgccaagtgagaaactacagaaatattccagacaagaaattattttttttcttggtcaactggaatgaaacgatcaattttccccttgaaataaagtcacttccaagggaatccatgctcactgtaaaactgtttgggattgcctgtgcaaccaacaatgcaaatttactggcgtggacttgtcttccactgtttccaaaagagagcagctatacaagtgtctttccttctcatgagtgagtttccttaaagttttacctgcagtatttgtaagatctaccattttttgtagaatatttctagctagtcactgaaaataaaaaaaggttaagtccattttactctcccatcatgtaacacactacttgcacatatcaat

SEQ ID NO: 427481 - DNA, 568 bp, Homo sapiens
agtctgacattaacctatctattccagggtataagatattagcagctaattttttttattaaaagcaatactcaaaaaagagatgtatttaagcatttctgatttatattttcattattttctccgtttttaggtagtatatgatgaagtcacagagctccaaggacatgtcttaatgcttattgtgaagagtaaaactgtatttgtgggagcaattaacatccgactctgtagtgtcccactcgataaagaaaaatggtatccattaggaaacagtataatttgaccattgctatgaacatatgcattattcattaactacttgtatttttttcacttccgggcctctgaatcacataagtaaggcatctttgttgtcaaagacagcacagggtattaaggacacagaaaaaaaatcagaattagtcttttgtgttgtttattttctacctgtgctttcattgttttttcataatcttttctccttcagtggagtactgattgcatgaaatttgatgtgtaaaataataaaagacctttattaaatcattttaatatattttaaatt

SEQ ID NO: 427482 - DNA, 5098 bp, Homo sapiens
ggctcgagcggccgcccgggcaggttgagatcgtgtttcatttcaggaagatatatgcgtcaggaaaatttctatcttcttttgtattatcaaggagatatttggagcagagtcaaccctctcagttacataaaataaaaaatggcatattcttggcaaacggatccaaatcctaatgaatcacacgaaaagcagtatgaacaccaagaatttctctttgtaaatcaaccccattcttctagccaagtcagtctgggttttgatcagatagtagatgagatcagtggcaaaattccacactacgagagtgaaattgatgaaaacaccttttttgtgcccactgcaccaaaatgggactcaacagggcattcattaaatgaagcacaccaaatatccttgaatgaattcacttctaaaagccgtgaactctcctggcatcaagttagcaaagcaccagcaattggttttagtccttctgtgttaccaaaacctcaaaatacgaataaagaatgctcctggggaagccccataggaaaacatcatggtgctgatgattccagattcagtattttagctccatcattcacaagtttggataaaattaatctagagaaagaattagaaaatgaaaatcataactaccatataggatttgaaagtagcattcctccaacaaattcatccttctcaagtgacttcatgccgaaagaagagaataaaaggagtggacatgtgaacattgtggaaccatctttgatgcttttgaaaggctctcttcaacccggaatgtgggaaagtacatggcagaagaatatagagtcaataggttgttccattcagctagtggaagtacctcaaagcagcaatacgagtctggcctctttttgcaacaaagtaaaaaaaatcagagaaagatatcatgcagctgatgttaatttcaattctgggaagatctggagcactactacagcatttccgtatcagctcttttctaagaccaagtttaatatacatatttttattgataactcaacacaacctcttcattttatgccatgtgctaattatcttgtcaaagatctaattgcagaaattctgcatttttgcacaaatgaccagctactccccaaagatcatattctaagtgtatgtggctctgaagaatttttacaaaacgaccactgtttggggagccacaaaatgtttcaaaaagataaatctgttattcagctccacctgcagaaaagtagggaagctccaggaaagctatctcgaaagcatgaagaggaccacagtcagttttatctgaatcaacttctagaatttatgcatatttggaaagtatccagacaatgtctcttaacactcatcagaaaatatgacttccacctgaaatacctattgaaaacccaggaaaacgtgtataatattattgaagaagttaaaaaaatatgcagtgttctagggtgtgtggaaaccaaacaaattacagatgcagtaaatgaactaagtctaattcttcagagaaaaggagagaatttttatcaaagttcagagacttcagcaaaaggcttgatagagaaggtaacaactgaactatccacatccatctaccagctaatcaatgtctactgtaacagcttttatgcagattttcagcctgtaaatgtacctagatgcacttcctatctaaatcccgggcttccttcccacctcagcttcacagtgtatgcagcacacaacattccagaaacctgggtgcacagctacaaagcgttttcttttacctgttggcttacatatgctggaaagaagctgtgccaagtgagaaactacagaaatattccagacaagaaattattttttttcttggtcaactggaatgaaacgatcaattttccccttgaaataaagtcacttccaagggaatccatgctcactgtaaaactgtttgggattgcctgtgcaaccaacaatgcaaatttactggcgtggacttgtcttccactgtttccaaaagaaaaatccattctcgggtctatgctgttcagcatgacattacagagtgagcctcccgtagaaatgataactccaggagtgtgggatgtaagtcagccatccccggtgaccctgcagattgattttccagctactgggtgggagtatatgaaacctgattctgaagagaatagaagtaatcttgaagagccactaaaggagtgtataaaacatattgccagactttcacagaaacagactcccctactactctctgaagaaaagaaaagatatttatggttttatcgcttctactgcaataatgaaaactgctcccttcctttagtcctgggtagtgcccctggatgggatgaaaggactgtttcagaaatgcataccattttgagaagatggacattttctcaacctttagaggctcttgggcttttgacttccagttttccagatcaagaaattcgtaaagtggcagttcaacaattagacaacctcttgaatgatgaactactggaatatctcccacagctagttcaggctgtcaagtttgaatggaaccttgagagtcctttagtgcaacttctactccaccgctccttgcagagcatccaggttgcccatcgtctttactggctgctaaaaaatgcagaaaatgaagcttattttaaaagctggtatcagaagctactagctgctctccaattctgtgcaggtaaagccttgaatgatgagttttccaaggagcagaaacttatcaaaattctgggagatattggggaaagagtcaagtctgccagtgaccatcaaagacaggaggtactgaagaaagaaattggcagactagaagagttctttcaagatgtaaatacttgtcatcttcctctgaaccctgccctatgtataaaagggattgatcacgatgcatgttcatattttacatctaatgctttgccattgaagattactttcatcaatgctaatctgatgggcaaaaacatcagcattatttttaaggctggagatgatcttcgtcaggatatgcttgttctgcagcttattcaagtgatggacaatatttggctgcaggaaggcttggatatgcaaatgatcatttatagatgtctatccacaggaaaagaccaacgattggtgcagatggtacctgatgctgtgaccctagcaaagattcatcgccattctggactgataggaccattgaaagaaaataccattaaaaagtggttcagtcagcacaaccacttaaaggcagattatgaaaaggccttgaggaactttttctactcctgtgctggctggtgtgtggtaacattcatcctgggagtatgtgaccgtcacaatgataatatcatgctgacaaagtcgggccacatgtttcatattgactttggaaaattcttaggtcatgcacaaacatttggagggataaaaagggaccgagctcctttcatttttacttcagagatggaatactttattacagagggtgggaaaaacccacagcattttcaagattttgtggaactttgctgtcgtgcttataatattatcagaaagcacagccaactgctcttgaacctgctggaaatgatgctgtatgcaggactgcctgagctaagtggaattcaagacctgaaatatgtgtataataatcttcgtccacaagacacagacctggaagcaacaagtcattttaccaagaaaataaaggaaagtctggagtgtttccctgttaaattgaataacttgatccacacacttgcacaaatgtcagccataagccctgccaaatctacttcacagacttttcctcaggaatcctgtttgctgagtacaactaggtcgattgaaagagcaacaattttagggttcagcaagaaatccagtaatctgtatctgatccaggtgacacacagcaacaacgaaacaagcctgacagaaaaatcatttgagcagttttcaaaacttcacagccaacttcagaagcagtttgcatcactgactctcccagagtttcctcattggtggcacctaccttttacaaattcagatcacagaagattcagagatctaaatcattacatggaacagatattaaatgtatcacatgaagttacaaacagtgattgtgtacttagctttttcctctctgaggctgtgcaacaaacagttgaatcatcacctgtgtacctaggtgagaagaagtttccagacaagaagcctaaggtgcagttagtcatatcctacgaggatgtgaagctgaccatactagtgaaacacatgaaaaacattcatctcccagatggctctgcgcccagtgcacatgttgaattttatcttttaccatatcccagtgaagttcgtaggaggaaaacaaaatctgttccaaaatgtacggaccccacttacaatgaaattgtagtatatgatgaagtcacagagctccaaggacatgtcttaatgcttattgtgaagagtaaaactgtatttgtgggagcaattaacatccgactctgtagtgtcccactcgataaagaaaaatggtatccattaggaaacagtataatttgaccattgctatgaacatatgcattattcattaactacttgtatttttttcacttccgggcctctgaatcacataagtaaggcatctttgttgtcaaagacagcacagggtattaaggacacagaaaaaaaatcagaattagtcttttgtgttgtttattttctacctgtgctttcattgttttttcataatcttttctccttcagtggagtactgattgcatgaaatttgatgtgtaaaataataaaagacctttattaaatcattttaatatattttaaattaaacataggtttacatttgttttaattgtgtgcctacagttaaaagcagtatttttaatgtattttataagaaagacaatcaaataaacctcgatgctgcgtttcctttaggaggggtatcatgatctactacttgctccttggttgtcattcgttgcaggagcgtttagttcattaaggcggtatattgtatccaaaaatacgggaaccccct

SEQ ID NO: 427483 - DNA, 1441 bp, Homo sapiens
atgttgagttagtgttgattgtctgctgttggttactcattgctccgctcgtgccgtattgggttggttggtgtttgctggtatcgtcttatctggtcgtcttgctgttgatctgtgtcgtgttgcttggtggttcttgcttgcttgtcgggtgtctggtgtgtttgtggctgctgggttgtgtgagatgttatggttcgagtgatccagctcctccggtatattatgatgtgccataatagtcgcaagttccccgcgtgtggtcgccccgatgttttttctccagcctcgcgccacgggcaatttttcctcaccgttattgtgttgacacaacccgcggtttgacacacaccgctgtgtaagaagttttgtaataaatggttctccccttcttagtgccccttttttaaagatcctctctcgttagggtttgatttttgggtccccccgaaatagtggggctccccgccccccccggggagttaaagggggttctcccctttccgccccaaagggtgtctccccccagcggttaccgcacgggtttttctccccccccgatctcacggcacccgtgtggggtgtgaatacgcggtctcgggctcccacgatggctcttatgctgcgttttttttatattcccgcggccctccccccctttatataggggagcccccccctctgtggtcgccccacgagaacacctcttgggggtgtatcacgcgcgtatacagcacttttggggccccccccctctcagaggggagtatccctctctttgtaggcgcgcgtcccgccccccttttgtgtgttttttctttttctttaaattttaaatccactcaaaaggctttatactctaattgagatttcccacgaacaaaatttcgcagcggcgcgattatacctctcttcttctgagaaaaaatattatctttgagactcctctcgtgaatatagagacaccccacgcttatattggggggaagaaagggggctggtataggttttacaattaatcctatattttttatatttctcgagaaatatgagatagtttataatatgagaaagtgtccccgctctttccacgcttctgagattaatataaagaatagacacaaatgggccccacaatgggctgaaagatataaatagccaccacggagaaatgccacaaagctgtataaagctatagggcactgcccaagaggaaaattctcacgaaataaccccaaagtggccacccaaggagaacctttggctgggaatttgaagttattttcacgtcactctcttgtctcttggctcccactcgttttcactggatacggtgtttacaattccaatctctctatttctgggtgaagggtcttggtggtgggggtattgctacggtcttttaattataataaatatttattgaatgcttccgcaaaaa

SEQ ID NO: 427484 - DNA, 233 bp, Homo sapiens
tggttgagagctgggagcaggtgccgaagcgcaggcactcgttgatgtcttggcatccgggctggccgggcacggtgtggaagcccgagcggcaggcacagtaggccgcggtctcactggatacggtgtttacaattccaatctctctatttctgggtgaagggtcttggtggtgggggtattgctacggtcttttaattataataaatatttattgaatgcttccgcaaaaa

SEQ ID NO: 427485 - DNA, 2689 bp, Homo sapiens
cctcagcgcgctacggtccgcgggcaactccgcagaagccccagcccccaggaccccaggacccagtggcgcagccggcagccccggatccctgatctgcttgggcagctcctgcagaacctggaacagtgaatgggtaggggacactgggcgtgcagaaggcggggggcagtgtggaacatgccttcaccacctccagcttctgctgccggaggctgcacccacctgtgcccatggcctgcacgggcccatcacttcctagcgccttcgacattctaggtgcagcaggccaggacaagctcttgtatctgaagcacaaactgaagaccccacgcccaggctgccaggggcaggacctcctgcatgccatggttctcctgaagctgggccaggaaactgaggccaggatctctctagaggcattgaaggccgatgcggtggcccggctggtggcccgccagtgggctggcgtggacagcaccgaggacccagaggagcccccagatgtgtcctgggctgtggcccgcttgtaccacctgctggctgaggagaagctgtgccccgcctcgctgcgggacgtggcctaccaggaagccgtccgcaccctcagctccagggacgaccaccggctgggggaacttcaggatgaggcccgaaaccggtgtgggtgggacattgctggggatccagggagcatccggacgctccagtccaatctgggctgcctcccaccatcctcggctttgccctctgggaccaggagcctcccacgccccattgacggtgtttcggactggagccaagggtgctccctgcgatccactggcagccctgcctccctggccagcaacttggaaatcagccagtcccctaccatgcccttcctcagcctgcaccgcagcccacatgggcccagcaagctctgtgacgacccccaggccagcttggtgcccgagcctgtccccggtggctgccaggagcctgaggagatgagctggccgccatcgggggagattgccagcccaccagagctgccaagcagcccacctcctgggcttcccgaagtggccccagatgcaacctccactggcctccctgatacccccgcagctccagaaaccagcaccaactacccagtggagtgcaccgaggggtctgcaggcccccagtctctccccttgcctattctggagccggtcaaaaacccctgctctgtcaaagaccagacgccactccaactttctgtagaagataccacctctccaaataccaagccgtgcccacctactcccaccaccccagaaacatcccctcctcctcctcctcctcctccttcatctactccttgttcagctcacctgaccccctcctccctgttcccttcctccctggaatcatcatcggaacagaaattctataactttgtgatcctccacgccagggcagacgaacacatcgccctgcgggttcgggagaagctggaggcccttggcgtgcccgacggggccaccttctgcgaggatttccaggtgccggggcgcggggagctgagctgcctgcaggacgccatagaccactcagctttcatcatcctacttctcacctccaacttcgactgtcgcctgagcctgcaccaggtgaaccaagccatgatgagcaacctcacgcgacaggggtcgccagactgtgtcatccccttcctgcccctggagagctccccggcccagctcagctccgacacggccagcctgctctccgggctggtgcggctggacgaacactcccagatcttcgccaggaaggtggccaacaccttcaagccccacaggcttcaggcccgaaaggccatgtggaggaaggaacaggacacccgagccctgcgggaacagagccaacacctggacggtgagcggatgcaggcggcggcactgaacgcagcctactcagcctacctccagagctacttgtcctaccaggcacagatggagcagctccaggtggcttttgggagccacatgtcatttgggactggggcgccctatggggctcgaatgccctttgggggccaggtgcccctgggagccccgccaccctttcccacttggccggggtgcccgcagccgccacccctgcacgcatggcaggctggcacccccccaccgccctccccacagccagcagcctttccacagtcactgcccttcccgcagtccccagccttccctacggcctcacccgcaccccctcagagcccagggctgcaacccctcattatccaccacgcacagatggtacagctggggctgaacaaccacatgtggaaccagagagggtcccaggcgcccgaggacaagacgcaggaggcagaatgaccgcgtgtccttgcctgaccacctggggaacacccctggacccaggcatcggccaggaccccatagagcaccccggtctgccctgtgccctgtggacagtggaagatgaggtcatctgccactttcaggacattgtccgggagcccttcatttaggacaaaacgggcgcgatgatgccctggctttcagggtggtcagaactggatacggtgtttacaattccaatctctctatttctgggtgaagggtcttggtggtgggggtattgctacggtcttttaattataataaatatttattgaatgcttccgcaaaaa

SEQ ID NO: 427486 - DNA, 2608 bp, Homo sapiens
cctcagcgcgctacggtccgcgggcaactccgcagaagccccagcccccaggaccccaggacccagtggcgcagccggcagccccggatccctgatctgcttgggcagctcctgcagaacctggaacagtgaatgggtaggggacactgggcgtgcagaaggcggggggcagtgtggaacatgccttcaccacctccagcttctgctgccggaggctgcacccacctgtgcccatggcctgcacgggcccatcacttcctagcgccttcgacattctaggtgcagcaggccaggacaagctcttgtatctgaagcacaaactgaagaccccacgcccaggctgccaggggcaggacctcctgcatgccatggttctcctgaagctgggccaggaaactgaggccaggatctctctagaggcattgaaggccgatgcggtggcccggctggtggcccgccagtgggctggcgtggacagcaccgaggacccagaggagcccccagatgtgtcctgggctgtggcccgcttgtaccacctgctggctgaggagaagctgtgccccgcctcgctgcgggacgtggcctaccaggaagccgtccgcaccctcagctccagggacgaccaccggctgggggaacttcaggatgaggcccgaaaccggtgtgggtgggacattgctggggatccagggagcatccggacgctccagtccaatctgggctgcctcccaccatcctcggctttgccctctgggaccaggagcctcccacgccccattgacggtgtttcggactggagccaagggtgctccctgcgatccactggcagccctgcctccctggccagcaacttggaaatcagccagtcccctaccatgcccttcctcagcctgcaccgcagcccacatgggcccagcaagctctgtgacgacccccaggccagcttggtgcccgagcctgtccccggtggctgccaggagcctgaggagatgagctggccgccatcgggggagattgccagcccaccagagctgccaagcagcccacctcctgggcttcccgaagtggccccagatgcaacctccactggcctccctgatacccccgcagctccagaaaccagcaccaactacccagtggagtgcaccgaggggtctgcaggcccccagtctctccccttgcctattctggagccggtcaaaaacccctgctctgtcaaagaccagacgccactccaactttctgtagaagataccacctctccaaataccaagccgtgcccacctactcccaccaccccagaaacatcccctcctcctcctcctcctcctccttcatctactccttgttcagctcacctgaccccctcctccctgttcccttcctccctggaatcatcatcggaacagaaattctataactttgtgatcctccacgccagggcagacgaacacatcgccctgcgggttcgggagaagctggaggcccttggcgtgcccgacggggccaccttctgcgaggatttccaggtgccggggcgcggggagctgagctgcctgcaggacgccatagaccactcagctttcatcatcctacttctcacctccaacttcgactgtcgcctgagcctgcaccaggtgaaccaagccatgatgagcaacctcacgcgacaggggtcgccagactgtgtcatccccttcctgcccctggagagctccccggcccagctcagctccgacacggccagcctgctctccgggctggtgcggctggacgaacactcccagatcttcgccaggaaggtggccaacaccttcaagccccacaggcttcaggcccgaaaggccatgtggaggaaggaacaggacacccgagccctgcgggaacagagccaacacctggacggtgagcggatgcaggcggcggcactgaacgcagcctactcagcctacctccagagctacttgtcctaccaggcacagatggagcagctccaggtggcttttgggagccacatgtcatttgggactggggcgccctatggggctcgaatgccctttgggggccaggtgcccctgggagccccgccaccctttcccacttggccggggtgcccgcagccgccaccctccccagccttccctacggcctcacccgcaccccctcagagcccagggctgcaacccctcattatccaccacgcacagatggtacagctggggctgaacaaccacatgtggaaccagagagggtcccaggcgcccgaggacaagacgcaggaggcagaatgaccgcgtgtccttgcctgaccacctggggaacacccctggacccaggcatcggccaggaccccatagagcaccccggtctgccctgtgccctgtggacagtggaagatgaggtcatctgccactttcaggacattgtccgggagcccttcatttaggacaaaacgggcgcgatgatgccctggctttcagggtggtcagaactggatacggtgtttacaattccaatctctctatttctgggtgaagggtcttggtggtgggggtattgctacggtcttttaattataataaatatttattgaatgcttccgcaaaaa

SEQ ID NO: 427487 - DNA, 1229 bp, Homo sapiens
cctcagcgcgctacggtccgcgggcaactccgcagaagccccagcccccaggaccccaggacccagtggcgcagccggcagccccggatccctgatctgcttgggcagctcctgcagaacctggaacagtgaatgggtaggggacactgggcgtgcagaaggcggggggcagtgtggaacatgccttcaccacctccagcttctgctgccggaggctgcacccacctgtgcccatggcctgcacgggcccatcacttcctagcgccttcgacattctaggtgcagcaggccaggacaagctcttgtatctgaagcacaaactgaagaccccacgcccaggctgccaggggcaggacctcctgcatgccatggttctcctgaagctgggccaggaaactgaggccaggatctctctagaggcattgaaggccgatgcggtggcccggctggtggcccgccagtgggctggcgtggacagcaccgaggacccagaggagcccccagatgtgtcctgggctgtggcccgcttgtaccacctgctggctgaggagaagctgtgccccgcctcgctgcgggacgtggcctaccaggaagccgtccgcaccctcagctccagggacgaccaccggctgggggaacttcaggatgaggcccgaaaccggtgtgggtgggacattgctggggatccagggagcatccggacgctccagtccaatctgggctgcctcccaccatcctcggctttgccctctgggaccaggagcctcccacgccccattgacggtgtttcggactggagccaagggtgctccctgcgatccactggcagccctgcctccctggccagcaacttggaaatcagccagtcccctaccatgcccttcctcagcctgcaccgcagcccacatgggcccagcaagctctgtgacgacccccaggccagcttggtgcccgagcctgtccccggtggctgccaggagcctgaggagatgagctggccgccatcgggggagattgccagcccaccagagcactttcaggacattgtccgggagcccttcatttaggacaaaacgggcgcgatgatgccctggctttcagggtggtcagaactggatacggtgtttacaattccaatctctctatttctgggtgaagggtcttggtggtgggggtattgctacggtcttttaattataataaatatttattgaatgcttccgcaaaaa

SEQ ID NO: 427488 - DNA, 1114 bp, Homo sapiens
gagtgggtgcgagtgagaatgagtggcaaaatgtaatgaaaactttacatgaatgcttatttaggttgttcaaagtaaaaagggctacaggtcacagatcgtcagtgcctgagaaagaacattgacttactctatatcaattgaggggaaagtgcagtaccgtcatcttcaagccttgtaagcataaaagagaataggctgcccatataagtcaaaggaaaatgagcccaggccttgctatgaagcagtgtgtgaatggacaatgttgaatgaatgtctggctcagtgatggagagccaggttcatctttgaaatctagggctcttcactcatgaagcagactcctagtcctggagtgactgtgtacgagagcgtggttgtggtgctgtatgtgaacgcatgcaagcttgattcaccttcagggggctgataacctagtaaatcatcaaaatgagatcataagtgttaatgtacactggacatgaaaacaaagactggtttagcagcagacattggtttactctgcagcctgtgttttctgtttccccctttcccacctccttccccccacccaatccttttttttttcttttttgcttttcttttctttttttttagtttttatttactttacctagtatgcctttttttagttgcttctcaagtcagaaaacttttcaggaaggtttccctgtgcatttgcaccagatgaatgtttgatgctatgaaaagctttccatatcatcaaaactaatttgtgtagatttttgcatgaaaaaaatcataaatttccctcaaaatagactgtgttgcagtacacaagttgccataatagtataaaacagtaaaatgtgcttaaaaggccatccttttcattttcagagataacataaagatctttgcatgaggtaaatctacagcatagttcatttttagattttgttgagtcctgtaaagaagaagaagaaaaaagtttcagttgtggtagaataccgtgctgtgtttaaatgttacttgttttcaaactttgttttctatgaaaatgatatggaaacttctaaaatggaatttggtgcatatgtactgctgaataaagaccgatgaagaggtttga

SEQ ID NO: 427489 - DNA, 738 bp, Homo sapiens
cggacgcgtgggtcgacccacgcgtccgcatcagtgcttcagttttctctctatccaaagcaaggttttaactttccttcattctccagtaaaacagaccgagacaacttgaactatattttgagtattgctatatcttcaacatatagctccaaatgatggattgtatacaaagcatagtacagaaggtttcagtaattggaaggtgaacacagcaatgctttacataatttgtgttttttagtaaaaaatattggattcaaagtaagccaatgagcttgtatacaaattttatatacaaattattgtatagaacagtgatatggaaaataggtaagggtgatattaatatctctgggtataaggactaccttatcgtttaaatattttatttccatctatagcctaatatagaacattgattttctagtagaaattctgggaagggcttttctgtctctgaaattgattcagtacagttgacagttcatcacggttacctggttaaacactttttttttttttttaattctccagtgatctaggaaattgtttcatttttaacacaggcttatttctgatggggatgggggcatagaataatatgcctaataagctaaacgttcttaacgtttcatgtcttaaactgtctttttgaacattgagaccacctcaagtgctgtaaaaataagaatgttatattaggggtgtgtgagacgccctagtctaaaatctatc

SEQ ID NO: 427490 - DNA, 2623 bp, Homo sapiens
gagtgggtgcgagtgagaatgagtggcaaaatgtaatgaaaactttacatgaatgcttatttaggttgttcaaagtaaaaagggctacaggtcacagatcgtcagtgcctgagaaagaacattgacttactctatatcaattgaggggaaagtgcagtaccgtcatcttcaagccttgtaagcataaaagagaataggctgcccatataagtcaaaggaaaatgagcccaggccttgctatgaagcagtgtgtgaatggacaatgttgaatgaatgtctggctcagtgatggagagccaggttcatctttgaaatctagggctcttcactcatgaagcagactcctagtcctggagtgactgtgtacgagagcgtggttgtggtgctgtatgtgaacgcatgcaagcttgattcaccttcagggggctgataacctagtaaatcatcaaaatgagatcataagtgttaatgtacactggacatgaaaacaaagactggtttagcagcagacattggtttactctgcagcctgtgttttctgtttccccctttcccacctccttccccccacccaatccttttttttttcttttttgcttttcttttctttttttttagtttttatttactttacctagtatgcctttttttagttgcttctcaagtcagaaaacttttcaggaaggtttccctgtgcatttgcaccagatgaatgtttgatgctatgaaaagctttccatatcatcaaaactaatttgtgtagatttttgcatgaaaaaaatcataaatttccctcaaaatagactgtgttgcagtacacaagttgccataatagtataaaacagtaaaatgtgcttaaaaggccatccttttcattttcagagataacataaagatctttgcatgaggtaaatctacagcatagttcatttttagattttgttgagtcctgtaaagaagaagaagaaaaaagtttcagttgtggtagaataccgtgctgtgtttaaatgttacttgttttcaaactttgttttctatgaaaatgatatggaaacttctaaaatggaatttggtgcatatgtactgctgaataaagaccgatgaagaggtttgagtagatgtacaaatcaagtaatggtttgaacacctttaataatatgcctaatctgttcaattgttttagaatctttttatcttagatgtaggcagccatgaacaatctattttgagccactttagggagaaaactttgtatttttaaaacttgcataaaagttatgcaagtggtttttataaattggaataatacctcagttttgaggttatgcacactaaattaaatgtgacataaattaatttgtacaaaaagaactctttataaggtggctcattgtaggaaatcctgtgccttcccctttgagcacaagtgttgcatgaacaacagtttgctataagaaacataccagattagccaccattagcatctatatctactttgtgtttaaaaatcaactggtaattctgaaacactgtagaatggataaaaattattttgtgatcataactctttgttgaactagagtatttttgcagcattccttgtcatcagaaacatggttaaagtttaaaactagaagcagcagaaaactagcttgtaaaatttatccaagtagagtgcaggctaggctgtcttggggaaataaacattaaaacttaaagcaatgttttacatggggtgtgtgtgtgtggtgtgtggatttttttttttttataaagttagagtataattcaatggcttacattagcttcctgtctttttacctagaaccagcataataagaaatttctttggttctgtcatttcagtatggacatattaatattttagcccactgagtttgtccagttgacaccatcagtgcttcagttttctctctatccaaagcaaggttttaactttccttcattctccagtaaaacagaccgagacaacttgaactatattttgagtattgctatatcttcaacatatagctccaaatgatggattgtatacaaagcatagtacagaaggtttcagtaattggaaggtgaacacagcaatgctttacataatttgtgttttttagtaaaaaatattggattcaaagtaagccaatgagcttgtatacaaattttatatacaaattattgtatagaacagtgatatggaaaataggtaagggtgatattaatatctctgggtataaggactaccttatcgtttaaatattttatttccatctatagcctaatatagaacattgattttctagtagaaattctgggaagggcttttctgtctctgaaattgattcagtacagttgacagttcatcacggttacctggttaaacactttttttttttttttaattctccagtgatctaggaaattgtttcatttttaacacaggcttatttctgatggggatgggggcatagaataatatgcctaataagctaaacgttcttaacgtttcatgtcttaaactgtctttttgaacattgagaccacctcaagtgctgtaaaaataagaatgttatattaggggtgtgtgagacgccctagtctaaaatctatc

SEQ ID NO: 427491 - DNA, 1619 bp, Homo sapiens
gagtgggtgcgagtgagaatgagtggcaaaatgtaatgaaaactttacatgaatgcttatttaggttgttcaaagtaaaaagggctacaggtcacagatcgtcagtgcctgagaaagaacattgacttactctatatcaattgaggggaaagtgcagtaccgtcatcttcaagccttgtaagcataaaagagaataggctgcccatataagtcaaaggaaaatgagcccaggccttgctatgaagcagtgtgtgaatggacaatgttgaatgaatgtctggctcagtgatggagagccaggttcatctttgaaatctagggctcttcactcatgaagcagactcctagtcctggagtgactgtgtacgagagcgtggttgtggtgctgtatgtgaacgcatgcaagcttgattcaccttcagggggctgataacctagtaaatcatcaaaatgagatcataagtgttaatgtacactggacatgaaaacaaagactggtttagcagcagacattggtttactctgcagcctgtgttttctgtttccccctttcccacctccttccccccacccaatccttttttttttcttttttgcttttcttttctttttttttagtttttatttactttacctagtatgcctttttttagttgcttctcaagtcagaaaacttttcaggaaggtttccctgtgcatttgcaccagatgaatgtttgatgctatgaaaagctttccatatcatcaaaactaatttgtgtagatttttgcatgaaaaaaatcataaatttccctcaaaatagactgtgttgcagtacacaagttgccataatagtataaaacagtaaaatgtgcttaaaaggccatccttttcattttcagagataacataaagatctttgcatgaggtaaatctacagcatagttcatttttagattttgttgagtcctgtaaagaagaagaagaaaaaagtttcagttgtggtagaataccgtgctgtgtttaaatgttacttgttttcaaactttgttttctatgaaaatgatatggaaacttctaaaatggaatttggtgcatatgtactgctgaataaagaccgatgaagaggtttgagtagatgtacaaatcaagtaatggtttgaacacctttaataatatgcctaatctgttcaattgttttagaatctttttatcttagatgtaggcagccatgaacaatctattttgagccactttagggagaaaactttgtatttttaaaacttgcataaaagttatgcaagtggtttttataaattggaataatacctcagttttgaggttatgcacactaaattaaatgtgacataaattaatttgtacaaaaagaactctttataaggtggctcattgtaggaaatcctgtgccttcccctttgagcacaagtgttgcatgaacaacagtttgctataagaaacataccagattagccaccattagcatctatatctactttgtgtttaaaaatcaactggtaattctgaaacactgtagaatggataaaaattattttttaaccaaaacctgtttttaaaaaaaaaaaaccccccaaccaccccccccaaaaataattatgga

SEQ ID NO: 427492 - DNA, 808 bp, Homo sapiens
gcgagggtgaaccctagttgagaagtttcaagtagcattttaagaaaaaaagtttcagttgtggtagaataccgtgctgtgtttaaatgttacttgttttcaaactttgttttctatgaaaatgatatggaaacttctaaaatggaatttggtgcatatgtactgctgaataaagaccgatgaagaggtttgagtagatgtacaaatcaagtaatggtttgaacacctttaataatatgcctaatctgttcaattgttttagaatctttttatcttagatgtaggcagccatgaacaatctattttgagccactttagggagaaaactttgtatttttaaaacttgcataaaagttatgcaagtggtttttataaattggaataatacctcagttttgaggttatgcacactaaattaaatgtgacataaattaatttgtacaaaaagaactctttataaggtggctcattgtaggaaatcctgtgccttcccctttgagcacaagtgttgcatgaacaacagtttgctataagaaacataccagattagccaccattagcatctatatctactttgtgtttaaaaatcaactggtaattctgaaacactgtagaatggataaaaattattttgtgatcataactctttgttgaactagagtatttttgcagcattccttgtcatcagaaacatggttaaagtttaaaactagaagcagcagaaaactagcttgtaaaatttatccaagtagagtgcaggctaggctgtcttggggaaataaacattaaaacttaaagcaatgtttta

SEQ ID NO: 427493 - DNA, 794 bp, Homo sapiens
atctcactaagcatttttgtaaattatatacgttgctatagaaacttctagaactaggcgtgctgtgtttaaatgttacttgttttcaaactttgttttctatgaaaatgatatggaaacttctaaaatggaatttggtgcatatgtactgctgaataaagaccgatgaagaggtttgagtagatgtacaaatcaagtaatggtttgaacacctttaataatatgcctaatctgttcaattgttttagaatctttttatcttagatgtaggcagccatgaacaatctattttgagccactttagggagaaaactttgtatttttaaaacttgcataaaagttatgcaagtggtttttataaattggaataatacctcagttttgaggttatgcacactaaattaaatgtgacataaattaatttgtacaaaaagaactctttataaggtggctcattgtaggaaatcctgtgccttcccctttgagcacaagtgttgcatgaacaacagtttgctataagaaacataccagattagccaccattagcatctatatctactttgtgtttaaaaatcaactggtaattctgaaacactgtagaatggataaaaattattttgtgatcataactctttgttgaactagagtatttttgcagcattccttgtcatcagaaacatggttaaagtttaaaactagaagcagcagaaaactagcttgtaaaatttatccaagtagagtgcaggctaggctgtcttggggaaataaacattaaaacttaaagcaatgtttta

SEQ ID NO: 427494 - DNA, 1506 bp, Homo sapiens
gagtgggtgcgagtgagaatgagtggcaaaatgtaatgaaaactttacatgaatgcttatttaggttgttcaaagtaaaaagggctacaggtcacagatcgtcagtgcctgagaaagaacattgacttactctatatcaattgaggggaaagtgcagtaccgtcatcttcaagccttgtaagcataaaagagaataggctgcccatataagtcaaaggaaaatgagcccaggccttgctatgaagcagtgtgtgaatggacaatgttgaatgaatgtctggctcagtgatggagagccaggttcatctttgaaatctagggctcttcactcatgaagcagactcctagtcctggagtgactgtgtacgagagcgtggttgtggtgctgtatgtgaacgcatgcaagcttgattcaccttcagggggctgataacctagtaaatcatcaaaatgagatcataagtgttaatgtacactggacatgaaaacaaagactggtttagcagcagacattggtttactctgcagcctgtgttttctgtttccccctttcccacctccttccccccacccaatccttttttttttcttttttgcttttcttttctttttttttagtttttatttactttacctagtatgcctttttttagttgcttctcaagtcagaaaacttttcaggaaggtttccctgtgcatttgcaccagatgaatgtttgatgctatgaaaagctttccatatcatcaaaactaatttgtgtagatttttgcatgaaaaaaatcataaatttccctcaaaatagactgtgttgcagtacacaagttgccataatagtataaaacagtaaaatgtgcttaaaaggccatccttttcattttcagagataacataaagatctttgcatgaggtaaatctacagcatagttcatttttagattttgttgagtcctgtaaagaagaagaagaaaaaagtttcagttgtggtagaataccgtgctgtgtttaaatgttacttgttttcaaactttgttttctatgaaaatgatatggaaacttctaaaatggaatttggtgcatatgtactgctgaataaagaccgatgaagaggtttgagtagatgtacaaatcaagtaatggtttgaacacctttaataatatgcctaatctgttcaattgttttagaatctttttatcttagatgtaggcagccatgaacaatctattttgagccactttagggagaaaactttgtatttttaaaacttgcataaaagttatgcaagtggtttttataaattggaataatacctcagttttgaggttatgcacactaaattaaatgtgacataaattaatttgtacaaacctgtgtgtcaaatatgagcaactcttaacctgacccgtggcaaccatctgggacctgtgtctaaggaaggttttaaattcgcctgcctccagttccctttattgcctcattcctacctattggacttctaaactagggg

SEQ ID NO: 427495 - DNA, 490 bp, Homo sapiens
gcgtcgacgctgattgatttattgactggctgattgatttattgactggctgattgatttattgactggctgattgaactatttaaacaataaggcccctgggggattggtatatggccgatttacaaagaactctttataaggtggctcattgtaggaaatcctgtgccttcccctttgagcacaagtgttgcatgaacaacagtttgctataagaaacataccagattagccaccattagcatctatatctactttgtgtttaaaaatcaactggtaattctgaaacactgtagaatggataaaaattattttgtgatcataactctttgttgaactagagtatttttgcagcattccttgtcatcagaaacatggttaaagtttaaaactagaagcagcagaaaactagcttgtaaaatttatccaagtagagtgcaggctaggctgtcttggggaaataaacattaaaacttaaagcaatgtttta

SEQ ID NO: 427496 - DNA, 1729 bp, Homo sapiens
gagtgggtgcgagtgagaatgagtggcaaaatgtaatgaaaactttacatgaatgcttatttaggttgttcaaagtaaaaagggctacaggtcacagatcgtcagtgcctgagaaagaacattgacttactctatatcaattgaggggaaagtgcagtaccgtcatcttcaagccttgtaagcataaaagagaataggctgcccatataagtcaaaggaaaatgagcccaggccttgctatgaagcagtgtgtgaatggacaatgttgaatgaatgtctggctcagtgatggagagccaggttcatctttgaaatctagggctcttcactcatgaagcagactcctagtcctggagtgactgtgtacgagagcgtggttgtggtgctgtatgtgaacgcatgcaagcttgattcaccttcagggggctgataacctagtaaatcatcaaaatgagatcataagtgttaatgtacactggacatgaaaacaaagactggtttagcagcagacattggtttactctgcagcctgtgttttctgtttccccctttcccacctccttccccccacccaatccttttttttttcttttttgcttttcttttctttttttttagtttttatttactttacctagtatgcctttttttagttgcttctcaagtcagaaaacttttcaggaaggtttccctgtgcatttgcaccagatgaatgtttgatgctatgaaaagctttccatatcatcaaaactaatttgtgtagatttttgcatgaaaaaaatcataaatttccctcaaaatagactgtgttgcagtacacaagttgccataatagtataaaacagtaaaatgtgcttaaaaggccatccttttcattttcagagataacataaagatctttgcatgaggtaaatctacagcatagttcatttttagattttgttgagtcctgtaaagaagaagaagaaaaaagtttcagttgtggtagaataccgtgctgtgtttaaatgttacttgttttcaaactttgttttctatgaaaatgatatggaaacttctaaaatggaatttggtgcatatgtactgctgaataaagaccgatgaagaggtttgagtagatgtacaaatcaagtaatggtttgaacacctttaataatatgcctaatctgttcaattgttttagaatctttttatcttagatgtaggcagccatgaacaatctattttgagccactttagggagaaaactttgtatttttaaaacttgcataaaagttatgcaagtggtttttataaattggaataatacctcagttttgaggttatgcacactaaattaaatgtgacataaattaatttgtacaaaaagaactctttataaggtggctcattgtaggaaatcctgtgccttcccctttgagcacaagtgttgcatgaacaacagtttgctataagaaacataccagattagccaccattagcatctatatctactttgtgtttaaaaatcaactggtaattctgaaacactgtagaatggataaaaattattttgtgatcataactctttgttgaactagagtatttttgcagcattccttgtcatcagaaacatggttaaagtttaaaactagaagcagcagaaaactagcttgtaaaatttatccaagtagagtgcaggctaggctgtcttggggaaataaacattaaaacttaaagcaatgtttta

SEQ ID NO: 427497 - DNA, 722 bp, Homo sapiens
aaaaaggaagaaaagaaaaaaaggaaaccagccctgtcatggaatttctctccttccctgcacagtaaagacttttgggttttcatggataaaatcaatgtcagtactgaaactcctactctcccctcccgccccactctcccccgttgcccgagatggccaagttcaggcctgtgcaatgccgcttccctctgagcctccctctcaagggccacgcaggcagctgcagcagggccagctgcaggatggggctgccggtcactgaattgtcgttcaaatgcatcatctttgtggcgtctttctcatgcgagcaaagccacgtgctctcctgtctgctgtcacatctgtgcctggattgcttaaatattgtttgtgatggggaggttttaatctggtgatgcagagggaagcagggctgtgggggcacgtttaattggctcccagcagcgtggggagtgcttctatggtgtgtggggttttttgttgcctccctctagaagtgttaccgttttcacgtcctattaatgtcctctggttgttaaattacagcagcacattacagtgcactgggttccctcctggagtgaatacaaacggagggcatctacttgtatttttagaagttttgggagaatttagtgatttgtggctttgatcaatcctgttgactggtgtatgtctgcgcaaacctgtttcaaataaatcttttgttaaagtaaaaa

SEQ ID NO: 427498 - DNA, 7325 bp, Homo sapiens
  misc_feature (1)..(1): n is a, c, g, or t
  misc_feature (3)..(4): n is a, c, g, or t
  misc_feature (6)..(6): n is a, c, g, or t
  misc_feature (11)..(12): n is a, c, g, or t
  misc_feature (17)..(17): n is a, c, g, or t
  misc_feature (3486)..(3486): n is a, c, g, or t
ncnntnttctnncttcngtcggatgcctcctccctgtagtgattcctgtgactttgatgaccccaggctgttgaagaacattgaggatcgccatcccacagccccttgcattcaggagttcctcacccttctggccgtgtgccacacggttgttcctgagaaggatggagataacatcatctaccaggcctcttccccagatgaagctgctttggtgaaaggagctaaaaagctgggctttgtcttcacagccagaacaccattctcagtcatcatagaagcgatgggacaggaacaaacatttggaatccttaatgtcctggaattttctagtgacagaaaaagaatgtctgtaattgttcgaactccttcaggacgacttcggctttactgtaaaggggctgataatgtgatttttgagagactttcaaaagactcaaaatatatggaggaaacattatgccatctggaatactttgccacggaaggcttgcggactctctgtgtggcttatgctgatctctctgagaatgagtatgaggagtggctgaaagtctatcaggaagccagcaccatattgaaggacagagctcaacggttggaagagtgttacgagatcattgagaagaatttgctgctacttggagccacagccatagaagatcgccttcaagcaggagttccagaaaccatcgcaacactgttgaaggcagaaattaaaatatgggtgttgacaggagacaaacaagaaactgcgattaatatagggtattcctgccgattggtatcgcagaatatggcccttatcctattgaaggaggactctttggatgccacaagggcagccattactcagcactgcactgaccttgggaatttgctgggcaaggaaaatgacgtggccctcatcatcgatggccacaccctgaagtacgcgctctccttcgaagtccggaggagtttcctggatttggcactctcgtgcaaagcggtcatatgctgcagagtgtctcctctgcagaagtctgagatagtggatgtggtgaagaagcgggtgaaggccatcaccctcgccatcggagacggcgccaacgatgtcgggatgatccagacagcccacgtgggtgtgggaatcagtgggaatgaaggcatgcaggccaccaacaactcggattacgccatcgcacagttttcctacttagagaagcttctgttggttcatggagcctggagctacaaccgggtgaccaagtgcatcttgtactgcttctataagaacgtggtcctgtatattattgagctttggttcgcctttgttaatggattttctgggcagattttatttgaacgttggtgcatcggcctgtacaatgtgattttcaccgctttgccgcccttcactctgggaatctttgagaggtcttgcactcaggagagcatgctcaggtttccccagctctacaaaatcacccagaatggcgaaggcttcaacacaaaggttttctggggtcactgcatcaacgccttggtccactccctcatcctcttctggtttcccatgaaagctctggagcatgatactgtgttgacaagtggtcatgctaccgactatttatttgttggaaatattgtttacacatatgttgttgttactgtttgtctgaaagctggtttggagaccacagcttggactaaattcagtcatctggctgtctggggaagcatgctgacctggctggtgttttttggcatctactcgaccatctggcccaccattcccattgctccagatatgagaggacaggcaactatggtcctgagctccgcacacttctggttgggattatttctggttcctactgcctgtttgattgaagatgtggcatggagagcagccaagcacacctgcaaaaagacattgctggaggaggtgcaggagctggaaaccaagtctcgagtcctgggaaaagcggtgctgcgggatagcaatggaaagaggctgaacgagcgcgaccgcctgatcaagaggctgggccggaagacgcccccgacgctgttccggggcagctccctgcagcagggcgtcccgcatgggtatgctttttctcaagaagaacacggagctgttagtcaggaagaagtcatccgtgcttatgacaccaccaaaaagaaatccaggaagaaataagacatgaattttcctgactgatcttaggaaagagattcagtttgttgcacccagtgttaacacatctttgtcagagaagactggcgtcagcagccaaaacaccaggaaacacatttctgtggccttagccaagcagtttgttagttacatattccctcgcaaacctggagtgcagaccacaggggaagctatctttgccctcccaactcgtctgcagtgcttagcctaacttttgtttatgtcgttatgaagcattcaactgtgctctgtgaggtgtgaaattaaaaacattatgtttcaccaatatttaaacatcagtactagttgtcctgggagaaagggaaaggagttttatgttgcgtgagaggcccatcctgtgtaattggagcagggcacacttgcttcctgttgagttaactcagaggttaagtccaacgggccacatgcagacttcactgtaggcaggttgctctcctgctttgattcctgttttgtgtgtaaaattggcataaacttcttgattgcagtgaaatcacaaaattctctatcggggtggtcaacctgagaacatttatttgaacctcttagccacatttccagcagggcaaaccaactgatgccctggaagagtcttccgcaccctctccaggtgcactcggcccagtcctgccgccgtgtccaggcgcccctcacccccacacctgctgcatggctggccacaccactcagtgcatggcggccgatgggcagccaacccaaacccgcgcctttccttgttccactgcagactcagatacagatgcgaaaaattccttcttccaccgcccttctcgttctgtaaagaaagaaaagaaacatagcctttctgcatatattctaaacgtctctctgcctctgtctgacatggggccaccccacaggtcagagtggtggtagaaccccttcaggactcccagccgtggtcaggctctgaatactcccttcccaacatccagactgctgggcctttggcatccacttacattagaacccacgtttgtttcagagcacattttggactttcactgttgggaaatgaatgaatttataacatgcctgcacagcgaaggaacacacctgtcgctcttagctctagagtcagaggatgagtaaacccagatgcaagagtataggacattgagtggggagaacaagacgaccacagaagtcctcagaaggagaaggaaggacacggagacactgagaggaggacacagaggaatcgccaccagatctttgcagtagaaactctgaaatangccttgagacccagacaattgtcatgatcagcccagtgtgtatgagagcttaaacaagaccttcacacacagttctaattgaaaagaattccaaacatttcagggaaacacctttttaaaaaatatactgacatggtttcctttctgtatcccatcagtgttagacacaggtacctatcagaatacggcatatcctgaattatctaagacaaggaagtgaagagcggaatcactgactttcccaactgcagagtcccacacttaaatctcaacagaacctagatgtcttcaggcatgaatgtgagcacctggagcccttactaaacaacctgcctggagccctgttctctgctctggttgccaaaccagatttttggatggcctaaatacttgtgggcaactgttactggtgaaaaatgggagtggagagcatgttttggattttcactgtggggaaatgaatgaatttatcacatgactgtgcagcgaaggagcacacctgtcactcttagctctagagtcggaggatgagtcaaccctgtaggaatgattgtgctaaattaggaaataacactttagtgcactttgcttcctaacccttttttgtcagaaatctacaacctactgggcatggaaatgatttaaaatatgatctgcattgactaagaaaactcatcctcacttatgaggtgaccaggatgcagagagggcctgaggggcagcagaacaatgcaattcacaggtgaggctccaaaaagggccatttctttctccccaaggtgcatagaacatttttaaatatcagagtacccagcaagacggaaggactgtcatgcaggaactctaacacaaaatgtgcctatgactaacacgacaaaccaaggtgtatggtttctttgcacacccagaaaggtgatggccaagatacagaggagaaacgaaaactggaattgaatgtgcattaggcatcttaactattcatattttgtttcatttgggaactaagcctatttggaaagagtggattagaaattgaattctttgtcaaacagttagctctgtcttgaacttgaagccttccaaatcagaattatgtatttaagtgtgtgtttgtgtttgtttggggtttttgtttcttacattagagttcatattttctgggatttaaggatacaggtgtattttcctattctcttgagaagtagactaaacaatatttgcagtgatgacagacgcacacagaagaaaacattagaagagatgcctttctatcctctcatgtggttgagcattcttacagccaaatgactaaattggctgtaaattggtttctaggaggagcagctgtcactacgtgtgatgtataatatttagccagggccaactcaggggctgtgtcatttgtcctatctttaaattgaggtcagagtgtcacacacaacccctcccctggggcagggtggactggactaggttgcatacgctggctgtcagctcagcaaaaatgccacatggggcttgtcactccgccagacactcactgactcacgggctggcaggtcacgctcggttagcgctccagggcctgactctggattgagctaaactggcagaatccactcaggccaacccttggtctactgctgtgtacagacagcccagtcctgtgttgagtctctcttctcctggatgaccctgcaaaaggaagagagcagttgtactgtgggcttagttctgggtttccactgcacactgacacgtgccagcaagggtagctgtggaaaacacgtatcaggagagcagagtagtctggatgaatactctgtgctgatcagaacgggctcggtcataatttaggagtggagctgatgtgtctgtcctgcctcaatgcagaatattccaggcttcttgaccagggttatgttcacccatctcccaacacacacatgcacacatgaaaacaaaaacatggtaactcttttggttcggcacaccatacaaaacgtgctttggggcgaggagtgctgtttcttttaacacttgtagaggaatatcctgagaagtgaacctgggctttgggagagctcagctgagaattctgttgacattttctttcccttgacaaggcttcaggttcgtctcactatagggagctggctgtgaaaatcagtaataacttgtcaagaagcagtgaaaaatgcgggggggtggaaagagtctaggtaactaatgtcttataatgcatatgtatgtaaatattacaggatttaaggttgaattttttaaaaagaaagttatagtctgtaatttccatttgttataataatgacctttaatcttgtcatttggaaccataaagcatttttatcaggtacctctgttccaagggatttatgtcttagaccatagctgaattgaatgtttgcaaaacactgctataggataaggtggtctttagttttgaacgtgtgaaaggactgcacacttttcagccagggtttgagttactgcccagggtcatcgtctcaaagtaattcaaggagtgatttaacatcagcatttgaaatgtagtcttcatctcctgggatccataaaaaaatgtgaacagggaaatggtggctaagcagagcctgaaataataacttggcaaagaaatgagtttatcaggtcgagtcaaaacatggcatcccctgttacactcaagaaatgctttcttcatgtaaatgtttatacgggcatatataatcacaatgggaacagttaaaaccccctcccttcaaaaaaagaaaatctatatcagttgggtttggttttggttcttcattggctcaaggcagttaactgtctcagtatagcctttggggagatttaacctcattctagccatttttccatcctgaaggccaagaaggactattagaagggtttttgaggggtttcggaggtgagggcccaagacccccataatgacatcattaggtattcttgaaaggtgttaacagaccagcacgctcgatgtgttgtacccttcatttatttttttttctcagcatcccaagttgtccatcagtacattccccttcaccttacctgatcttcatttaatgcccagtctgtaactaatgttctgtttaaagctctcttaatttgttggctatgagtgatttgtgaatctgggatgtaaccctgagtgaggagaaaagggcattgagccagcataaatctgaatgggcagaagccacaaacaaatgggagcagaaaagaagggcgagctcccccgcgccgcaccccgtgtataatccagtgttaacctctgaggaacacctcggctctcccaactgaggagagacaaaagagggattctttttacacccaggctggcgcattttcaagtgacaatctcgggctctagttgcctttgagatatccactctgctctttctcccaggcctcagaccaagaaaaacatgctctcaagattagcccataggcagttcttgtgacctggctgaagaaagaaaggagacctgtttgttttaaaagtcgggcgcaaagtgtcaggtggctttgatttatgacagaaagaggaagaagaaagttggagtaatagcactatccaaataaccctgcccaggaaacttgggggtcaagagagcttatcaagagccttttataggtaagctcttccgtgtgaaagagaaaaggccggaaagagggagagagcccagagagcaggctgcgaactcacttccaatgggattggagtctgttgtattcttaagagatagcctgatatgtggtttataggtgaatcaataaacaccaacaacaacaaaaaa

SEQ ID NO: 427499 - DNA, 668 bp, Homo sapiens
aaaaaggaagaaaagaaaaaaaggaaaccagccctgtcatggaatttctctccttccctgcacagtaaagacttttgggttttcatggatcgttgcccgagatggccaagttcaggcctgtgcaatgccgcttccctctgagcctccctctcaagggccacgcaggcagctgcagcagggccagctgcaggatggggctgccggtcactgaattgtcgttcaaatgcatcatctttgtggcgtctttctcatgcgagcaaagccacgtgctctcctgtctgctgtcacatctgtgcctggattgcttaaatattgtttgtgatggggaggttttaatctggtgatgcagagggaagcagggctgtgggggcacgtttaattggctcccagcagcgtggggagtgcttctatggtgtgtggggttttttgttgcctccctctagaagtgttaccgttttcacgtcctattaatgtcctctggttgttaaattacagcagcacattacagtgcactgggttccctcctggagtgaatacaaacggagggcatctacttgtatttttagaagttttgggagaatttagtgatttgtggctttgatcaatcctgttgactggtgtatgtctgcgcaaacctgtttcaaataaatcttttgttaaagtaaaaa

SEQ ID NO: 427500 - DNA, 2494 bp, Homo sapiens
  misc_feature (1)..(1): n is a, c, g, or t
  misc_feature (3)..(4): n is a, c, g, or t
  misc_feature (6)..(6): n is a, c, g, or t
  misc_feature (11)..(12): n is a, c, g, or t
  misc_feature (17)..(17): n is a, c, g, or t
ncnntnttctnncttcngtcggatgcctcctccctgtagtgattcctgtgactttgatgaccccaggctgttgaagaacattgaggatcgccatcccacagccccttgcattcaggagttcctcacccttctggccgtgtgccacacggttgttcctgagaaggatggagataacatcatctaccaggcctcttccccagatgaagctgctttggtgaaaggagctaaaaagctgggctttgtcttcacagccagaacaccattctcagtcatcatagaagcgatgggacaggaacaaacatttggaatccttaatgtcctggaattttctagtgacagaaaaagaatgtctgtaattgttcgaactccttcaggacgacttcggctttactgtaaaggggctgataatgtgatttttgagagactttcaaaagactcaaaatatatggaggaaacattatgccatctggaatactttgccacggaaggcttgcggactctctgtgtggcttatgctgatctctctgagaatgagtatgaggagtggctgaaagtctatcaggaagccagcaccatattgaaggacagagctcaacggttggaagagtgttacgagatcattgagaagaatttgctgctacttggagccacagccatagaagatcgccttcaagcaggagttccagaaaccatcgcaacactgttgaaggcagaaattaaaatatgggtgttgacaggagacaaacaagaaactgcgattaatatagggtattcctgccgattggtatcgcagaatatggcccttatcctattgaaggaggactctttggatgccacaagggcagccattactcagcactgcactgaccttgggaatttgctgggcaaggaaaatgacgtggccctcatcatcgatggccacaccctgaagtacgcgctctccttcgaagtccggaggagtttcctggatttggcactctcgtgcaaagcggtcatatgctgcagagtgtctcctctgcagaagtctgagatagtggatgtggtgaagaagcgggtgaaggccatcaccctcgccatcggagacggcgccaacgatgtcgggatgatccagacagcccacgtgggtgtgggaatcagtgggaatgaaggcatgcaggccaccaacaactcggattacgccatcgcacagttttcctacttagagaagcttctgttggttcatggagcctggagctacaaccgggtgaccaagtgcatcttgtactgcttctataagaacgtggtcctgtatattattgagctttggttcgcctttgttaatggattttctgggcagattttatttgaacgttggtgcatcggcctgtacaatgtgattttcaccgctttgccgcccttcactctgggaatctttgagaggtcttgcactcaggagagcatgctcaggtttccccagctctacaaaatcacccagaatggcgaaggcttcaacacaaaggttttctggggtcactgcatcaacgccttggtccactccctcatcctcttctggtttcccatgaaagctctggagcatgatactgtgttgacaagtggtcatgctaccgactatttatttgttggaaatattgtttacacatatgttgttgttactgtttgtctgaaagctggtttggagaccacagcttggactaaattcagtcatctggctgtctggggaagcatgctgacctggctggtgttttttggcatctactcgaccatctggcccaccattcccattgctccagatatgagaggacaggcaactatggtcctgagctccgcacacttctggttgggattatttctggttcctactgcctgtttgattgaagatgtggcatggagagcagccaagcacacctgcaaaaagacattgctggaggaggtgcaggagctggaaaccaagtctcgagtcctgggaaaagcggtgctgcgggatagcaatggaaagaggctgaacgagcgcgaccgcctgatcaagaggctgggccggaagacgcccccgacgctgttccggggcagctccctgcagcagggcgtcccgcatgggtatgctttttctcaagaagaacacggagctgttagtcaggaagaagtcatccgtgcttatgacaccaccaaaaagaaatccaggaagaaataagacatgaattttcctgactgatcttaggaaagagattcagtttgttgcacccagtgttaacacatctttgtcagagaagactggcgtcagcagccaaaacaccaggaaacacatttctgtggccttagccaagcagtttgttagttacatattccctcgcaaacctggagtgcagaccacaggggaagctatctttgccctcccaactcgtctgcagtgcttagcctaacttttgtttatgtcgttatgaagcattcaactgtgctctgtgaggtgtgaaattaaaaacattatgtttcaccaata

SEQ ID NO: 427501 - DNA, 3260 bp, Homo sapiens
  misc_feature (1)..(1): n is a, c, g, or t
  misc_feature (3)..(4): n is a, c, g, or t
  misc_feature (6)..(6): n is a, c, g, or t
  misc_feature (11)..(12): n is a, c, g, or t
  misc_feature (17)..(17): n is a, c, g, or t
ncnntnttctnncttcngtcggatgcctcctccctgtagtgattcctgtgactttgatgaccccaggctgttgaagaacattgaggatcgccatcccacagccccttgcattcaggagttcctcacccttctggccgtgtgccacacggttgttcctgagaaggatggagataacatcatctaccaggcctcttccccagatgaagctgctttggtgaaaggagctaaaaagctgggctttgtcttcacagccagaacaccattctcagtcatcatagaagcgatgggacaggaacaaacatttggaatccttaatgtcctggaattttctagtgacagaaaaagaatgtctgtaattgttcgaactccttcaggacgacttcggctttactgtaaaggggctgataatgtgatttttgagagactttcaaaagactcaaaatatatggaggaaacattatgccatctggaatactttgccacggaaggcttgcggactctctgtgtggcttatgctgatctctctgagaatgagtatgaggagtggctgaaagtctatcaggaagccagcaccatattgaaggacagagctcaacggttggaagagtgttacgagatcattgagaagaatttgctgctacttggagccacagccatagaagatcgccttcaagcaggagttccagaaaccatcgcaacactgttgaaggcagaaattaaaatatgggtgttgacaggagacaaacaagaaactgcgattaatatagggtattcctgccgattggtatcgcagaatatggcccttatcctattgaaggaggactctttggatgccacaagggcagccattactcagcactgcactgaccttgggaatttgctgggcaaggaaaatgacgtggccctcatcatcgatggccacaccctgaagtacgcgctctccttcgaagtccggaggagtttcctggatttggcactctcgtgcaaagcggtcatatgctgcagagtgtctcctctgcagaagtctgagatagtggatgtggtgaagaagcgggtgaaggccatcaccctcgccatcggagacggcgccaacgatgtcgggatgatccagacagcccacgtgggtgtgggaatcagtgggaatgaaggcatgcaggccaccaacaactcggattacgccatcgcacagttttcctacttagagaagcttctgttggttcatggagcctggagctacaaccgggtgaccaagtgcatcttgtactgcttctataagaacgtggtcctgtatattattgagctttggttcgcctttgttaatggattttctgggcagattttatttgaacgttggtgcatcggcctgtacaatgtgattttcaccgctttgccgcccttcactctgggaatctttgagaggtcttgcactcaggagagcatgctcaggtttccccagctctacaaaatcacccagaatggcgaaggcttcaacacaaaggttttctggggtcactgcatcaacgccttggtccactccctcatcctcttctggtttcccatgaaagctctggagcatgatactgtgttgacaagtggtcatgctaccgactatttatttgttggaaatattgtttacacatatgttgttgttactgtttgtctgaaagctggtttggagaccacagcttggactaaattcagtcatctggctgtctggggaagcatgctgacctggctggtgttttttggcatctactcgaccatctggcccaccattcccattgctccagatatgagaggacaggcaactatggtcctgagctccgcacacttctggttgggattatttctggttcctactgcctgtttgattgaagatgtggcatggagagcagccaagcacacctgcaaaaagacattgctggaggaggtgcaggagctggaaaccaagtctcgagtcctgggaaaagcggtgctgcgggatagcaatggaaagaggctgaacgagcgcgaccgcctgatcaagaggctgggccggaagacgcccccgacgctgttccggggcagctccctgcagcagggcgtcccgcatgggtatgctttttctcaagaagaacacggagctgttagtcaggaagaagtcatccgtgcttatgacaccaccaaaaagaaatccaggaagaaataagacatgaattttcctgactgatcttaggaaagagattcagtttgttgcacccagtgttaacacatctttgtcagagaagactggcgtcagcagccaaaacaccaggaaacacatttctgtggccttagccaagcagtttgttagttacatattccctcgcaaacctggagtgcagaccacaggggaagctatctttgccctcccaactcgtctgcagtgcttagcctaacttttgtttatgtcgttatgaagcattcaactgtgctctgtgaggtgtgaaattaaaaacattatgtttcaccaatatttaaacatcagtactagttgtcctgggagaaagggaaaggagttttatgttgcgtgagaggcccatcctgtgtaattggagcagggcacacttgcttcctgttgagttaactcagaggttaagtccaacgggccacatgcagacttcactgtaggcaggttgctctcctgctttgattcctgttttgtgtgtaaaattggcataaacttcttgattgcagtgaaatcacaaaattctctatcggggtggtcaacctgagaacatttatttgaacctcttagccacatttccagcagggcaaaccaactgatgccctggaagagtcttccgcaccctctccaggtgcactcggcccagtcctgccgccgtgtccaggcgcccctcacccccacacctgctgcatggctggccacaccactcagtgcatggcggccgatgggcagccaacccaaacccgcgcctttccttgttccactgcagactcagatacagatgcgaaaaattccttcttccaccgcccttctcgttctgtaaagaaagaagtgttaccgttttcacgtcctattaatgtcctctggttgttaaattacagcagcacattacagtgcactgggttccctcctggagtgaatacaaacggagggcatctacttgtatttttagaagttttgggagaatttagtgatttgtggctttgatcaatcctgttgactggtgtatgtctgcgcaaacctgtttcaaataaatcttttgttaaagtaaaaa

SEQ ID NO: 427502 - DNA, 333 bp, Homo sapiens
ctaggatatgtggtcgtgaaacacgcgcatgtttgacgaccacataaatcagttaaatattgggacactaaccatccaggtcaagaaaagtcacatgccatagccatggtattgcacatcattcatcttgcattctttgagaataagaagatcagtaaatagttcagaagtgggaagctttgtccaggcctgtgtgtgaacccaatgttttgtttagaaatagaacaagtaagttcattgctatagcataacacaaaatttgcataagtggacatgcgcgtgtttgacgaccacatatgtggtcaattttggaatacgtcgtggtgaacatgc

SEQ ID NO: 427503 - DNA, 1852 bp, Homo sapiens
ataaaggatactcaatctgtgtaagttttgaacaaacaaagcagtcatagtgagaagccacagaagcctcctacattaaaaatactccagcataataaaggaaggtaaatgttaaagcgcctgcttgatgaattcagcaagtgatcattcacacaaaaagaaaaccaactgagacgctgtcactagggtttttcaaataggtagagaatcttaaatatccagtaatgatgacaacctcacttactgggagcttactcgtggggctaaggaggatgcgtgatgatcccatttttattgtcacagctaccgaaggaagataccctcatcaacccaattttacaaatggagaaatagaagctcagggaagaatctgaagtagtctcaaaggaagtgacaggaaggatgtggagaaagctgagtgtcaaagtcagtattcaagaccggatttactgctacttagagatgaatgaagaaatcagagggaacgcagtgtgctgatgctaaagcggctgtcaccacccagctgtgtgacataggacatcttctttctctgtctcacttgactaatatgttgtgtcaggggagacatgattgtaattgcctaaagcaattcttgtgatcaagaatcagaagcatgaacagtattgccctctgtgttagcccctttataagggaggaagtcatcttcagcatgctgaattgtcatctttcttagcagtgcaaatgactaaaacttagccaatgtagagtttgtccaaatttggagctcataactcagttcttgagcaaagtgaaaagaaaacattgtgattatggggaaaatatttgtacgggacttatcaaataaagataggaaaagaagaaaactcaaatattataggcagaaatgctaaaggttttaaaatatgtcaggattggaagaaggcatggataaagaacaaagttcagttaggaaagagaaacacagaaggaagagacacaataaaagtcattatgtattctgtgagaagtcagacagtaagatttgtgggaaatgggttggtttgttgtatggtatgtattttagcaataatctttatggcagagaaagctaaaatcctttagcttgcgtgaatgatcacttgctgaattcctcaaggtaggcatgatgaaggagggtttagaggagacacagacacaatgaactgacctagatagaaagccttagtatactcagctaggaatagtgattctgagggcacactgtgacatgattatgtcattacatgtatggtagtgatggggatgatagaaggaagaacttatggcatattttcaccaccacataaatcagttaaatattgggacactaaccatccaggtcaagaaaagtcacatgccatagccatggtattgcacatcattcatcttgcattctttgagaataagaagatcagtaaatagttcagaagtgggaagctttgtccaggcctgtgtgtgaacccaatgttttgtttagaaatagaacaagtaagttcattgctatagcataacacaaaatttgcataagtggtggtcagcaaatccttgaatgctgcttaatgtgagaggttggtaaaatcctttgtgcaacactctaactccctgaatgttttgctgtgctgggacctgtgcatgccagacaaggccaagctggctgaaagagcaaccagccacctctgcaacctgccacctcctgctggcaggatttgtttttgcatcctgtgaagagccaaggaggcaccagggcataagtctactcacttatatctgtttgtctggaacataacccatgtttgtttttacaacaaataaaattgatcttgaataaaaa

SEQ ID NO: 427504 - DNA, 2015 bp, Homo sapiens
gaacgtgaggaacacgagtagttcaagaaaatgctgaagatgcgcttggctgggaagctaggataggctgacgaagtcagacttagtgtgggaacctggctgggaaagggtttcttctgtccataaaagctactccaatggctgtgggagacttaattccaattccaggtgatacagccgtcagtctcccactagctgtaggatggtgtgctgcagttcacagacctaagtcaatgttagtctaccactgtacgtctggtaacctcaatccctgcaaccggagcaaaatgtgattccaggtcttggcaacctctgaaattccaactccatttgcgagagctttgaggaggccatatgctgatttcaccacaagcaacttcacaacccagtactggaatgccatcagccagcaggcccctgccattatctgtgacttctatctgtggctcattggaaggaaacccagctaccgaaggaagataccctcatcaacccaattttacaaatggagaaatagaagctcagggaagaatctgaagtagtctcaaaggaagtgacaggaaggatgtggagaaagctgagtgtcaaagtcagtattcaagaccggatttactgctacttagagatgaatgaagaaatcagagggaacgcagtgtgctgatgctaaagcggctgtcaccacccagctgtgtgacataggacatcttctttctctgtctcacttgactaatatgttgtgtcaggggagacatgattgtaattgcctaaagcaattcttgtgatcaagaatcagaagcatgaacagtattgccctctgtgttagcccctttataagggaggaagtcatcttcagcatgctgaattgtcatctttcttagcagtgcaaatgactaaaacttagccaatgtagagtttgtccaaatttggagctcataactcagttcttgagcaaagtgaaaagaaaacattgtgattatggggaaaatatttgtacgggacttatcaaataaagataggaaaagaagaaaactcaaatattataggcagaaatgctaaaggttttaaaatatgtcaggattggaagaaggcatggataaagaacaaagttcagttaggaaagagaaacacagaaggaagagacacaataaaagtcattatgtattctgtgagaagtcagacagtaagatttgtgggaaatgggttggtttgttgtatggtatgtattttagcaataatctttatggcagagaaagctaaaatcctttagcttgcgtgaatgatcacttgctgaattcctcaaggtaggcatgatgaaggagggtttagaggagacacagacacaatgaactgacctagatagaaagccttagtatactcagctaggaatagtgattctgagggcacactgtgacatgattatgtcattacatgtatggtagtgatggggatgatagaaggaagaacttatggcatattttcaccaccacataaatcagttaaatattgggacactaaccatccaggtcaagaaaagtcacatgccatagccatggtattgcacatcattcatcttgcattctttgagaataagaagatcagtaaatagttcagaagtgggaagctttgtccaggcctgtgtgtgaacccaatgttttgtttagaaatagaacaagtaagttcattgctatagcataacacaaaatttgcataagtggtggtcagcaaatccttgaatgctgcttaatgtgagaggttggtaaaatcctttgtgcaacactctaactccctgaatgttttgctgtgctgggacctgtgcatgccagacaaggccaagctggctgaaagagcaaccagccacctctgcaacctgccacctcctgctggcaggatttgtttttgcatcctgtgaagagccaaggaggcaccagggcataagtctactcacttatatctgtttgtctggaacataacccatgtttgtttttacaacaaataaaattgatcttgaataaaaa

SEQ ID NO: 427505 - DNA, 571 bp, Homo sapiens
ctaggatatgtggtcgtgaaacacgcgcatgtttgacgaccacataaatcagttaaatattgggacactaaccatccaggtcaagaaaagtcacatgccatagccatggtattgcacatcattcatcttgcattctttgagaataagaagatcagtaaatagttcagaagtgggaagctttgtccaggcctgtgtgtgaacccaatgttttgtttagaaatagaacaagtaagttcattgctatagcataacacaaaatttgcataagtggtggtcagcaaatccttgaatgctgcttaatgtgagaggttggtaaaatcctttgtgcaacactctaactccctgaatgttttgctgtgctgggacctgtgcatgccagacaaggccaagctggctgaaagagcaaccagccacctctgcaacctgccacctcctgctggcaggatttgtttttgcatcctgtgaagagccaaggaggcaccagggcataagtctactcacttatatctgtttgtctggaacataacccatgtttgtttttacaacaaataaaattgatcttgaataaaaa

SEQ ID NO: 427506 - DNA, 1625 bp, Homo sapiens
  misc_feature (1564)..(1564): n is a, c, g, or t
  misc_feature (1567)..(1567): n is a, c, g, or t
  misc_feature (1570)..(1570): n is a, c, g, or t
  misc_feature (1573)..(1573): n is a, c, g, or t
  misc_feature (1575)..(1575): n is a, c, g, or t
  misc_feature (1588)..(1588): n is a, c, g, or t
ataaaggatactcaatctgtgtaagttttgaacaaacaaagcagtcatagtgagaagccacagaagcctcctacattaaaaatactccagcataataaaggaaggtaaatgttaaagcgcctgcttgatgaattcagcaagtgatcattcacacaaaaagaaaaccaactgagacgctgtcactagggtttttcaaataggtagagaatcttaaatatccagtaatgatgacaacctcacttactgggagcttactcgtggggctaaggaggatgcgtgatgatcccatttttattgtcacagctaccgaaggaagataccctcatcaacccaattttacaaatggagaaatagaagctcagggaagaatctgaagtagtctcaaaggaagtgacaggaaggatgtggagaaagctgagtgtcaaagtcagtattcaagaccggatttactgctacttagagatgaatgaagaaatcagagggaacgcagtgtgctgatgctaaagcggctgtcaccacccagctgtgtgacataggacatcttctttctctgtctcacttgactaatatgttgtgtcaggggagacatgattgtaattgcctaaagcaattcttgtgatcaagaatcagaagcatgaacagtattgccctctgtgttagcccctttataagggaggaagtcatcttcagcatgctgaattgtcatctttcttagcagtgcaaatgactaaaacttagccaatgtagagtttgtccaaatttggagctcataactcagttcttgagcaaagtgaaaagaaaacattgtgattatggggaaaatatttgtacgggacttatcaaataaagataggaaaagaagaaaactcaaatattataggcagaaatgctaaaggttttaaaatatgtcaggattggaagaaggcatggataaagaacaaagttcagttaggaaagagaaacacagaaggaagagacacaataaaagtcattatgtattctgtgagaagtcagacagtaagatttgtgggaaatgggttggtttgttgtatggtatgtattttagcaataatctttatggcagagaaagctaaaatcctttagcttgcgtgaatgatcacttgctgaattcctcaaggtaggcatgatgaaggagggtttagaggagacacagacacaatgaactgacctagatagaaagccttagtatactcagctaggaatagtgattctgagggcacactgtgacatgattatgtcattacatgtatggtagtgatggggatgatagaaggaagaacttatggcatattttcaccaccacataaatcagttaaatattgggacactaaccatccaggtcaagaaaagtcacatgccatagccatggtattgcacatcattcatcttgcattctttgagaataagaagatcagtaaatagttcagaagtgggaagctttgtccaggcctgtgtgtgaacccaatgttttgtttagaaatagaacaagtaagttcattgctatagcataacacaaaatttgcataagtgggcatgcttcacnacnacntangnggtggtcaaacangcgcatgcttgaccaccacatatgtcgtcgtcaaaca

SEQ ID NO: 427507 - DNA, 1564 bp, Homo sapiens
  misc_feature (1503)..(1503): n is a, c, g, or t
  misc_feature (1506)..(1506): n is a, c, g, or t
  misc_feature (1509)..(1509): n is a, c, g, or t
  misc_feature (1512)..(1512): n is a, c, g, or t
  misc_feature (1514)..(1514): n is a, c, g, or t
  misc_feature (1527)..(1527): n is a, c, g, or t
ataaaggatactcaatctgtgtaagttttgaacaaacaaagcagtcatagtgagaagccacagaagcctcctacattaaaaatactccagcataataaaggaaggtaaatgttaaagcgcctgcttgatgaattcagcaagtgatcattcacacaaaaagaaaaccaactgagacgctgtcactagggtttttcaaataggtagagaatcttaaatatccagtaatgatgacaacctcacttactgggagcttactcgtggggctaaggaggatgcgtgatgatcccatttttattgtcacagctaccgaaggaagataccctcatcaacccaattttacaaatggagaaatagaagctcagggaagaatctgaagtagtctcaaaggaagtgacaggaaggatgtggagaaagctgagtgtcaaagtcagtattcaagaccggatttactgctacttagagatgaatgaagaaatcagagggaacgcagtgtgctgatgctaaagcggctgtcaccacccagctgtgtgacataggacatcttctttctctgtctcacttgactaatatgttgtgtcaggggagacatgattgtaattgcctaaagcaattcttgtgatcaagaatcagaagcatgaacagtattgccctctgtgttagcccctttataagggaggaagtcatcttcagcatgctgaattgtcatctttcttagcagtgcaaatgactaaaacttagccaatgtagagtttgtccaaatttggagctcataactcagttcttgagcaaagtgaaaagaaaacattgtgattatggggaaaatatttgtacgggacttatcaaataaagataggaaaagaagaaaactcaaatattataggcagaaatgctaaaggttttaaaatatgtcaggattggaagaaggcatggataaagaacaaagttcagttaggaaagagaaacacagaaggaagagacacaataaaagtcattatgtattctgtgagaagtcagacagtaagatttgtgggaaatgggttggtttgttgtatggtatgtattttagcaataatctttatggcagagaaagctaaaatcctttagcttgcgtgaatgatcacttgctgaattcctcaaggtaggcatgatgaaggagggtttagaggagacacagacacaatgaactgacctagatagaaagccttagtatactcagctaggaatagtgattctgagggcacactgtgacatgattatgtcattacatgtatggtagtgatggggatgatagaaggaagaacttatggcatattttcaccaccacataaatcagttaaatattgggacactaaccatccaggtcaagaaaagtcacatgccatagccatggtattgcacatcattcatcttgcattctttgagaataagaagatcagtaaatagttcagaagtgggaagctttgtccaggcctgtgtgtgaacccaatgtttgcatgcttcacnacnacntangnggtggtcaaacangcgcatgcttgaccaccacatatgtcgtcgtcaaaca

SEQ ID NO: 427508 - DNA, 817 bp, Homo sapiens
gaacgtgaggaacacgagtagttcaagaaaatgctgaagatgcgcttggctgggaagctaggataggctgacgaagtcagacttagtgtgggaacctggctgggaaagggtttcttctgtccataaaagctactccaatggctgtgggagacttaattccaattccaggtgatacagccgtcagtctcccactagctgtaggatggtgtgctgcagttcacagacctaagtcaatgttagtctaccactgtacgtctggtaacctcaatccctgcaaccggagcaaaatgtgattccaggtcttggcaacctctgaaattccaactccatttgcgagagctttgaggaggccatatgctgatttcaccacaagcaacttcacaacccagtactggaatgccatcagccagcaggcccctgccattatctgtgacttctatctgtggctcattggaaggaaacccagtttttcacaaaatctgaggagctgatacggaaagcacaccagatctcatgtgttgaaatgtgaacatgctcaccacagaccaaggacattcaacctgtcaatccccaggatttccaagccaggagtttcatctcttacttgtggaaaatttgtccatttaattgtgaaccaatcagcttttcattgtgtcaaaatcaaatctggatagtgaaatatatattttatctttattgttatcttaaatatatcttggcttaaagagacataagtagctcttccccactacaccagataatgagttgcaaataaatcattcagtagtaaagttcaaagaaagcttgaaagcaaaaa

SEQ ID NO: 427509 - DNA, 658 bp, Homo sapiens
gaacgtgaggaacacgagtagttcaagaaaatgctgaagatgcgcttggctgggaagctaggataggctgacgaagtcagacttagtgtgggaacctggctgggaaagggtttcttctgtccataaaagctactccaatggctgtgggagacttaattccaattccaggtgatacagccgtcagtctcccactagctgtaggatggtgtgctgcagttcacagacctaagtcaatgttagtctaccactgtacgtctggtaacctcaatccctgcaaccggagcaaaatgtgattccaggtcttggcaacctctgaaattccaactccatttgcgagagctttgaggaggccatatgctgatttcaccacaagcaacttcacaacccagtactggaatgccatcagccagcaggcccctgccattatctgtgacttctatctgtggctcattggaaggaaacccagacaaggccaagctggctgaaagagcaaccagccacctctgcaacctgccacctcctgctggcaggatttgtttttgcatcctgtgaagagccaaggaggcaccagggcataagtctactcacttatatctgtttgtctggaacataacccatgtttgtttttacaacaaataaaattgatcttgaataaaaa

SEQ ID NO: 427510 - DNA, 765 bp, Homo sapiens
gaacgtgaggaacacgagtagttcaagaaaatgctgaagatgcgcttggctgggaagctaggataggctgacgaagtcagacttagtgtgggaacctggctgggaaagggtttcttctgtccataaaagctactccaatggctgtgggagacttaattccaattccaggtgatacagccgtcagtctcccactagctgtaggatggtgtgctgcagttcacagacctaagtcaatgttagtctaccactgtacgtctggtaacctcaatccctgcaaccggagcaaaatgtgattccaggtcttggcaacctctgaaattccaactccatttgcgagagctttgaggaggccatatgctgatttcaccacaagcaacttcacaacccagtactggaatgccatcagccagcaggcccctgccattatctgtgacttctatctgtggctcattggaaggaaacccagctaccgaaggaagataccctcatcaacccaattttacaaatggagaaatagaagctcagggaagaatctgaagtagtctcaaaggaagtgacaggaaggatgtggagaaagctgagtgtcaaagtcagtattcaagaccggatttactgctacttagagatgaatgaagaaatcagagggaacgcagtgtgctgatgctaaagaaaaagaagatgtgaaatcttgtgctgagtgggtgtctctctctaaggccaggaattgtagaatatgagaaagagatggagaagatgaagacttta

SEQ ID NO: 427511 - DNA, 651 bp, Homo sapiens
gaacgtgaggaacacgagtagttcaagaaaatgctgaagatgcgcttggctgggaagctaggataggctgacgaagtcagacttagtgtgggaacctggctgggaaagggtttcttctgtccataaaagctactccaatggctgtgggagacttaattccaattccaggtgatacagccgtcagtctcccactagctgtaggatggtgtgctgcagttcacaggtgtggatgctcaagtgggctttcaaagatgccattatctgtgacttctatctgtggctcattggaaggaaacccagtttttcacaaaatctgaggagctgatacggaaagcacaccagatctcatgtgttgaaatgtgaacatgctcaccacagaccaaggacattcaacctgtcaatccccaggatttccaagccaggagtttcatctcttacttgtggaaaatttgtccatttaattgtgaaccaatcagcttttcattgtgtcaaaatcaaatctggatagtgaaatatatattttatctttattgttatcttaaatatatcttggcttaaagagacataagtagctcttccccactacaccagataatgagttgcaaataaatcattcagtagtaaagttcaaagaaagcttgaaagcaaaaa

SEQ ID NO: 427512 - DNA, 681 bp, Homo sapiens
gaacgtgaggaacacgagtagttcaagaaaatgctgaagatgcgcttggctgggaagctaggataggctgacgaagtcagacttagtgtgggaacctggctgggaaagggtttcttctgtccataaaagctactccaatggctgtgggagacttaattccaattccaggtgatacagccgtcagtctcccactagctgtaggatggtgtgctgcagttcacagacctaagtcaatgttagtctaccactgtacgtctggtaacctcaatccctgcaaccggagcaaaatgtgattccaggtcttggcaacctctgaaattccaactccatttgcgagagctttgaggaggccatatgctgatttcaccacaagcaacttcacaacccagtactggaatgccatcagccagcaggcccctgccattatctgtgacttctatctgtggctcattggaaggaaacccagacaaggccaagctggctgaaagagcaaccagccacctctgcaacctgccacctcctgctggcaggatttgtttttgcatcctgtgaagagccaaggaggcaccagggcataagtctactcacttatatctgtttgtctggaacataacccatgtttgtttttacaacaaataaaattgatcttgaataaaaaacaaaaaaaacaaaagtcgacgc

SEQ ID NO: 427513 - DNA, 897 bp, Homo sapiens
gaacgtgaggaacacgagtagttcaagaaaatgctgaagatgcgcttggctgggaagctaggataggctgacgaagtcagacttagtgtgggaacctggctgggaaagggtttcttctgtccataaaagctactccaatggctgtgggagacttaattccaattccaggtgatacagccgtcagtctcccactagctgtaggatggtgtgctgcagttcacagacctaagtcaatgttagtctaccactgtacgtctggtaacctcaatccctgcaaccggagcaaaatgtcatctaccacagtgcctggcaagtgttaaatgctgaataaatatatttgaaatgactaaaggaaggattgatacagatttaggaaaaggaaagattccaggtcttggcaacctctgaaattccaactccatttgcgagagctttgaggaggccatatgctgatttcaccacaagcaacttcacaacccagtactggaatgccatcagccagcaggcccctgccattatctgtgacttctatctgtggctcattggaaggaaacccaggtgagaagctgagtcaatggccttgagaatgtcactgcatatgggagattgaggccccaaagtctttagggcttccttcagccaaagattaaaggagacaactgaatctgacccatatatacagattgaacacacctactctgaaaatccaaaatctgaaattctccaaaatccaaaaagttttgagtgctgacatgatgccacaagtggaaaattccacacatcttacctcatgtgatgggtcacagtcaaaacacattcaaaactttgtttcatgcataaaattatttaaaatattgtataagattaccttcaggttatgtgtatgtggctaagtgt

SEQ ID NO: 427514 - DNA, 1519 bp, Homo sapiens
ggctgcgtggttgccaggaaaccgcgaagccgcggtccctgcctctgagtctctctcgaccatggccaaattcgtcatcgcgggtagagcagattgtccatattatgctaaaacagaacttgtggcagactatttacaaaagaatcttcctgattttcggatacataaaatcacacaacgtcctgaggtttgggaggattggctaaaagatgtgtgtgaaaagaataagtggagtcacaagaattcccctatcatctggagagagctgttggatcgtggaggaaagggtttgcttttgggaggatataatgagttcctggagcatgctcagctttactatgatgtcacctctagcatgacgactgaactgatgatggtaattgctcaagagaacctgggggcacatatagaaaaagagcaggaggaagaagccctgaaaacttgcatcaaccccttgcaggtctggatcaccagtgcctctgctcctgcctgctacaacctaattcccatattgacgagtggcgaagtgtttgggatgcatacagaaattagcataactctatttgacaacaagcaggcggaagaacatctcaaaagccttgtggtggagacccaagacctggcatctcccgtcctgcgcagtgtctccatctgcacgaaggtggaggaggccttccgccaggcccacgtcattgtggtgctggatgacagcaccaacaaggaggtgttcactctggaggactgcctccgaagcagggtgcctctctgcaggctctatgggtacctgatagagaaaaatgctcatgagtctgtcagagtcatcgtgggagggagaacctttgtaaacctgaagacagttttactcatgagatatgccccacgcattgcacacaacattattgctgtggcgctgggggtggaaggtgaagcgaaagccatactggccagaaaactgaagacagctccttcatgtgagtgaatgtctctttatgtttttgtttttattttgaaacaacatgatttcaaagcagctaggaagaacactgtcccctctaggaacattctgagtatctggaataggaagtataaaacagacataaagaacttattgtgtgatttgactactgtgcaaacatttttttttactggcttttgtgtctggctttttccatcattataaaaatcaataaatatttaataagatacaatttatattattcaggtgataatgtgacacatcgtattccatttttcccatggtaatagtcaattaagataaccagtgttttaaaaaaaatcaaaactatgtgcaagtggctctgccctacttcccacccgtatgatcttgagccgtcatttagtctttcagtgcgtcagtttcctcatctgtaaaatgaggacgttaacagtgcctatctcctagaattgatgtggggattcaatgagatgtattcctaaagtgctaagaagagtgtatggcacataataaacatttctaaggatgttaaacttatcaata

SEQ ID NO: 427515 - DNA, 1707 bp, Homo sapiens
ggctgcgtggttgccaggaaaccgcgaagccgcggtccctgcctctgagtctctctcgaccatggccaaattcgtcatcgcgggtagagcagattgtccatattatgctaaaacagaacttgtggcagactatttacaaaagaatcttcctgattttcggatacataaaatcacacaacgtcctgaggtttgggaggattggctaaaagatgtgtgtgaaaagaataagtggagtcacaagaattcccctatcatctggagagagctgttggatcgtggaggaaagggtttgcttttgggaggatataatgagttcctggagcatgctcagctttactatgatgtcacctctagcatgacgactgaactgatgatggtaattgctcaagagaacctgggggcacatatagaaaaagagcaggaggaagaagccctgaaaacttgcatcaaccccttgcaggtctggatcaccagtgagtgggtaaaaagagaatttgtggcaattcttaaaaacttgaccaccacaggaagacaatttggaggcattttggctgcacacagtatagccactacactgaaatactggtaccatggctcaccacctggggagattgtatctttaggaatattgagtgaaggccagtttggtattccgaaagggatcgtcttttctatgcctgtgaaatttgagaatggaacttgggtggttcttacagatctcaaagatgttgaaataagtgaacaaataatgacccgaatgacaagtgatctaattcaggagaaacttgttgcacttggagacaagatacattttcagccataccaatcaggacataaagatctggtccctgatgaagaaaaaaatctagctatgtcagatgcagcagagtttccaaatcagattcctcaaaccacctttgaaaagccacagagtcttgagttcctaaatgaatttgaaggcaaaaccgtggaatcctaacagatcaaattggatgaaatatataattacttgatagcacaataaacatagaaagaatttatatgaatgtctatatttaaggaagaataatttgaaagatttatgtcagtcttagataataccatgcaaggcaattaaatcactgtgacagcacagaggtcagagttccgtcattttgcattacttgtatccactcatgtttgtttcataataattgcattttcttagaactattttggtgtcaaatgctattttttatattacattaaaatagagttgtcagtcattgcatctgcccatacatcttctgagagaacctgcttccttccatcagccatacctaagacctgcacctaagtggccatgtttgctcaaatgtcctcatcaccttggcctcaactaattaggccaaacagatgtacttcactcaaggagaaccaatcatattttctctctgtctctcaaaaaaaaattgaactgagaccagtgagtaagttggtgtctgggtcaggttaatggtggtgaactatgtgcctgtgagctcttcagagctggttgggttcaccaccttcataagacctgcctctgtaccatttttccttgagtgtgctttgtataaaggtctgtacaataaatcacacttttttaaagcttagattgaataggtttctgctccttgacaagagatatggcctgaataaaatgaattttgaaagaaaagcctaata

SEQ ID NO: 427516 - DNA, 1332 bp, Homo sapiens
ttacgttgatctgagaaaaacaagggtgtacagatatgagagtgccatttggggacctcttcattattcacgccctgttttaaacttgatttttgacagtgagtgggtaaaaagagaatttgtggcaattcttaaaaacttgaccaccacaggaagacaatttggaggcattttggctgcacacagtatagccactacactgaaatactggtaccatggctcaccacctggggagattgtatctttaggaatattgagtgaaggccagtttggtattccgaaagggatcgtcttttctatgcctgtgaaatttgagaatggaacttgggtggttcttacagatctcaaagatgttgaaataagtgaacaaataatgacccgaatgacaagtgatctaattcaggagaaacttgttgcacttggagacaagatacattttcagccataccaatcaggacataaagatctggtccctgatgaagaaaaaaatctagctatgtcagatgcagcagagtttccaaatcagattcctcaaaccacctttgaaaagccacagagtcttgagttcctaaatgaatttgaaggcaaaaccgtggaatcctaacagatcaaattggatgaaatatataattacttgatagcacaataaacatagaaagaatttatatgaatgtctatatttaaggaagaataatttgaaagatttatgtcagtcttagataataccatgcaaggcaattaaatcactgtgacagcacagaggtcagagttccgtcattttgcattacttgtatccactcatgtttgtttcataataattgcattttcttagaactattttggtgtcaaatgctattttttatattacattaaaatagagttgtcagtcattgcatctgcccatacatcttctgagagaacctgcttccttccatcagccatacctaagacctgcacctaagtggccatgtttgctcaaatgtcctcatcaccttggcctcaactaattaggccaaacagatgtacttcactcaaggagaaccaatcatattttctctctgtctctcaaaaaaaaattgaactgagaccagtgagtaagttggtgtctgggtcaggttaatggtggtgaactatgtgcctgtgagctcttcagagctggttgggttcaccaccttcataagacctgcctctgtaccatttttccttgagtgtgctttgtataaaggtctgtacaataaatcacacttttttaaagcttagattgaataggtttctgctccttgacaagagatatggcctgaataaaatgaattttgaaagaaaagcctaata

SEQ ID NO: 427517 - DNA, 1157 bp, Homo sapiens
agacacacccaggatcaatactttgcatccttcaatccaatcaagttggcactcggtattaaccatcacaattagaaaaagataagtattatttcatgtatttttttgtttcattaatatgtacacaaatgtacacattggactataatgtaaaatgtgtcttttattgtgggtcatagtcactgaagtttgaaaaacattgactcagaacatctcatgacctagttaggttgttggttatattctaaatccagcatgttttatttaattttgatttcaggacataaagatctggtccctgatgaagaaaaaaatctagctatgtcagatgcagcagagtttccaaatcagattcctcaaaccacctttgaaaagccacagagtcttgagttcctaaatgaatttgaaggcaaaaccgtggaatcctaacagatcaaattggatgaaatatataattacttgatagcacaataaacatagaaagaatttatatgaatgtctatatttaaggaagaataatttgaaagatttatgtcagtcttagataataccatgcaaggcaattaaatcactgtgacagcacagaggtcagagttccgtcattttgcattacttgtatccactcatgtttgtttcataataattgcattttcttagaactattttggtgtcaaatgctattttttatattacattaaaatagagttgtcagtcattgcatctgcccatacatcttctgagagaacctgcttccttccatcagccatacctaagacctgcacctaagtggccatgtttgctcaaatgtcctcatcaccttggcctcaactaattaggccaaacagatgtacttcactcaaggagaaccaatcatattttctctctgtctctcaaaaaaaaattgaactgagaccagtgagtaagttggtgtctgggtcaggttaatggtggtgaactatgtgcctgtgagctcttcagagctggttgggttcaccaccttcataagacctgcctctgtaccatttttccttgagtgtgctttgtataaaggtctgtacaataaatcacacttttttaaagcttagattgaataggtttctgctccttgacaagagatatggcctgaataaaatgaattttgaaagaaaagcctaata

SEQ ID NO: 427518 - DNA, 979 bp, Homo sapiens
ggctgcgtggttgccaggaaaccgcgaagccgcggtccctgcctctgagtctctctcgaccatggccaaattcgtcatcgcgggtagagcagattgtccatattatgctaaaacagaacttgtggcagactatttacaaaagaatcttcctgattttcggatacataaaatcacacaacgtcctgaggtttgggaggattggctaaaagatgtgtgtgaaaagaataagtggagtcacaagaattcccctatcatctggagagagctgttggatcgtggaggaaagggtttgcttttgggaggatataatgagttcctggagcatgctcagctttactatgatgtcacctctagcatgacgactgaactgatgatggtaattgctcaagagaacctgggggcacatatagaaaaagagcaggaggaagaagccctgaaaacttgcatcaaccccttgcaggtctggatcaccagtgagtgggtaaaaagagaatttgtggcaattcttaaaaacttgaccaccacaggaagacaatttggaggcattttggctgcacacagtatagccactacactgaaatactggtaccatggctcaccacctggggagattgtatctttaggaatattgagtgaaggccagtttggtattccgaaagggatcgtcttttctatgcctgtgaaatttgagaatggaacttgggtggttcttacagatctcaaagatgttgaaataagtgaacaaataatgacccgaatgacaagtgatctaattcaggagaaacttgttgcacttggagacaagatacattttcagccataccaatcaggacataaagatctggtccctgatgaagaaaaaaatctagctatgtcagatgcagcagagtttccaaatcagattcctcaaaccacctttgaaaagccacagagtcttgagttcctaaatggtaggtggtagacaaaacattaactagta

SEQ ID NO: 427519 - DNA, 1341 bp, Homo sapiens
tgggatatcattcaacaggattggctaaaagatgtgtgtgaaaagaataagtggagtcacaagaattcccctatcatctggagagagctgttggatcgtggaggaaagggtttgcttttgggaggatataatgagttcctggagcatgctcagctttactatgatgtcacctctagcatgacgactgaactgatgatggtaattgctcaagagaacctgggggcacatatagaaaaagagcaggaggaagaagccctgaaaacttgcatcaaccccttgcaggtctggatcaccagtgcctctgctcctgcctgctacaacctaattcccatattgacgagtggcgaagtgtttgggatgcatacagaaattagcataactctatttgacaacaagcaggcggaagaacatctcaaaagccttgtggtggagacccaagacctggcatctcccgtcctgcgcagtgtctccatctgcacgaaggtggaggaggccttccgccaggcccacgtcattgtggtgctggatgacagcaccaacaaggaggtgttcactctggaggactgcctccgaagcagggtgcctctctgcaggctctatgggtacctgatagagaaaaatgctcatgagtctgtcagagtcatcgtgggagggagaacctttgtaaacctgaagacagttttactcatgagatatgccccacgcattgcacacaacattattgctgtggcgctgggggtggaaggtgaagcgaaagccatactggccagaaaactgaagacagctccttcatgtgagtgaatgtctctttatgtttttgtttttattttgaaacaacatgatttcaaagcagctaggaagaacactgtcccctctaggaacattctgagtatctggaataggaagtataaaacagacataaagaacttattgtgtgatttgactactgtgcaaacatttttttttactggcttttgtgtctggctttttccatcattataaaaatcaataaatatttaataagatacaatttatattattcaggtgataatgtgacacatcgtattccatttttcccatggtaatagtcaattaagataaccagtgttttaaaaaaaatcaaaactatgtgcaagtggctctgccctacttcccacccgtatgatcttgagccgtcatttagtctttcagtgcgtcagtttcctcatctgtaaaatgaggacgttaacagtgcctatctcctagaattgatgtggggattcaatgagatgtattcctaaagtgctaagaagagtgtatggcacataataaacatttctaaggatgttaaacttatcaata

SEQ ID NO: 427520 - DNA, 1569 bp, Homo sapiens
ggctgcgtggttgccaggaaaccgcgaagccgcggtccctgcctctgagtctctctcgaccatggccaaattcgtcatcgcgggtagagcagattgtccatattatgctaaaacagaacttgtggcagactatttacaaaagaatcttcctgattttcggatacataaaatcacacaacgtcctgaggtttgggaggattggctaaaagatgtgtgtgaaaagaataagtggagtcacaagaattcccctatcatctggagagagctgttggatcgtggaggaaagggtttgcttttgggaggatataatgagttcctggagcatgctcagctttactatgatgtcacctctagcatgacgactgaactgatgatggtaattgctcaagagaacctgggggcacatatagaaaaagagcaggaggaagaagccctgaaaacttgcatcaaccccttgcaggtctggatcaccagtgagtgggtaaaaagagaatttgtggcaattcttaaaaacttgaccaccacaggaagacaatttggaggcattttggctgcacacagtatagccactacactgaaatactggtaccatggctcaccacctggggagattgtatctttaggaatattgagtgaaggccagtttggtattccgaaagggatcgtcttttctatgcctgtgaaatttgagaatggaacttgggtggttcttacagatctcaaagatgttgaaataagtgaacaaataatgacccgaatgacaagtgatctaattcaggagaaacttgttgcacttggagacaagatacattttcagccataccaatcaggacataaagatctggtccctgatgaagaaaaaaatctagctatgtcagatgcagcagagtttccaaatcagattcctcaaaccacctttgaaaagccacagagtcttgagttcctaaatgaatttgaaggcaaaaccgtggaatcctaacagatcaaattggatgaaatatataattacttgatagcacaataaacatagaaagaataaaaaaaaaaaaaaaaaaaaaaaaaaaaaaaaaaaaaaaaaaaaaaaaaaaaaaaaaaaaaaaaaaaaaaaaaaaaaaagaagaaagaaagagaaaacagagaaaccacgaagacacacaagagacacacacagcaaaaacgagagcaaaccaacaagaaagagagggagggacgacgcggcgaacagtacagggacgacgacggaagggacacagcgcgggcagaggcaccacacggaggcagcagcacagcgaacgcagcacaaagggaggtatagaggacgcacgagcgcggggcggagagaaggaagagaggatagacgtgcgcacagcgcgagaaagagtgcgctggcaggggaggctggaaaggatgaaacacaaaccaagcaacatacaggataaacgagagaacgcgaaacgagggaagaacgaaacgaaagaagaaataaggaggggaggcgtaggacgaaggggcgacgagagcaaggggggagcggggaagcgccggaagagaggagagaggagcaaataa

SEQ ID NO: 427521 - DNA, 1723 bp, Homo sapiens
aaggctcttttcttggttgtaccctgaatcctagagataggaattggtccttctcacctgcttcttgaccccttccctgcatgctgatggtgctttggatccctgttctttctggctcaaagattttgcttcccactgctttttccagggttctagccctgggaatgatgattggcgctttcttgctaatataatgacatgagccaccagattgctgggttttaaatacattagtaggctattgtaacaagcaagtttggggcttgctttttccctcgaaagatcttattaagggatgggatccttgctgcagattagtagcagaaagattatttctcaggggatgagaggctggataactgtagtaatgctcttgctgtttcctacagctcctacccagagattctacccagtgaaactcccacagcaacgcaggtagatggggctgacctggcctctccaatgtctcctcgaactagcaaaagccgcatgtccatgaagctgcgtcgttcctctggctcagccaataaatcctaaggagacaagcagcccagcagtgatcagcagtagccaccttagcacgaacatagggttaaccctttcaggccttcatgtctgccataacatgcatgtttcttcctgtacatttatttgagaaaacactggatttaaataattttaaataatttgtagcttaatattaaagatttaagttatttattgtttcattttttttcccacaatccaagctgccatattttgagggcagggggagttttattctacaccctttaccttcctagataattatgtctaagtagttttatctttaatttcatggttaactgtgagccaaaatacaattggacaattagtctcattatttattgtgccccattgcaactttatggttcaataaatatataattttttacaaatgtaaaattttacatttaagcatttgtaaagttacagcaaaagatgtacctgttaatacacagaatgtgtacagattatttgttatgacaataaaacactcaaaataaatggtctttagcatctcaaattccaactgaaatcattttagtattaactcttcttcccaaagcaatgtctcatttcttggctgtgcaggtgatgccatgttatatccaataactagaaaaatcactgtgctgaacttttatgtttagcttccaagtatttttctaatgttttgcatttcaagtggtatcactgttaaatgccatttgttttcagattgtggccttttattattggctgctagatcctggtgtttctatgttcttttttaagcaccaaaaagaagatggggaagaaaagaaggaaaattttctgatataaatatgttgttcaaattatgagtattatttaaaaaagaaaaaggaacataacccaggagtctaagttaaatctaatattgttaatactgaacttgcaggtccaggttggtatacattccaccctctagaagtattttcttacagtagataagctgctcacattttgttttgaatgggcatctcctgaggaaatgtagcatgacattggtactaactgcatgtgtaaatacatcatactggcaaaccgtaaaatataaattatgtatcatcattcatgtagtatctataatttgtaacagtgggggggaaagatgacatggtatttaataatacaataaaaatattcttatcacttccta

SEQ ID NO: 427522 - DNA, 1054 bp, Homo sapiens
gaaattgcttttaaagatataatattttatagggctatatctgcccaataattagcagctttaaaccagtcatacctgtcaccaaacagtacaaacgaaaccacaataaaaaatgatcttttgagctccctcttataatccctatatatcccaaaagtcatatccattatgttaattgtaataatagtttattgtaatcaatgtgcaatatatgaatcaatttatcccatcagattacacagtctgtgtgagcactgtaagaatgttagtaacagatacggtatgcacaaacataggagctcatgtgtacttttaaaacctcatccttgaggatatattaataatagaaataaatcagcattctttatgactcaagtagtataaatcaataggtagagtaggatgtgaaatgaaatgtaggttgttactacattttttacatctaaaattgaggtctttctactgtaaattatttatagagtttgggaatgttgaatatataccacaaatgtaatttgctaaattgttaggaagtactgataactatacaccacacacactaaaaatccttatttgactctgttgagtgaagggagatttcactttaaaggcagtgaggaagacatggaagaattgtttttgaggaaaatattatttgagtttgccataatgtagagcaatgctctctgataaagccctccttctatggtgatggaaatgttctatatctgcactgtctaatgtggaagccgctaactacatgtggctgttgaacaattgaaatgtggctagtgtactgaggaactgaatttttatttaattcattttaattcaataaatttaaacttaatgtggctgtggctaccacattggacaatgcagctctagagattttatgtctgagtgattaggataacatgccaacagtacagtgaacactttaaaaggtagatatttacagaatctctcatagaccttttttcttcttttcttttttcctatttgaacttgttttgttagttggtaagtataacatttgaatttacaaagcatt

SEQ ID NO: 427523 - DNA, 3275 bp, Homo sapiens
atcatggccttacctctaaagacactgctccaaccatttcatgctacgggagcagaaagcgataaaacagaaaaatctgttctcaattgcatttataaggttttacatgggtgtgtttatggagctcagtgttttagcaatccaaggtattttcccatgagcctctctgatttggcatctgtagattatgatccttttatgcatttggaaagtctgaaagagcctgagcctctgcactctcctgactcagaacgatcttctaaactccagccagtaacagaagtgaaaactcaaatgcagcatggattaatctctatagcagcccgcactgttattacacatctggtaaatcacctgggccattatccaatgagcggtggtcctgctatgctaacaagtcaggtgtgtgaaaatcacgacaatcattacagtgaaagtactgaactttctcctgaactctttgagagtccaaatatccagttctttgtgttaaataatacaaccttagtgtcctgtatccagatcagatcagaagagaatatgcctggaggaggtttatctgctggccttgcatcagccaattcaaatgtcagaatcatagtacgtgatctctctggaaaatattcatgggattctgctatactgtatggcccacctcctgtaagtggcttgtcagaacctacatctttcatgctttcattgtctcaccaagagaagccagaagagcctccgacatctaatgaatgcttagaagatataaccgtaaaagatggactttctctccagtttaaaagatttagagaaactgtaccaacttgggatacaataagagatgaagaagatgttcttgatgagctcttgcagtatttgggtgttactagtcctgaatgcttacagagaactggaatctcacttaatattcctgctccacaacctgtgtgcatttctgaaaaacaagaaaatgatgttattaatgctatccttaagcaacatacagaagaaaaagaatttgttgagaagcactttaatgacttaaacatgaaagctgtggaacaagatgaaccaatacctcaaaaacctcagtcagcattttattattgcagattgcttcttagtatattgggaatgaattcctgggacaaacggaggagctttcatctcctgaagaaaaatgaaaagctacttagagaacttaggaacttggattcaaggcagtgccgagagacacacaagattgcagtattttatgttgctgaaggacaagaagacaaacactccattctcaccaatacaggaggaagtcaagcatatgaagattttgtagctggtcttggttgggaggtaaatcttacaaaccattgtggttttatgggaggactacaaaaaaacaaaagcactggattgaccactccatattttgctacctctacagtagaggtaatatttcacgtgtcaacaagaatgccttctgattctgatgattctttgaccaaaaaattgagacatttgggaaatgatgaagtgcacattgtttggtcagagcatactagagactacaggagaggaattattcccacagaatttggtgatgtccttattgtaatatatccaatgaaaaatcacatgttcagtattcagataatgaaaaaaccagaggttcccttctttggtcccctttttgatggtgctattgtgaatggaaaggttctacccattatggttagagcaacagctataaatgcaagccgtgctctgaaatctctgattccattgtatcaaaacttctatgaggagagagcacgatacctgcaaacaattgtccagcaccacttagaaccaacaacatttgaagattttgcagcacaggttttttctccagctccctaccaccatttaccatctgatgccgatcattaaatatcagttctgtttatctgaaggctcctacccagagattctacccagtgaaactcccacagcaacgcaggtagatggggctgacctggcctctccaatgtctcctcgaactagcaaaagccgcatgtccatgaagctgcgtcgttcctctggctcagccaataaatcctaaggagacaagcagcccagcagtgatcagcagtagccaccttagcacgaacatagggttaaccctttcaggccttcatgtctgccataacatgcatgtttcttcctgtacatttatttgagaaaacactggatttaaataattttaaataatttgtagcttaatattaaagatttaagttatttattgtttcattttttttcccacaatccaagctgccatattttgagggcagggggagttttattctacaccctttaccttcctagataattatgtctaagtagttttatctttaatttcatggttaactgtgagccaaaatacaattggacaattagtctcattatttattgtgccccattgcaactttatggttcaataaatatataattttttacaaatgtaaaattttacatttaagcatttgtaaagttacagcaaaagatgtacctgttaatacacagaatgtgtacagattatttgttatgacaataaaacactcaaaataaatggtctttagcatctcaaattccaactgaaatcattttagtattaactcttcttcccaaagcaatgtctcatttcttggctgtgcaggtgatgccatgttatatccaataactagaaaaatcactgtgctgaacttttatgtttagcttccaagtatttttctaatgttttgcatttcaagtggtatcactgttaaatgccatttgttttcagattgtggccttttattattggctgctagatcctggtgtttctatgttcttttttaagcaccaaaaagaagatggggaagaaaagaaggaaaattttctgatataaatatgttgttcaaattatgagtattatttaaaaaagaaaaaggaacataacccaggagtctaagttaaatctaatattgttaatactgaacttgcaggtccaggttggtatacattccaccctctagaagtattttcttacagtagataagctgctcacattttgttttgaatgggcatctcctgaggaaatgtagcatgacattggtactaactgcatgtgtaaatacatcatactggcaaaccgtaaaatataaattatgtatcatcattcatgtagtatctataatttgtaacagtgggggggaaagatgacatggtatttaataatacaataaaaatattcttatcacttccta

SEQ ID NO: 427524 - DNA, 3222 bp, Homo sapiens
atcatggccttacctctaaagacactgctccaaccatttcatgctacgggagcagaaagcgataaaacagaaaaatctgttctcaattgcatttataaggttttacatgggtgtgtttatggagctcagtgttttagcaatccaaggtattttcccatgagcctctctgatttggcatctgtagattatgatccttttatgcatttggaaagtctgaaagagcctgagcctctgcactctcctgactcagaacgatcttctaaactccagccagtaacagaagtgaaaactcaaatgcagcatggattaatctctatagcagcccgcactgttattacacatctggtaaatcacctgggccattatccaatgagcggtggtcctgctatgctaacaagtcaggtgtgtgaaaatcacgacaatcattacagtgaaagtactgaactttctcctgaactctttgagagtccaaatatccagttctttgtgttaaataatacaaccttagtgtcctgtatccagatcagatcagaagagaatatgcctggaggaggtttatctgctggccttgcatcagccaattcaaatgtcagaatcatagtacgtgatctctctggaaaatattcatgggattctgctatactgtatggcccacctcctgtaagtggcttgtcagaacctacatctttcatgctttcattgtctcaccaagagaagccagaagagcctccgacatctaatgaatgcttagaagatataaccgtaaaagatggactttctctccagttatgttcttgatgagctcttgcagtatttgggtgttactagtcctgaatgcttacagagaactggaatctcacttaatattcctgctccacaacctgtgtgcatttctgaaaaacaagaaaatgatgttattaatgctatccttaagcaacatacagaagaaaaagaatttgttgagaagcactttaatgacttaaacatgaaagctgtggaacaagatgaaccaatacctcaaaaacctcagtcagcattttattattgcagattgcttcttagtatattgggaatgaattcctgggacaaacggaggagctttcatctcctgaagaaaaatgaaaagctacttagagaacttaggaacttggattcaaggcagtgccgagagacacacaagattgcagtattttatgttgctgaaggacaagaagacaaacactccattctcaccaatacaggaggaagtcaagcatatgaagattttgtagctggtcttggttgggaggtaaatcttacaaaccattgtggttttatgggaggactacaaaaaaacaaaagcactggattgaccactccatattttgctacctctacagtagaggtaatatttcacgtgtcaacaagaatgccttctgattctgatgattctttgaccaaaaaattgagacatttgggaaatgatgaagtgcacattgtttggtcagagcatactagagactacaggagaggaattattcccacagaatttggtgatgtccttattgtaatatatccaatgaaaaatcacatgttcagtattcagataatgaaaaaaccagaggttcccttctttggtcccctttttgatggtgctattgtgaatggaaaggttctacccattatggttagagcaacagctataaatgcaagccgtgctctgaaatctctgattccattgtatcaaaacttctatgaggagagagcacgatacctgcaaacaattgtccagcaccacttagaaccaacaacatttgaagattttgcagcacaggttttttctccagctccctaccaccatttaccatctgatgccgatcattaaatatcagttctgtttatctgaaggctcctacccagagattctacccagtgaaactcccacagcaacgcaggtagatggggctgacctggcctctccaatgtctcctcgaactagcaaaagccgcatgtccatgaagctgcgtcgttcctctggctcagccaataaatcctaaggagacaagcagcccagcagtgatcagcagtagccaccttagcacgaacatagggttaaccctttcaggccttcatgtctgccataacatgcatgtttcttcctgtacatttatttgagaaaacactggatttaaataattttaaataatttgtagcttaatattaaagatttaagttatttattgtttcattttttttcccacaatccaagctgccatattttgagggcagggggagttttattctacaccctttaccttcctagataattatgtctaagtagttttatctttaatttcatggttaactgtgagccaaaatacaattggacaattagtctcattatttattgtgccccattgcaactttatggttcaataaatatataattttttacaaatgtaaaattttacatttaagcatttgtaaagttacagcaaaagatgtacctgttaatacacagaatgtgtacagattatttgttatgacaataaaacactcaaaataaatggtctttagcatctcaaattccaactgaaatcattttagtattaactcttcttcccaaagcaatgtctcatttcttggctgtgcaggtgatgccatgttatatccaataactagaaaaatcactgtgctgaacttttatgtttagcttccaagtatttttctaatgttttgcatttcaagtggtatcactgttaaatgccatttgttttcagattgtggccttttattattggctgctagatcctggtgtttctatgttcttttttaagcaccaaaaagaagatggggaagaaaagaaggaaaattttctgatataaatatgttgttcaaattatgagtattatttaaaaaagaaaaaggaacataacccaggagtctaagttaaatctaatattgttaatactgaacttgcaggtccaggttggtatacattccaccctctagaagtattttcttacagtagataagctgctcacattttgttttgaatgggcatctcctgaggaaatgtagcatgacattggtactaactgcatgtgtaaatacatcatactggcaaaccgtaaaatataaattatgtatcatcattcatgtagtatctataatttgtaacagtgggggggaaagatgacatggtatttaataatacaataaaaatattcttatcacttccta

SEQ ID NO: 427525 - DNA, 3244 bp, Homo sapiens
atcatggccttacctctaaagacactgctccaaccatttcatgctacgggagcagaaagcgataaaacagaaaaatctgttctcaattgcatttataaggttttacatgggtgtgtttatggagctcagtgttttagcaatccaaggtattttcccatgagcctctctgatttggcatctgtagattatgatccttttatgcatttggaaagtctgaaagagcctgagcctctgcactctcctgactcagaacgatcttctaaactccagccagtaacagaagtgaaaactcaaatgcagcatggattaatctctatagcagcccgcactgttattacacatctggtaaatcacctgggccattatccaatgagcggtggtcctgctatgctaacaagtcaggtgtgtgaaaatcacgacaatcattacagtgaaagtactgaactttctcctgaactctttgagagtccaaatatccagttctttgtgttaaataatacaaccttagtgtcctgtatccagatcagatcagaagagaatatgcctggaggaggtttatctgctggccttgcatcagccaattcaaatgtcagaatcatagtacgtgatctctctggaaaatattcatgggattctgctatactgtatggcccacctcctgtaagtggcttgtcagaacctacatctttcatgctttcattgtctcaccaagagaagccagaagagcctccgacatctaatgaatgcttagaagatataaccgtaaaagatggactttctctccagtttaaaagatttagagaaactgtaccaacttgggatacaataagagatgaagaagatgttcttgatgagctcttgcagtatttgggtgttactagtcctgaatgcttacagagaactggaatctcacttaatattcctgctccacaacctgtgtgcatttctgaaaaacaagaaaatgatgttattaatgctatccttaagcaacatacagaagaaaaagaatttgttgagaagcactttaatgacttaaacatgaaagctgtggaacaagatgaaccaatacctcaaaaacctcagtcagcattttattattgcagattgcttcttagtatattgggaatgaattcctgggacaaacggaggagctttcatctcctgaagaaaaatgaaaagctacttagagaacttaggaacttggattcaaggcagtgccgagagacacacaagattgcagtattttatgttgctgaaggacaagaagacaaacactccattctcaccaatacaggaggaagtcaagcatatgaagattttgtagctggtcttggttgggaggtaaatcttacaaaccattgtggttttatgggaggactacaaaaaaacaaaagcactggattgaccactccatattttgctacctctacagtagaggtaatatttcacgtgtcaacaagaatgccttctgattctgatgattctttgaccaaaaaattgagacatttgggaaatgatgaagtgcacattgtttggtcagagcatactagagactacaggagaggaattattcccacagaatttggtgatgtccttattgtaatatatccaatgaaaaatcacatgttcagtattcagataatgaaaaaaccagaggttcccttctttggtcccctttttgatggtgctattgtgaatggaaaggttctacccattatggttagagcaacagctataaatgcaagccgtgctctgaaatctctgattccattgtatcaaaacttctatgaggagagagcacgatacctgcaaacaattgtccagcaccacttagaaccaacaacatttgaagattttgcagcacaggttttttctccagctccctaccaccatttaccatctgatgccggctcctacccagagattctacccagtgaaactcccacagcaacgcaggtagatggggctgacctggcctctccaatgtctcctcgaactagcaaaagccgcatgtccatgaagctgcgtcgttcctctggctcagccaataaatcctaaggagacaagcagcccagcagtgatcagcagtagccaccttagcacgaacatagggttaaccctttcaggccttcatgtctgccataacatgcatgtttcttcctgtacatttatttgagaaaacactggatttaaataattttaaataatttgtagcttaatattaaagatttaagttatttattgtttcattttttttcccacaatccaagctgccatattttgagggcagggggagttttattctacaccctttaccttcctagataattatgtctaagtagttttatctttaatttcatggttaactgtgagccaaaatacaattggacaattagtctcattatttattgtgccccattgcaactttatggttcaataaatatataattttttacaaatgtaaaattttacatttaagcatttgtaaagttacagcaaaagatgtacctgttaatacacagaatgtgtacagattatttgttatgacaataaaacactcaaaataaatggtctttagcatctcaaattccaactgaaatcattttagtattaactcttcttcccaaagcaatgtctcatttcttggctgtgcaggtgatgccatgttatatccaataactagaaaaatcactgtgctgaacttttatgtttagcttccaagtatttttctaatgttttgcatttcaagtggtatcactgttaaatgccatttgttttcagattgtggccttttattattggctgctagatcctggtgtttctatgttcttttttaagcaccaaaaagaagatggggaagaaaagaaggaaaattttctgatataaatatgttgttcaaattatgagtattatttaaaaaagaaaaaggaacataacccaggagtctaagttaaatctaatattgttaatactgaacttgcaggtccaggttggtatacattccaccctctagaagtattttcttacagtagataagctgctcacattttgttttgaatgggcatctcctgaggaaatgtagcatgacattggtactaactgcatgtgtaaatacatcatactggcaaaccgtaaaatataaattatgtatcatcattcatgtagtatctataatttgtaacagtgggggggaaagatgacatggtatttaataatacaataaaaatattcttatcacttccta

SEQ ID NO: 427526 - DNA, 1920 bp, Homo sapiens
tttgtgtttcatatgtaaaactgatcaagtgcaatttaacaattttttaatttcgtttttcccctttttatgttgtatgtgactgtatgactgtactcaaagagcttttaaagcagtataaattgttttcttgtctttccagttgagacatttgggaaatgatgaagtgcacattgtttggtcagagcatactagagactacaggagaggaattattcccacagaatttggtgatgtccttattgtaatatatccaatgaaaaatcacatgttcagtattcagataatgaaaaaaccagaggttcccttctttggtcccctttttgatggtgctattgtgaatggaaaggttctacccattatggttagagcaacagctataaatgcaagccgtgctctgaaatctctgattccattgtatcaaaacttctatgaggagagagcacgatacctgcaaacaattgtccagcaccacttagaaccaacaacatttgaagattttgcagcacaggttttttctccagctccctaccaccatttaccatctgatgccgatcattaaatatcagttctgtttatctgaaggctcctacccagagattctacccagtgaaactcccacagcaacgcaggtagatggggctgacctggcctctccaatgtctcctcgaactagcaaaagccgcatgtccatgaagctgcgtcgttcctctggctcagccaataaatcctaaggagacaagcagcccagcagtgatcagcagtagccaccttagcacgaacatagggttaaccctttcaggccttcatgtctgccataacatgcatgtttcttcctgtacatttatttgagaaaacactggatttaaataattttaaataatttgtagcttaatattaaagatttaagttatttattgtttcattttttttcccacaatccaagctgccatattttgagggcagggggagttttattctacaccctttaccttcctagataattatgtctaagtagttttatctttaatttcatggttaactgtgagccaaaatacaattggacaattagtctcattatttattgtgccccattgcaactttatggttcaataaatatataattttttacaaatgtaaaattttacatttaagcatttgtaaagttacagcaaaagatgtacctgttaatacacagaatgtgtacagattatttgttatgacaataaaacactcaaaataaatggtctttagcatctcaaattccaactgaaatcattttagtattaactcttcttcccaaagcaatgtctcatttcttggctgtgcaggtgatgccatgttatatccaataactagaaaaatcactgtgctgaacttttatgtttagcttccaagtatttttctaatgttttgcatttcaagtggtatcactgttaaatgccatttgttttcagattgtggccttttattattggctgctagatcctggtgtttctatgttcttttttaagcaccaaaaagaagatggggaagaaaagaaggaaaattttctgatataaatatgttgttcaaattatgagtattatttaaaaaagaaaaaggaacataacccaggagtctaagttaaatctaatattgttaatactgaacttgcaggtccaggttggtatacattccaccctctagaagtattttcttacagtagataagctgctcacattttgttttgaatgggcatctcctgaggaaatgtagcatgacattggtactaactgcatgtgtaaatacatcatactggcaaaccgtaaaatataaattatgtatcatcattcatgtagtatctataatttgtaacagtgggggggaaagatgacatggtatttaataatacaataaaaatattcttatcacttccta

SEQ ID NO: 427527 - DNA, 2358 bp, Homo sapiens
gaaattgcttttaaagatataatattttatagggctatatctgcccaataattagcagctttaaaccagtcatacctgtcaccaaacagtacaaacgaaaccacaataaaaaatgatcttttgagctccctcttataatccctatatatcccaaaagtcatatccattatgttaattgtaataatagtttattgtaatcaatgtgcaatatatgaatcaatttatcccatcagattacacagtctgtgtgagcactgtaagaatgttagtaacagatacggtatgcacaaacataggagctcatgtgtacttttaaaacctcatccttgaggatatattaataatagaaataaatcagcattctttatgactcaagtagtataaatcaataggtagagtaggatgtgaaatgaaatgtaggttgttactacattttttacatctaaaattgaggtctttctactgtaaattatttatagagtttgggaatgttgaatatataccacaaatgtaatttgctaaattgttaggaagtactgataactatacaccacacacactaaaaatccttatttgactctgttgagtgaagggagatttcactttaaaggcagtgaggaagacatggaagaattgtttttgaggaaaatattatttgagtttgccataatgtagagcaatgctctctgataaagccctccttctatggtgatggaaatgttctatatctgcactgtctaatgtggaagccgctaactacatgtggctgttgaacaattgaaatgtggctagtgtactgaggaactgaatttttatttaattcattttaattcaataaatttaaacttaatgtggctgtggctaccacattggacaatgcagctctagagattttatgtctgagtgattaggataacatgccaacagtacagtgaacactttaaaaggtagatatttacagaatctctcatagaccttttttcttcttttcttttttcctatttgaacttgttttgttagttggctcctacccagagattctacccagtgaaactcccacagcaacgcaggtagatggggctgacctggcctctccaatgtctcctcgaactagcaaaagccgcatgtccatgaagctgcgtcgttcctctggctcagccaataaatcctaaggagacaagcagcccagcagtgatcagcagtagccaccttagcacgaacatagggttaaccctttcaggccttcatgtctgccataacatgcatgtttcttcctgtacatttatttgagaaaacactggatttaaataattttaaataatttgtagcttaatattaaagatttaagttatttattgtttcattttttttcccacaatccaagctgccatattttgagggcagggggagttttattctacaccctttaccttcctagataattatgtctaagtagttttatctttaatttcatggttaactgtgagccaaaatacaattggacaattagtctcattatttattgtgccccattgcaactttatggttcaataaatatataattttttacaaatgtaaaattttacatttaagcatttgtaaagttacagcaaaagatgtacctgttaatacacagaatgtgtacagattatttgttatgacaataaaacactcaaaataaatggtctttagcatctcaaattccaactgaaatcattttagtattaactcttcttcccaaagcaatgtctcatttcttggctgtgcaggtgatgccatgttatatccaataactagaaaaatcactgtgctgaacttttatgtttagcttccaagtatttttctaatgttttgcatttcaagtggtatcactgttaaatgccatttgttttcagattgtggccttttattattggctgctagatcctggtgtttctatgttcttttttaagcaccaaaaagaagatggggaagaaaagaaggaaaattttctgatataaatatgttgttcaaattatgagtattatttaaaaaagaaaaaggaacataacccaggagtctaagttaaatctaatattgttaatactgaacttgcaggtccaggttggtatacattccaccctctagaagtattttcttacagtagataagctgctcacattttgttttgaatgggcatctcctgaggaaatgtagcatgacattggtactaactgcatgtgtaaatacatcatactggcaaaccgtaaaatataaattatgtatcatcattcatgtagtatctataatttgtaacagtgggggggaaagatgacatggtatttaataatacaataaaaatattcttatcacttccta

SEQ ID NO: 427528 - DNA, 1933 bp, Homo sapiens
atcatggccttacctctaaagacactgctccaaccatttcatgctacgggagcagaaagcgataaaacagaaaaatctgttctcaattgcatttataaggttttacatgggtgtgtttatggagctcagtgttttagcaatccaaggtattttcccatgagcctctctgatttggcatctgtagattatgatccttttatgcatttggaaagtctgaaagagcctgagcctctgcactctcctgactcagaacgatcttctaaactccagccagtaacagaagtgaaaactcaaatgcagcatggattaatctctatagcagcccgcactgttattacacatctggtaaatcacctgggccattatccaatgagcggtggtcctgctatgctaacaagtcaggtgtgtgaaaatcacgacaatcattacagtgaaagtactgaactttctcctgaactctttgagagtccaaatatccagttctttgtgttaaataatacaaccttagtgtcctgtatccagatcagatcagaagagaatatgcctggaggaggtttatctgctggccttgcatcagccaattcaaatgtcagaatcatagtacgtgatctctctggaaaatattcatgggattctgctatactgtatggcccacctcctgtaagtggcttgtcagaacctacatctttcatgctttcattgtctcaccaagagaagccagaagagcctccgacatctaatgaatgcttagaagatataaccgtaaaagatggactttctctccagtttaaaagatttagagaaactgtaccaacttgggatacaataagagatgaagaagatgttcttgatgagctcttgcagtatttgggtgttactagtcctgaatgcttacagagaactggaatctcacttaatattcctgctccacaacctgtgtgcatttctgaaaaacaagaaaatgatgttattaatgctatccttaagcaacatacagaagaaaaagaatttgttgagaagcactttaatgacttaaacatgaaagctgtggaacaagatgaaccaatacctcaaaaacctcagtcagcattttattattgcagattgcttcttagtatattgggaatgaattcctgggacaaacggaggagctttcatctcctgaagaaaaatgaaaagctacttagagaacttaggaacttggattcaaggcagtgccgagagacacacaagattgcagtattttatgttgctgaaggacaagaagacaaacactccattctcaccaatacaggaggaagtcaagcatatgaagattttgtagctggtcttggttgggaggtaaatcttacaaaccattgtggttttatgggaggactacaaaaaaacaaaagcactggattgaccactccatattttgctacctctacagtagaggtaatatttcacgtgtcaacaagaatgccttctgattctgatgattctttgaccaaaaaattgagacatttgggaaatgatgaagtgcacattgtttggtcagagcatactagagactacaggagaggaattattcccacagaatttggtgatgtccttattgtaatatatccaatgaaaaatcacatgttcagtattcagataatgaaaaaaccagaggttcccttctttggtcccctttttgatggtgctattgtgaatggaaaggttctacccattatggttagagcaacagctataaatgcaagccgtgctctgaaatctctgattccattgtatcaaaactttttattctccctcaagctctgctactcaaatgtccagtacctgttgcaaagtaggaaagccaaaactaagtggaatggaattgatgaattgattggttctgctaatgcagttgcctttcgttataataaaacattataaaaccttttgg

SEQ ID NO: 427529 - DNA, 496 bp, Homo sapiens
tcaaccatgggattcggctacattgcaaaacagacaactcttaagatgcttatgtattcacacctatgtgtccttcctgatgctctttctcttcatttgtcaaatctttcttaccttcatctaactcaattttatcttctcctttaagtttctgtttttgcagtcaaaagtgatcgtgcctgtcttttattctaatggcaattttgtagtaattttttacttacattgcatttatatctccttctgtagactataagatctaattctttttcatctttttattgctacatactttgtacatagaacttaattgttggatgaatgagtagataaaatagtgattaaattaatggtgtaatcttttgttttatagccgagagacacacaagattgcagtattttatgttgctgaaggacaagaagacaaacactccattctcaccaatacaggaggaagtcaagcatatgaagattttgtagctggtcttggttggga

SEQ ID NO: 427530 - DNA, 379 bp, Homo sapiens
gaaattggctaagtgtgtaaattatttactcagttacatgaagcacatagttcttttgaatagacaccctataaacctttgacatttttattgtcctagtatgagtgacccatcacagaaaagaattgaattcaaatagtatttttactgaaggaagaactaaagaagcagcagaaatacttttggatgcaaagtgtcttgattgctcttatttacaatctgtctgtaatttgaatgtaaaattatgttctgatttctcaatcaggttcccttctttggtcccctttttgatggtgctattgtgaatggaaaggttctacccattatggttagagcaacagctataaatgcaagccgtgctctgaaatctctgattcca

SEQ ID NO: 427531 - DNA, 693 bp, Homo sapiens
cccattcatttatattttttatttccagtgaaaactcaaatgcagcatggattaatctctatagcagcccgcactgttattacacatctggtaaatcacctgggccattatccaatgagcggtggtcctgctatgctaacaagtcaggtgtgtgaaaatcacgacaatcattacagtgaaagtactgaactttctcctgaactctttgagagtccaaatatccagttctttgtgttaaataatacaaccttagtgtcctgtatccagatcagatcagaagagaatatgcctggaggaggtttatctgctggccttgcatcagccaattcaaatgtcagaatcatagtacgtgatctctctggaaaatattcatgggattctgctatactgtatggcccacctcctgtaagtggcttgtcagaacctacatctttcatgctttcattgtctcaccaagagaagccagaagagcctccgacatctaatgaatgcttagaagatataaccgtaaaagatggactttctctccagtttaaaagatttagagaaactgtaccaacttgggatacaataagagatgaagaagatgttcttgatgagctcttgcagtatttgggtgttactagtcctgaatgcttacagagaactggaatctcacttaatattcctgctccacaacctgtgtgcatttct

SEQ ID NO: 427532 - DNA, 3198 bp, Homo sapiens
atcatggccttacctctaaagacactgctccaaccatttcatgctacgggagcagaaagcgataaaacagaaaaatctgttctcaattgcatttataaggttttacatgggtgtgtttatggagctcagtgttttagcaatccaaggtattttcccatgagcctctctgatttggcatctgtagattatgatccttttatgcatttggaaagtctgaaagagcctgagcctctgcactctcctgactcagaacgatcttctaaactccagccagtaacagaagtgaaaactcaaatgcagcatggattaatctctatagcagcccgcactgttattacacatctggtaaatcacctgggccattatccaatgagcggtggtcctgctatgctaacaagtcaggtgtgtgaaaatcacgacaatcattacagtgaaagtactgaactttctcctgaactctttgagagtccaaatatccagttctttgtgttaaataatacaaccttagtgtcctgtatccagatcagatcagaagagaatatgcctggaggaggtttatctgctggccttgcatcagccaattcaaatgtcagaatcatagtacgtgatctctctggaaaatattcatgggattctgctatactgtatggcccacctcctgtaagtggcttgtcagaacctacatctttcatgctttcattgtctcaccaagagaagccagaagagcctccgacatctaatgaatgcttagaagatataaccgtaaaagatggactttctctccagtttaaaagatttagagaaactgtaccaacttgggatacaataagagatgaagaagatgttcttgatgagctcttgcagtatttgggtgttactagtcctgaatgcttacagagaactggaatctcacttaatattcctgctccacaacctgtgtgcatttctgaaaaacaagaaaatgatgttattaatgctatccttaagcaacatacagaagaaaaagaatttgttgagaagcactttaatgacttaaacatgaaagctgtggaacaagatgaaccaatacctcaaaaacctcagtcagcattttattattgcagattgcttcttagtatattgggaatgaattcctgggacaaacggaggagctttcatctcctgaagaaaaatgaaaagctacttagagaacttaggaacttggattcaaggcagtgccgagagacacacaagattgcagtattttatgttgctgaaggacaagaagacaaacactccattctcaccaatacaggaggaagtcaagcatatgaagattttgtagctggtcttggttgggaggtaaatcttacaaaccattgtggttttatgggaggactacaaaaaaacaaaagcactggattgaccactccatattttgctacctctacagtagaggtaatatttcacgtgtcaacaagaatgccttctgattctgatgattctttgaccaaaaaattgagacatttgggaaatgatgaagtgcacattgtttggtcagagcatactagagactacaggagaggaattattcccacagaatttggtgatgtccttattgtaatatatccaatgaaaaatcacatgttcagtattcagataatgaaaaaaccagaggttcccttctttggtcccctttttgatggtgctattgtgaatggaaaggttctacccattatggttagagcaacagctataaatgcaagccgtgctctgaaatctctgattccattgtatcaaaacttttagaaccaacaacatttgaagattttgcagcacaggttttttctccagctccctaccaccatttaccatctgatgccggctcctacccagagattctacccagtgaaactcccacagcaacgcaggtagatggggctgacctggcctctccaatgtctcctcgaactagcaaaagccgcatgtccatgaagctgcgtcgttcctctggctcagccaataaatcctaaggagacaagcagcccagcagtgatcagcagtagccaccttagcacgaacatagggttaaccctttcaggccttcatgtctgccataacatgcatgtttcttcctgtacatttatttgagaaaacactggatttaaataattttaaataatttgtagcttaatattaaagatttaagttatttattgtttcattttttttcccacaatccaagctgccatattttgagggcagggggagttttattctacaccctttaccttcctagataattatgtctaagtagttttatctttaatttcatggttaactgtgagccaaaatacaattggacaattagtctcattatttattgtgccccattgcaactttatggttcaataaatatataattttttacaaatgtaaaattttacatttaagcatttgtaaagttacagcaaaagatgtacctgttaatacacagaatgtgtacagattatttgttatgacaataaaacactcaaaataaatggtctttagcatctcaaattccaactgaaatcattttagtattaactcttcttcccaaagcaatgtctcatttcttggctgtgcaggtgatgccatgttatatccaataactagaaaaatcactgtgctgaacttttatgtttagcttccaagtatttttctaatgttttgcatttcaagtggtatcactgttaaatgccatttgttttcagattgtggccttttattattggctgctagatcctggtgtttctatgttcttttttaagcaccaaaaagaagatggggaagaaaagaaggaaaattttctgatataaatatgttgttcaaattatgagtattatttaaaaaagaaaaaggaacataacccaggagtctaagttaaatctaatattgttaatactgaacttgcaggtccaggttggtatacattccaccctctagaagtattttcttacagtagataagctgctcacattttgttttgaatgggcatctcctgaggaaatgtagcatgacattggtactaactgcatgtgtaaatacatcatactggcaaaccgtaaaatataaattatgtatcatcattcatgtagtatctataatttgtaacagtgggggggaaagatgacatggtatttaataatacaataaaaatattcttatcacttccta

SEQ ID NO: 427533 - DNA, 1366 bp, Homo sapiens
atcatggccttacctctaaagacactgctccaaccatttcatgctacgggagcagaaagcgataaaacagaaaaatctgttctcaattgcatttataaggttttacatgggtgtgtttatggagctcagtgttttagcaatccaaggtattttcccatgagcctctctgatttggcatctgtagattatgatccttttatgcatttggaaagtctgaaagagcctgagcctctgcactctcctgactcagaacgatcttctaaactccagccagtaacagaagtgaaaactcaaatgcagcatggattaatctctatagcagcccgcactgttattacacatctggtaaatcacctgggccattatccaatgagcggtggtcctgctatgctaacaagtcaggtgtgtgaaaatcacgacaatcattacagtgaaagtactgaactttctcctgaactctttgagagtccaaatatccagttctttgtgttaaataatacaaccttagtgtcctgtatccagatcagatcagaagagaatatgcctggaggaggtttatctgctggccttgcatcagccaattcaaatgtcagaatcatagtacgtgatctctctggaaaatattcatgggattctgctatactgtatggcccacctcctgtaagtggcttgtcagaacctacatctttcatgctttcattgtctcaccaagagaagccagaagagcctccgacatctaatgaatgcttagaagatataaccgtaaaagatggactttctctccagtttaaaagatttagagaaactgtaccaacttgggatacaataagagatgaagaagatgttcttgatgagctcttgcagtatttgggtgttactagtcctgaatgcttacagagaactggaatctcacttaatattcctgctccacaacctgtgtgcatttctgaaaaacaagaaaatgatgttattaatgctatccttaagcaacatacagaagaaaaagaatttgttgagaagcactttaatgacttaaacatgaaagctgtggaacaagatgaaccaatacctcaaaaacctcagtcagcattttattattgcagattgcttcttagtatattgggaatgaattcctgggacaaacggaggagctttcatctcctgaagaaaaatgaaaagctacttagagaacttaggaacttggattcaaggcagtgccgagagacacacaagattgcagtattttatgttgctgaaggacaagaagacaaacactccattctcaccaatacaggaggaagtcaagcatatgaagattttgtagctggtcttggttgggagcttattatttttaaattatacgaaa

SEQ ID NO: 427534 - DNA, 864 bp, Homo sapiens
aatgaaaaaagaatttctgtactttttaatttactgtaactccttagaccaagatgaaacaaacaaaacatcatcattatttttttaactacaaaataaacatacggattgttaattctttgtatttttcttgcctgttcctgtgggaaaagctgcattttcaatttgaaattagtccacaaatctataatatagttcttctttaggaaaagcattagaaaattggcatggataagattttgaaaacacctcaaatatgaggtttaatataatactacaaaacttgtgccactttatctgtgtaaaatgatctttatacttttctgttatgtttatgttttaagacagtgtctcgctatgttgcccaggctggaatgcagtggcacaaccacagctcactgaagtcttgacctcccaggctcaagtgatcctcccacctcagccttccaagtagctgggattacagatgcgtaccacaacgctcagcttactttttattttttgtagagaagggttcttcctattttgcttaggctggtcttgagcaactaggttcaaggaatcatcttgccttggcctcccacctaagtgttgggattataggtgtgagctaccacacccagcctgttttaacagcagctatagcaatggttttatattttgttaataagttatctgtattgctatagtaccaagaagagtaaacaaattgtattattatgttaaaatattggttatacaaatagcattcaatactaattattacagcaaaatagtctacaacagttacactggtttactcagtagattaagacaaaaatttttagcctgggtgacaaagcaagaccccatctcaaaaaaaaa

SEQ ID NO: 427535 - DNA, 560 bp, Homo sapiens
agaatgaaagctccatgacagcaggaactttgtctacctcgttcactgggcctcagtgctagcgcataataacccctcagtgtcagtgtgttgaatgaatgaatttactgttactctaatgtgataagttcaaggtatccgagaatgcaggtgggctcttcagactggctgaccaatagtactgtcttgatggggtttccactgtctgctaagttaaacatggaaagcgcttagaatggttctggcatgcaaccagttgcacgtgcattatttaatcacatagacaagtcaggattgaaggatagttctgtcgaagaactcaagaaaagatacggtggttgatttccatttttgctgaaataattgtttttgactttcatatgtaaattttttctactgaaagtgttttgctttttaagaaaatgaaattatatagcaggaaaggactatctttgaacataagttaattaactataaggtgaattgtgatttaactagtgagaattgtattcaagtgaactctgtttttctgaaaataaaaatataaacaatgagataca

SEQ ID NO: 427536 - DNA, 2315 bp, Homo sapiens
agcgtcggggctttgcgtgagtcactgccgggctcggcgtgagtcgctgcggggctgacggggtggcagtgcggcgggttacggcctggtcagaccataatgacttcagcaaataaagcaatcgaattacaactacaagtgaaacaaaatgcagaagaattacaagactttatgcgggatttagaaaactgggaaaaagacattaaacaaaaggatatggaactaagaagacagaatggtgttcctgaagagaatttacctcctattcgaaatgggaattttaggaaaaagaagaaaggcaaagctaaagagtcttccaaaaaaaccagagaggaaaacacaaaaaacaggataaaatcttatgattatgaggcatgggcaaaacttgatgtggaccgtatccttgatgagcttgacaaagacgatagtacccatgagtctctgtctcaagaatcagagtcggaagaagatgggattcatgtagattcacaaaaggctcttgttttaaaagaaaagggcaataaatacttcaaacaaggaaaatatgatgaagcaattgactgctacacaaaaggcatggatgccgatccatataatcccgtgttgccaacgaacagagcgtcagcatattttagactgaaaaaatttgctgttgctgagtctgattgtaatttagcagttgccttgaatagaagttatacaaaggcttattccagacgaggtgctgctcgatttgctttgcaaaaattagaagaggccaaaaaagattatgaaagagtattagaactagaaccaaataactttgaagcaacaaatgaactcaggaaaatcagtcaggctttagcatccaaagaaaactcatatccaaaggaagctgacatagtgattaagtcaacagaaggagagcgaaagcaaattgaagcacaacagaataagcagcaggccatttcagagaaagatcgggggaatggatttttcaaagaggggaaatatgaaagagcaattgaatgctatactcgagggatagcagcagatggtgctaatgcccttcttccagctaacagagctatggcctatctgaagattcagaaatatgaagaagctgaaaaagactgcacacaagccattttattagatggctcatattctaaagcttttgccagaagaggaactgcaagaacatttttgggaaagctaaatgaggcaaaacaagattttgaaactgttttacttctggaacctggaaataagcaagcagtaactgaactctccaaaattaaaaaggaattaattgagaaaggacactgggatgatgtctttcttgattccacacaaagacaaaatgtggtaaaacccattgataatccaccgcatcctggatcaactaaaccactcaagaaggttattattgaagaaactggtaatttgatacagactattgatgtgccagatagcactactgctgctgctccagagaataatcctattaatctagcaaatgtaatagcagccacaggcaccacaagtaagaagaattcaagccaagatgacctttttcccacaagtgatactccaagagcaaaagtattgaaaatagaagaagtcagtgatacttcatccctgcaacctcaagccagtttgaagcaggatgtatgtcagtcttacagcgagaaaatgcccatagagatagaacaaaaacctgctcagtttgccacaactgttcttcctccaattcctgcaaactcgttccagctcgaatctgatttcagacaattgaaaagttctccagatatgttgtatcagtatttaaagcaaattgaaccatctttgtatcctaagttgtttcagaaaaatctggatccagatgtattcaaccagatcgttaaaattctgcatgacttttacattgagaaagaaaagccattactcatctttgaaatcttacaaagactttctgaactaaaaaggtttgatatggcagtgatgtttatgtcagaaacagagaaaaagattgcacgtgcattatttaatcacatagacaagtcaggattgaaggatagttctgtcgaagaactcaagaaaagatacggtggttgatttccatttttgctgaaataattgtttttgactttcatatgtaaattttttctactgaaagtgttttgctttttaagaaaatgaaattatatagcaggaaaggactatctttgaacataagttaattaactataaggtgaattgtgatttaactagtgagaattgtattcaagtgaactctgtttttctgaaaataaaaatataaacaatgagataca

SEQ ID NO: 427537 - DNA, 2376 bp, Homo sapiens
agcgtcggggctttgcgtgagtcactgccgggctcggcgtgagtcgctgcggggctgacggggtggcagtgcggcgggttacggcctggtcagaccataatgacttcagcaaataaagcaatcgaattacaactacaagtgaaacaaaatgcagaagaattacaagactttatgcgggatttagaaaactgggaaaaagacattaaacaaaaggatatggaactaagaagacagaatggtgttcctgaagagaatttacctcctattcgaaatgggaattttaggaaaaagaagaaaggcaaagctaaagagtcttccaaaaaaaccagagaggaaaacacaaaaaacaggataaaatcttatgattatgaggcatgggcaaaacttgatgtggaccgtatccttgatgagcttgacaaagacgatagtacccatgagtctctgtctcaagaatcagagtcggaagaagatgggattcatgtagattcacaaaaggctcttgttttaaaagaaaagggcaataaatacttcaaacaaggaaaatatgatgaagcaattgactgctacacaaaaggcatggatgccgatccatataatcccgtgttgccaacgaacagagcgtcagcatattttagactgaaaaaatttgctgttgctgagtctgattgtaatttagcagttgccttgaatagaagttatacaaaggcttattccagacgaggtgctgctcgatttgctttgcaaaaattagaagaggccaaaaaagattatgaaagagtattagaactagaaccaaataactttgaagcaacaaatgaactcaggaaaatcagtcaggctttagcatccaaagaaaactcatatccaaaggaagctgacatagtgattaagtcaacagaaggagagcgaaagcaaattgaagcacaacagaataagcagcaggccatttcagagaaagatcgggggaatggatttttcaaagaggggaaatatgaaagagcaattgaatgctatactcgagggatagcagcagatggtgctaatgcccttcttccagctaacagagctatggcctatctgaagattcagaaatatgaagaagctgaaaaagactgcacacaagccattttattagatggctcatattctaaagcttttgccagaagaggaactgcaagaacatttttgggaaagctaaatgaggcaaaacaagattttgaaactgttttacttctggaacctggaaataagcaagcagtaactgaactctccaaaattaaaaaggaattaattgagaaaggacactgggatgatgtctttcttgattccacacaaagacaaaatgtggtaaaacccattgataatccaccgcatcctggatcaactaaaccactcaagaaggttattattgaagaaactggtaatttgatacagactattgatgtgccagatagcactactgctgctgctccagagaataatcctattaatctagcaaatgtaatagcagccacaggcaccacaagtaagaagaattcaagccaagatgacctttttcccacaagtgatactccaagagcaaaagtattgaaaatagaagaagtcagtgatacttcatccctgcaacctcaagccagtttgaagcaggatgtatgtcagtcttacagcgagaaaatgcccatagagatagaacaaaaacctgctcagtttgccacaactgttcttcctccaattcctgcaaactcgttccagctcgaatctgatttcagacaattgaaaagttctccagatatgttgtatcagtatttaaagcaaattgaaccatctttgtatcctaagttgtttcagaaaaatctggatccagatgtattcaaccagatcgttaaaattctgcatgacttttacattgagaaagaaaagccattactcatctttgaaatcttacaaagactttctgaactaaaaaggtttgatatggcagtgatgtttatgtcagaaacagagaaaaagattgcacgtgcattatttaatcacatagacaagtcaggattgaaggatagttctgtcgaagaactcaagaaaagatacggtggttgatttccatttttgctgaaataattgtttttgactttcatatgtaaattttttctactgaaagtgttttgctttttaagaaaatgaaattatatagcaggaaaggactatctttgaacataagttaattaactataaggtgaattgtgatttaactagtgagaattgtattcaagtgaactctgtttttctgaaaataaaaatataaacaatgagatacagaaaacaaaaaaacaaaagatggtctccttggccccagcgctggagcctctcagccgtcta

SEQ ID NO: 427538 - DNA, 1099 bp, Homo sapiens
agcgtcggggctttgcgtgagtcactgccgggctcggcgtgagtcgctgcggggctgacggggtggcagtgcggcgggttacggcctggtcagaccataatgacttcagcaaataaagcaatcgaattacaactacaagtgaaacaaaatgcagaagaattacaagactttatgcgggatttagaaaactgggaaaaagacattaaacaaaaggatatggaactaagaagacagaatggtgttcctgaagagaatttacctcctattcgaaatgggaattttaggaaaaagaagaaaggcaaagctaaagagtcttccaaaaaaaccagagaggaaaacacaaaaaacaggataaaatcttatgattatgaggcatgggcaaaacttgatgtggaccgtatccttgatgagcttgacaaagacgatagtacccatgagtctctgtctcaagaatcagagtcggaagaagatgggattcatgtagattcacaaaaggctcttgttttaaaagaaaagggcaataaatacttcaaacaaggaaaatatgatgaagcaattgactgctacacaaaaggcatggatgccgatccatataatcccgtgttgccaacgaacagagcgtcagcatattttagactgaaaaaatttgctgttgctgagtctgattgtaatttagcagttgccttgaatagaagttatacaaaggcttattccagacgaggtgctgctcgatttgctttgcaaaaattagaagaggccaaaaaagattatgaaagagtattagaactagaaccaaataactttgaagcaacaaatgaactcaggaaaatcagtcaggctttagcatccaaagaaaactcatatccaaaggaagctgacatagtgattaagtcaacagaaggagagcgaaagcaaattgaagcacaacagaataagcagcaggccatttcagagaaagatcgggggaatggattttctaaaaggggaaatataaaagacaattgatgctttactcaggggggccggtcccacatcccctataggatcgtttcaatcactgccgtcgtttacacgtgtgacttggaaacctgcgtaccca

SEQ ID NO: 427539 - DNA, 613 bp, Homo sapiens
agatagggtaaacatttttaaggtagtacagaatgaattaagtttaatctgcaagattaatatcattgagaatgcagggcaaattttatactgctaaagcaaaatattcctgaaagaaccattgttggattgctatataattttgtgttctcagattggctttttaaatatctgaattagaatttataaacctatgtattgctttaaaatgtaaaatgtttttgacaaatagattgctccttttaatttacattttgcttggtttttaaaaaatgagattaaaatggagaatttctttttctttttcagttgcacgtgcattatttaatcacatagacaagtcaggattgaaggatagttctgtcgaagaactcaagaaaagatacggtggttgatttccatttttgctgaaataattgtttttgactttcatatgtaaattttttctactgaaagtgttttgctttttaagaaaatgaaattatatagcaggaaaggactatctttgaacataagttaattaactataaggtgaattgtgatttaactagtgagaattgtattcaagtgaactctgtttttctgaaaataaaaatataaacaatgagataca

SEQ ID NO: 427540 - DNA, 357 bp, Homo sapiens
ttaagccacattccatttactcatttcgtaacccacacacccaggcagcctagttgcacgtgcattatttaatcacatagacaagtcaggattgaaggatagttctgtcgaagaactcaagaaaagatacggtggttgatttccatttttgctgaaataattgtttttgactttcatatgtaaattttttctactgaaagtgttttgctttttaagaaaatgaaattatatagcaggaaaggactatctttgaacataagttaattaactataaggtgaattgtgatttaactagtgagaattgtattcaagtgaactctgtttttctgaaaataaaaatataaacaatgagataca

SEQ ID NO: 427541 - DNA, 574 bp, Homo sapiens
tgcactgtgatctactttaagggttgatgtggttaggggtatgtatgttgggggatgtgataaccaactgatgaatttggaatatatattcctctttagtttttaaacaagtgtttattacgtaatatttgattcataccaaagaatatgtagagatgtatgttctaaagcatagtaataaaatgaatacatgagcctaccatctaacttaaagagaatttttccaatattattgaagctactggtatgctcctttctaatcccatgttcttttctcccctctactcccagaggtaaccactgtctgatttctctgtttattattttctttgcatttttctgtttaacatttttactgaggtataatgtgcatcaagtccaaaaatcttaagtgtgcatcttcctgaatttttactcaagtgtacacctgtgaaaccactgtttggatcaagatacagaacattctgggaggctgaggcacgagaatggcttgaacccgggaggcggaggttgcagtgagccaagatcacaccactgcactgcagcctgggccacagagggagactctgtctca

SEQ ID NO: 427542 - DNA, 2339 bp, Homo sapiens
tcaacgctttatactttccgtgtgcagcaagaaggggacatggccccaagatagccaatcaggtgagtcgctgcggggctgacggggtggcagtgcggcgggttacggcctggtcagaccataatgacttcagcaaataaagcaatcgaattacaactacaagtgaaacaaaatgcagaagaattacaagactttatgcgggatttagaaaactgggaaaaagacattaaacaaaaggatatggaactaagaagacagaatggtgttcctgaagagaatttacctcctattcgaaatgggaattttaggaaaaagaagaaaggcaaagctaaagagtcttccaaaaaaaccagagaggaaaacacaaaaaacaggataaaatcttatgattatgaggcatgggcaaaacttgatgtggaccgtatccttgatgagcttgacaaagacgatagtacccatgagtctctgtctcaagaatcagagtcggaagaagatgggattcatgtagattcacaaaaggctcttgttttaaaagaaaagggcaataaatacttcaaacaaggaaaatatgatgaagcaattgactgctacacaaaaggcatggatgccgatccatataatcccgtgttgccaacgaacagagcgtcagcatattttagactgaaaaaatttgctgttgctgagtctgattgtaatttagcagttgccttgaatagaagttatacaaaggcttattccagacgaggtgctgctcgatttgctttgcaaaaattagaagaggccaaaaaagattatgaaagagtattagaactagaaccaaataactttgaagcaacaaatgaactcaggaaaatcagtcaggctttagcatccaaagaaaactcatatccaaaggaagctgacatagtgattaagtcaacagaaggagagcgaaagcaaattgaagcacaacagaataagcagcaggccatttcagagaaagatcgggggaatggatttttcaaagaggggaaatatgaaagagcaattgaatgctatactcgagggatagcagcagatggtgctaatgcccttcttccagctaacagagctatggcctatctgaagattcagaaatatgaagaagctgaaaaagactgcacacaagccattttattagatggctcatattctaaagcttttgccagaagaggaactgcaagaacatttttgggaaagctaaatgaggcaaaacaagattttgaaactgttttacttctggaacctggaaataagcaagcagtaactgaactctccaaaattaaaaaggaattaattgagaaaggacactgggatgatgtctttcttgattccacacaaagacaaaatgtggtaaaacccattgataatccaccgcatcctggatcaactaaaccactcaagaaggttattattgaagaaactggtaatttgatacagactattgatgtgccagatagcactactgctgctgctccagagaataatcctattaatctagcaaatgtaatagcagccacaggcaccacaagtaagaagaattcaagccaagatgacctttttcccacaagtgatactccaagagcaaaagtattgaaaatagaagaagtcagtgatacttcatccctgcaacctcaagccagtttgaagcaggatgtatgtcagtcttacagcgagaaaatgcccatagagatagaacaaaaacctgctcagtttgccacaactgttcttcctccaattcctgcaaactcgttccagctcgaatctgatttcagacaattgaaaagttctccagatatgttgtatcagtatttaaagcaaattgaaccatctttgtatcctaagttgtttcagaaaaatctggatccagatgtattcaaccagatcgttaaaattctgcatgacttttacattgagaaagaaaagccattactcatctttgaaatcttacaaagactttctgaactaaaaaggtttgatatggcagtgatgtttatgtcagaaacagagaaaaagattgcacgtgcattatttaatcacatagacaagtcaggattgaaggatagttctgtcgaagaactcaagaaaagatacggtggttgatttccatttttgctgaaataattgtttttgactttcatatgtaaattttttctactgaaagtgttttgctttttaagaaaatgaaattatatagcaggaaaggactatctttgaacataagttaattaactataaggtgaattgtgatttaactagtgagaattgtattcaagtgaactctgtttttctgaaaataaaaatataaacaatgagataca

SEQ ID NO: 427543 - DNA, 2354 bp, Homo sapiens
agcgtcggggctttgcgtgagtcactgccgggctcggcgtgagtcgctgcggggctgacggggtggcagtgcggcgggttacggcctggtcagaccataatgacttcagcaaataaagcaatcgaattacaactacaagtgaaacaaaatgcagaagaattacaagactttatgcgggatttagaaaactgggaaaaagacattaaacaaaaggatatggaactaagaagacagaatggtgttcctgaagagaatttacctcctattcgaaatgggaattttaggaaaaagaagaaaggcaaagctaaagagtcttccaaaaaaaccagagaggaaaacacaaaaaacaggataaaatcttatgattatgaggcatgggcaaaacttgatgtggaccgtatccttgatgagcttgacaaagacgatagtacccatgagtctctgtctcaagaatcagagtcggaagaagatgggattcatgtagattcacaaaaggctcttgttttaaaagaaaagggcaataaatacttcaaacaaggaaaatatgatgaagcaattgactgctacacaaaaggcatggatgccgatccatataatcccgtgttgccaacgaacagagcgtcagcatattttagactgaaaaaatttgctgttgctgagtctgattgtaatttagcagttgccttgaatagaagttatacaaaggcttattccagacgaggtgctgctcgatttgctttgcaaaaattagaagaggccaaaaaagattatgaaagagtattagaactagaaccaaataactttgaagcaacaaatgaactcaggaaaatcagtcaggctttagcatccaaagaaaactcatatccaaaggaagctgacatagtgattaagtcaacagaaggagagcgaaagcaaattgaagcacaacagaataagcagcaggccatttcagagaaagatcgggggaatggatttttcaaagaggggaaatatgaaagagcaattgaatgctatactcgagggatagcagcagatggtgctaatgcccttcttccagctaacagagctatggcctatctgaagattcagaaatatgaagaagctgaaaaagactgcacacaagccattttattagatggctcatattctaaagcttttgccagaagaggaactgcaagaacatttttgggaaagctaaatgaggcaaaacaagattttgaaactgttttacttctggaacctggaaataagcaagcagtaactgaactctccaaaattaaaaaggaattaattgagaaaggacactgggatgatgtctttcttgattccacacaaagacaaaatgtggtaaaacccattgataatccaccgcatcctggatcaactaaaccactcaagaaggttattattgaagaaactggtaatttgatacagactattgatgtgccagatagcactactgctgctgctccagagaataatcctattaatctagcaaatgtaatagcagccacaggcaccacaagtaagaagaattcaagccaagatgacctttttcccacaagtgatactccaagagcaaaagtattgaaaatagaagaagtcagtgatacttcatccctgcaacctcaagccagtttgaagcaggatgtatgtcagtcttacagcgagaaaatgcccatagagatagaacaaaaacctgctcagtttgccacaactgttcttcctccaattcctgcaaactcgttccagctcgaatctgatttcagacaattgaaaagttctccagatatgttgtatcagtatttaaagcaaattgaaccatctttgtatcctaagttgtttcagaaaaatctggatccagatgtattcaaccagatcgttaaaattctgcatgacttttacattgagaaagaaaagccattactcatctttgaaatcttacaaagactttctgaactaaaaaggtttgatatggcagtgatgtttatgtcagaaacagagaaaaagattgcacgtgcattatttaatcacatagacaagtcaggattgaaggatagttctgtcgaagaactcaagaaaagatacggtggttgatttccatttttgctgaaataattgtttttgactttcatatgtaaattttttctactgaaagtgttttgctttttaagaaaatgaaattatatagcaggaaaggactatctttgaacataagttaattaactataaggtgaattgtgatttaactagtgagaattgtattcaagtgaactctgtttttctgaaaataaaaatataaacaatgagatacaactggcctcgttggcctcagcggtggagctctgcggccg

SEQ ID NO: 427544 - DNA, 541 bp, Homo sapiens
agcgtcggggctttgcgtgagtcactgccgggctcggcgtgagtcgctgcggggctgacggggtggcagtgcggcgggttacggcctggtcagaccataatgacttcagcaaataaagcaatcgaattacaactacaagtgaaacaaaatgcagaagaattacaagactttatgcgggatttagaaaactgggaaaaagacattaaacaaaaggatatggaactaagaagacagaatggtgttcctgaagagaatttacctcctattcgaaatgggaattttaggaaaaagaagaaaggcaaagctaaagagtcttccaaaaaaaccagagaggaaaacacaaaaaacaggataaaatcttatgattatgaggcatgggcaaaacttgatgtgtgtacacctgtgaaaccactgtttggatcaagatacagaacattctgggaggctgaggcacgagaatggcttgaacccgggaggcggaggttgcagtgagccaagatcacaccactgcactgcagcctgggccacagagggagactct

SEQ ID NO: 427545 - DNA, 405 bp, Homo sapiens
ttgaacccaggaggcggaggttgcggtgagccaagatcgcaccactgcactccagtcttggcaacaagagcgaaactccatctcaaaaacaaaaaaaaataaaagaaattctctcagggcttaactgaaatttaggacttgaacttcagtatgtacaaaaccagagtagagttctaggctggatctaggtatgtgtgttgtgagcagcattcagattagaatcaacaaagaacaaccctcccagtgctcttcactcccccagcctgtctaagccagtgatggcacatatgcatatgctacccctattcgggttgtccacccatggcagacattgccagtcagtcaccgcgctgctttggctgagggctcagatccttctcaaaacagggatcctcgctactacta

SEQ ID NO: 427546 - DNA, 3666 bp, Homo sapiens
gcctgctgccgcctgggccccgccgagcggagctagcgccgcgcgcagagcacacgctcgcgctccagctcccctcctgcgcggttcatgactgtgtcccctgaccgcagcctctgcgagcccccgccgcaggaccacggcccgctccccgccgccgcgagggccccgagcgaaggaaggaagggaggcgcgctgtgcgccccgcggagcccgcgaaccccgctcgctgccggctgcccagcctggctggcaccatgctgcccgcgcgctgcgcccgcctgctcacgccccacttgctgctggtgttggtgcagctgtcccctgctcgcggccaccgcaccacaggccccaggtttctaataagtgaccgtgacccacagtgcaacctccactgctccaggactcaacccaaacccatctgtgcctctgatggcaggtcctacgagtccatgtgtgagtaccagcgagccaagtgccgagacccgaccctgggcgtggtgcatcgaggtagatgcaaagatgctggccagagcaagtgtcgcctggagcgggctcaagccctggagcaagccaagaagcctcaggaagctgtgtttgtcccagagtgtggcgaggatggctcctttacccaggtgcagtgccatacttacactgggtactgctggtgtgtcaccccggatgggaagcccatcagtggctcttctgtgcagaataaaactcctgtatgttcaggttcagtcaccgacaagcccttgagccagggtaactcaggaaggaaagatgacgggtctaagccgacacccacgatggagacccagccggtgttcgatggagatgaaatcacagccccaactctatggattaaacacttggtgatcaaggactccaaactgaacaacaccaacataagaaattcagagaaagtctattcgtgtgaccaggagaggcagagtgccctggaagaggcccagcagaatccccgtgagggtattgtcatccctgaatgtgcccctgggggactctataagccagtgcaatgccaccagtccactggctactgctggtgtgtgctggtggacacagggcgcccgctgcctgggacctccacacgctacgtgatgcccagttgtgagagcgacgccagggccaagactacagaggcggatgaccccttcaaggacagggagctaccaggctgtccagaagggaagaaaatggagtttatcaccagcctactggatgctctcaccactgacatggttcaggccattaactcagcagcgcccactggaggtgggaggttctcagagccagaccccagccacaccctggaggagcgggtagtgcactggtatttcagccagctggacagcaatagcagcaacgacattaacaagcgggagatgaagcccttcaagcgctacgtgaagaagaaagccaagcccaagaaatgtgcccggcgtttcaccgactactgtgacctgaacaaagacaaggtcatttcactgcctgagctgaagggctgcctgggtgttagcaaagaaggacgcctcgtctaaggagcagaaaacccaagggcaggtggagagtccagggaggcaggatggatcaccagacacctaaccttcagcgttgcccatggccctgccacatcccgtgtaacataagtggtgcccaccatgtttgcacttttaataactcttacttgcgtgttttgtttttggtttcattttaaaacaccaatatctaataccacagtgggaaaaggaaagggaagaaagactttattctctctcttattgtaagtttttggatctgctactgacaacttttagagggttttgggggggtgggggagggtgttgttggggctgagaagaaagagatttatatgctgtatataaatatatatgtaaattgtatagttcttttgtacaggcattggcattgctgttgtttatttctctccctctgcctgctgtgggtggtgggcactctggacacatagtccagctttctaaaatccaggactctatcctgggcctactaaacttctgtttggagactgacccttgtgtataaagacgggagtcctgcaattgtactgcggactccacgagttcttttctggtgggaggactatattgccccatgccattagttgtcaaaattgataagtcacttggctctcggccttgtccagggaggttgggctaaggagagatggaaactgccctgggagaggaagggagtccagatcccatgaatagcccacacaggtaccggctctcagagggtccgtgcattcctgctctccggacccccaaagggcccagcattggtgggtgcaccagtatcttagtgaccctcggagcaaattatccacaaaggatttgcattacgtcactcgaaacgttttcatccatgcttagcatctactctgtataacgcatgagaggggaggcaaagaagaaaaagacacacagaagggcctttaaaaaagtagatatttaatatctaagcaggggaggggacaggacagaaagcctgcactgaggggtgcggtgccaacagggaaactcttcacctccctgcaaacctaccagtgaggctcccagagacgcagctgtctcagtgccaggggcagattgggtgtgacctctccactcctccatctcctgctgttgtcctagtggctatcacaggcctgggtgggtgggttgggggaggtgtcagtcaccttgttggtaacactaaagttgttttgttggttttttaaaaacccaatactgaggttcttcctgttccctcaagttttcttatgggcttccaggctttaagctaattccagaagtaaaactgatcttgggtttcctattctgcctcccctagaagggcaggggtgataacccagctacagggaaatcccggcccagctttccacaggcatcacaggcatcttccgcggattctagggtgggctgcccagccttctggtctgaggcgcagctccctctgcccaggtgctgtgcctattcaagtggccttcaggcagagcagcaagtggcccttagcgccccttcccataagcagctgtggtggcagtgagggaggttgggtagccctggactggtcccctcctcagatcacccttgcaaatctggcctcatcttgtattccaacccgacatccctaaaagtacctccacccgttccgggtctggaaggcgttggcaccacaagcactgtccctgtgggaggagcacaaccttctcgggacaggatctgatggggtcttgggctaaaggaggtccctgctgtcctggagaaagtcctagaggttatctcaggaatgactggtggccctgccccaacgtggaaaggtgggaaggaagccttctcccattagccccaatgagagaactcaacgtgccggagctgagtgggccttgcacgagacactggccccactttcaggcctggaggaagcatgcacacatggagacggcgcctgcctgtagatgtttggatcttcgagatctccccaggcatcttgtctcccacaggatcgtgtgtgtaggtggtgttgtgtggttttcctttgtgaaggagagagggaaactatttgtagcttgttttataaaaaataaaaaatgggtaaatcttg

SEQ ID NO: 427547 - DNA, 1940 bp, Homo sapiens
gcctgctgccgcctgggccccgccgagcggagctagcgccgcgcgcagagcacacgctcgcgctccagctcccctcctgcgcggttcatgactgtgtcccctgaccgcagcctctgcgagcccccgccgcaggaccacggcccgctccccgccgccgcgagggccccgagcgaaggaaggaagggaggcgcgctgtgcgccccgcggagcccgcgaaccccgctcgctgccggctgcccagcctggctggcaccatgctgcccgcgcgctgcgcccgcctgctcacgccccacttgctgctggtgttggtgcagctgtcccctgctcgcggccaccgcaccacaggccccaggtttctaataagtgaccgtgacccacagtgcaacctccactgctccaggactcaacccaaacccatctgtgcctctgatggcaggtcctacgagtccatgtgtgagtaccagcgagccaagtgccgagacccgaccctgggcgtggtgcatcgaggtagatgcaaagatgctggccagagcaagtgtcgcctggagcgggctcaagccctggagcaagccaagaagcctcaggaagctgtgtttgtcccagagtgtggcgaggatggctcctttacccaggtgcagtgccatacttacactgggtactgctggtgtgtcaccccggatgggaagcccatcagtggctcttctgtgcagaataaaactcctgtatgttcaggttcagtcaccgacaagcccttgagccagggtaactcaggaaggaaagatgacgggtctaagccgacacccacgatggagacccagccggtgttcgatggagatgaaatcacagccccaactctatggattaaacacttggtgatcaaggactccaaactgaacaacaccaacataagaaattcagagaaagtctattcgtgtgaccaggagaggcagagtgccctggaagaggcccagcagaatccccgtgagggtattgtcatccctgaatgtgcccctgggggactctataagccagtgcaatgccaccagtccactggctactgctggtgtgtgctggtggacacagggcgcccgctgcctgggacctccacacgctacgtgatgcccagttgtgagagcgacgccagggccaagactacagaggcggatgaccccttcaaggacagggagctaccaggctgtccagaagggaagaaaatggagtttatcaccagcctactggatgctctcaccactgacatggttcaggccattaactcagcagcgcccactggaggtgggaggttctcagagccagaccccagccacaccctggaggagcgggtagtgcactggtatttcagccagctggacagcaatagcagcaacgacattaacaagcgggagatgaagcccttcaagcgctacgtgaagaagaaagccaagcccaagaaatgtgcccggcgtttcaccgactactgtgacctgaacaaagacaaggtcatttcactgcctgagctgaagggctgcctgggtgttagcaaagaaggacgcctcgtctaaggagcagaaaacccaagggcaggtggagagtccagggaggcaggatggatcaccagacacctaaccttcagcgttgcccatggccctgccacatcccgtgtaacataagtggtgcccaccatgtttgcacttttaataactcttacttgcgtgttttgtttttggtttcattttaaaacaccaatatctaataccacagtgggaaaaggaaagggaagaaagactttattctctctcttattgtaagtttttggatctgctactgacaacttttagagggttttgggggggtgggggagggtgttgttggggctgagaagaaagagatttatatgctgtatataaatatatatgtaaattgtatagttcttttgtacaggc

SEQ ID NO: 427548 - DNA, 2877 bp, Homo sapiens
gcctgctgccgcctgggccccgccgagcggagctagcgccgcgcgcagagcacacgctcgcgctccagctcccctcctgcgcggttcatgactgtgtcccctgaccgcagcctctgcgagcccccgccgcaggaccacggcccgctccccgccgccgcgagggccccgagcgaaggaaggaagggaggcgcgctgtgcgccccgcggagcccgcgaaccccgctcgctgccggctgcccagcctggctggcaccatgctgcccgcgcgctgcgcccgcctgctcacgccccacttgctgctggtgttggtgcagctgtcccctgctcgcggccaccgcaccacaggccccaggtttctaataagtgaccgtgacccacagtgcaacctccactgctccaggactcaacccaaacccatctgtgcctctgatggcaggtcctacgagtccatgtgtgagtaccagcgagccaagtgccgagacccgaccctgggcgtggtgcatcgaggtagatgcaaagatgctggccagagcaagtgtcgcctggagcgggctcaagccctggagcaagccaagaagcctcaggaagctgtgtttgtcccagagtgtggcgaggatggctcctttacccaggtgcagtgccatacttacactgggtactgctggtgtgtcaccccggatgggaagcccatcagtggctcttctgtgcagaataaaactcctgtatgttcaggttcagtcaccgacaagcccttgagccagggtaactcaggaaggaaagatgacgggtctaagccgacacccacgatggagacccagccggtgttcgatggagatgaaatcacagccccaactctatggattaaacacttggtgatcaaggactccaaactgaacaacaccaacataagaaattcagagaaagtctattcgtgtgaccaggagaggcagagtgccctggaagaggcccagcagaatccccgtgagggtattgtcatccctgaatgtgcccctgggggactctataagccagtgcaatgccaccagtccactggctactgctggtgtgtgctggtggacacagggcgcccgctgcctgggacctccacacgctacgtgatgcccagttgtgagagcgacgccagggccaagactacagaggcggatgaccccttcaaggacagggagctaccaggctgtccagaagggaagaaaatggagtttatcaccagcctactggatgctctcaccactgacatggttcaggccattaactcagcagcgcccactggaggtgggaggttctcagagccagaccccagccacaccctggaggagcgggtagtgcactggtatttcagccagctggacagcaatagcagcaacgacattaacaagcgggagatgaagcccttcaagcgctacgtgaagaagaaagccaagcccaagaaatgtgcccggcgtttcaccgactactgtgacctgaacaaagacaaggtcatttcactgcctgagctgaagggctgcctgggtgttagcaaagaaggacgcctcgtctaaggagcagaaaacccaagggcaggtggagagtccagggaggcaggatggatcaccagacacctaaccttcagcgttgcccatggccctgccacatcccgtgtaacataagtggtgcccaccatgtttgcacttttaataactcttacttgcgtgttttgtttttggtttcattttaaaacaccaatatctaataccacagtgggaaaaggaaagggaagaaagactttattctctctcttattgtaagtttttggatctgctactgacaacttttagagggttttgggggggtgggggagggtgttgttggggctgagaagaaagagatttatatgctgtatataaatatatatgtaaattgtatagttcttttgtacaggcattggcattgctgttgtttatttctctccctctgcctgctgtgggtggtgggcactctggacacatagtccagctttctaaaatccaggactctatcctgggcctactaaacttctgtttggagactgacccttgtgtataaagacgggagtcctgcaattgtactgcggactccacgagttcttttctggtgggaggactatattgccccatgccattagttgtcaaaattgataagtcacttggctctcggccttgtccagggaggttgggctaaggagagatggaaactgccctgggagaggaagggagtccagatcccatgaatagcccacacaggtaccggctctcagagggtccgtgcattcctgctctccggacccccaaagggcccagcattggtgggtgcaccagtatcttagtgaccctcggagcaaattatccacaaaggatttgcattacgtcactcgaaacgttttcatccatgcttagcatctactctgtataacgcatgagaggggaggcaaagaagaaaaagacacacagaagggcctttaaaaaagtagatatttaatatctaagcaggggaggggacaggacagaaagcctgcactgaggggtgcggtgccaacagggaaactcttcacctccctgcaaacctaccagtgaggctcccagagacgcagctgtctcagtgccaggggcagattgggtgtgacctctccactcctccatctcctgctgttgtcctggaggaagcatgcacacatggagacggcgcctgcctgtagatgtttggatcttcgagatctccccaggcatcttgtctcccacaggatcgtgtgtgtaggtggtgttgtgtggttttcctttgtgaaggagagagggaaactatttgtagcttgttttataaaaaataaaaaatgggtaaatcttg

SEQ ID NO: 427549 - DNA, 3723 bp, Homo sapiens
gcctgctgccgcctgggccccgccgagcggagctagcgccgcgcgcagagcacacgctcgcgctccagctcccctcctgcgcggttcatgactgtgtcccctgaccgcagcctctgcgagcccccgccgcaggaccacggcccgctccccgccgccgcgagggccccgagcgaaggaaggaagggaggcgcgctgtgcgccccgcggagcccgcgaaccccgctcgctgccggctgcccagcctggctggcaccatgctgcccgcgcgctgcgcccgcctgctcacgccccacttgctgctggtgttggtgcagctgtcccctgctcgcggccaccgcaccacaggccccaggtttctaataagtgaccgtgacccacagtgcaacctccactgctccaggactcaacccaaacccatctgtgcctctgatggcaggtcctacgagtccatgtgtgagtaccagcgagccaagtgccgagacccgaccctgggcgtggtgcatcgaggtagatgcaaagatgctggccagagcaagtgtcgcctggagcgggctcaagccctggagcaagccaagaagcctcaggaagctgtgtttgtcccagagtgtggcgaggatggctcctttacccaggtgcagtgccatacttacactgggtactgctggtgtgtcaccccggatgggaagcccatcagtggctcttctgtgcagaataaaactcctgtatgttcaggttcagtcaccgacaagcccttgagccagggtaactcaggaaggaaagatgacgggtctaagccgacacccacgatggagacccagccggtgttcgatggagatgaaatcacagccccaactctatggattaaacacttggtgatcaaggactccaaactgaacaacaccaacataagaaattcagagaaagtctattcgtgtgaccaggagaggcagagtgccctggaagaggcccagcagaatccccgtgagggtattgtcatccctgaatgtgcccctgggggactctataagccagtgcaatgccaccagtccactggctactgctggtgtgtgctggtggacacagggcgcccgctgcctgggacctccacacgctacgtgatgcccagttgtgagagcgacgccagggccaagactacagaggcggatgaccccttcaaggacagggagctaccaggctgtccagaagggaagaaaatggagtttatcaccagcctactggatgctctcaccactgacatggttcaggccattaactcagcagcgcccactggaggtgggaggttctcagagccagaccccagccacaccctggaggagcgggtagtgcactggtatttcagccagctggacagcaatagcagcaacgacattaacaagcgggagatgaagcccttcaagcgctacgtgaagaagaaagccaagcccaagaaatgtgcccggcgtttcaccgactactgtgacctgaacaaagacaaggtcatttcactgcctgagctgaagggctgcctgggtgttagcaaagaagcaggtggtagccttggcagtttcccccaggcaaaatgagcaggcacaaacccattcagacgcctcgtctaaggagcagaaaacccaagggcaggtggagagtccagggaggcaggatggatcaccagacacctaaccttcagcgttgcccatggccctgccacatcccgtgtaacataagtggtgcccaccatgtttgcacttttaataactcttacttgcgtgttttgtttttggtttcattttaaaacaccaatatctaataccacagtgggaaaaggaaagggaagaaagactttattctctctcttattgtaagtttttggatctgctactgacaacttttagagggttttgggggggtgggggagggtgttgttggggctgagaagaaagagatttatatgctgtatataaatatatatgtaaattgtatagttcttttgtacaggcattggcattgctgttgtttatttctctccctctgcctgctgtgggtggtgggcactctggacacatagtccagctttctaaaatccaggactctatcctgggcctactaaacttctgtttggagactgacccttgtgtataaagacgggagtcctgcaattgtactgcggactccacgagttcttttctggtgggaggactatattgccccatgccattagttgtcaaaattgataagtcacttggctctcggccttgtccagggaggttgggctaaggagagatggaaactgccctgggagaggaagggagtccagatcccatgaatagcccacacaggtaccggctctcagagggtccgtgcattcctgctctccggacccccaaagggcccagcattggtgggtgcaccagtatcttagtgaccctcggagcaaattatccacaaaggatttgcattacgtcactcgaaacgttttcatccatgcttagcatctactctgtataacgcatgagaggggaggcaaagaagaaaaagacacacagaagggcctttaaaaaagtagatatttaatatctaagcaggggaggggacaggacagaaagcctgcactgaggggtgcggtgccaacagggaaactcttcacctccctgcaaacctaccagtgaggctcccagagacgcagctgtctcagtgccaggggcagattgggtgtgacctctccactcctccatctcctgctgttgtcctagtggctatcacaggcctgggtgggtgggttgggggaggtgtcagtcaccttgttggtaacactaaagttgttttgttggttttttaaaaacccaatactgaggttcttcctgttccctcaagttttcttatgggcttccaggctttaagctaattccagaagtaaaactgatcttgggtttcctattctgcctcccctagaagggcaggggtgataacccagctacagggaaatcccggcccagctttccacaggcatcacaggcatcttccgcggattctagggtgggctgcccagccttctggtctgaggcgcagctccctctgcccaggtgctgtgcctattcaagtggccttcaggcagagcagcaagtggcccttagcgccccttcccataagcagctgtggtggcagtgagggaggttgggtagccctggactggtcccctcctcagatcacccttgcaaatctggcctcatcttgtattccaacccgacatccctaaaagtacctccacccgttccgggtctggaaggcgttggcaccacaagcactgtccctgtgggaggagcacaaccttctcgggacaggatctgatggggtcttgggctaaaggaggtccctgctgtcctggagaaagtcctagaggttatctcaggaatgactggtggccctgccccaacgtggaaaggtgggaaggaagccttctcccattagccccaatgagagaactcaacgtgccggagctgagtgggccttgcacgagacactggccccactttcaggcctggaggaagcatgcacacatggagacggcgcctgcctgtagatgtttggatcttcgagatctccccaggcatcttgtctcccacaggatcgtgtgtgtaggtggtgttgtgtggttttcctttgtgaaggagagagggaaactatttgtagcttgttttataaaaaataaaaaatgggtaaatcttg

SEQ ID NO: 427550 - DNA, 1997 bp, Homo sapiens
gcctgctgccgcctgggccccgccgagcggagctagcgccgcgcgcagagcacacgctcgcgctccagctcccctcctgcgcggttcatgactgtgtcccctgaccgcagcctctgcgagcccccgccgcaggaccacggcccgctccccgccgccgcgagggccccgagcgaaggaaggaagggaggcgcgctgtgcgccccgcggagcccgcgaaccccgctcgctgccggctgcccagcctggctggcaccatgctgcccgcgcgctgcgcccgcctgctcacgccccacttgctgctggtgttggtgcagctgtcccctgctcgcggccaccgcaccacaggccccaggtttctaataagtgaccgtgacccacagtgcaacctccactgctccaggactcaacccaaacccatctgtgcctctgatggcaggtcctacgagtccatgtgtgagtaccagcgagccaagtgccgagacccgaccctgggcgtggtgcatcgaggtagatgcaaagatgctggccagagcaagtgtcgcctggagcgggctcaagccctggagcaagccaagaagcctcaggaagctgtgtttgtcccagagtgtggcgaggatggctcctttacccaggtgcagtgccatacttacactgggtactgctggtgtgtcaccccggatgggaagcccatcagtggctcttctgtgcagaataaaactcctgtatgttcaggttcagtcaccgacaagcccttgagccagggtaactcaggaaggaaagatgacgggtctaagccgacacccacgatggagacccagccggtgttcgatggagatgaaatcacagccccaactctatggattaaacacttggtgatcaaggactccaaactgaacaacaccaacataagaaattcagagaaagtctattcgtgtgaccaggagaggcagagtgccctggaagaggcccagcagaatccccgtgagggtattgtcatccctgaatgtgcccctgggggactctataagccagtgcaatgccaccagtccactggctactgctggtgtgtgctggtggacacagggcgcccgctgcctgggacctccacacgctacgtgatgcccagttgtgagagcgacgccagggccaagactacagaggcggatgaccccttcaaggacagggagctaccaggctgtccagaagggaagaaaatggagtttatcaccagcctactggatgctctcaccactgacatggttcaggccattaactcagcagcgcccactggaggtgggaggttctcagagccagaccccagccacaccctggaggagcgggtagtgcactggtatttcagccagctggacagcaatagcagcaacgacattaacaagcgggagatgaagcccttcaagcgctacgtgaagaagaaagccaagcccaagaaatgtgcccggcgtttcaccgactactgtgacctgaacaaagacaaggtcatttcactgcctgagctgaagggctgcctgggtgttagcaaagaagcaggtggtagccttggcagtttcccccaggcaaaatgagcaggcacaaacccattcagacgcctcgtctaaggagcagaaaacccaagggcaggtggagagtccagggaggcaggatggatcaccagacacctaaccttcagcgttgcccatggccctgccacatcccgtgtaacataagtggtgcccaccatgtttgcacttttaataactcttacttgcgtgttttgtttttggtttcattttaaaacaccaatatctaataccacagtgggaaaaggaaagggaagaaagactttattctctctcttattgtaagtttttggatctgctactgacaacttttagagggttttgggggggtgggggagggtgttgttggggctgagaagaaagagatttatatgctgtatataaatatatatgtaaattgtatagttcttttgtacaggc

SEQ ID NO: 427551 - DNA, 3818 bp, Homo sapiens
  misc_feature (3669)..(3669): n is a, c, g, or t
gcctgctgccgcctgggccccgccgagcggagctagcgccgcgcgcagagcacacgctcgcgctccagctcccctcctgcgcggttcatgactgtgtcccctgaccgcagcctctgcgagcccccgccgcaggaccacggcccgctccccgccgccgcgagggccccgagcgaaggaaggaagggaggcgcgctgtgcgccccgcggagcccgcgaaccccgctcgctgccggctgcccagcctggctggcaccatgctgcccgcgcgctgcgcccgcctgctcacgccccacttgctgctggtgttggtgcagctgtcccctgctcgcggccaccgcaccacaggccccaggtttctaataagtgaccgtgacccacagtgcaacctccactgctccaggactcaacccaaacccatctgtgcctctgatggcaggtcctacgagtccatgtgtgagtaccagcgagccaagtgccgagacccgaccctgggcgtggtgcatcgaggtagatgcaaagatgctggccagagcaagtgtcgcctggagcgggctcaagccctggagcaagccaagaagcctcaggaagctgtgtttgtcccagagtgtggcgaggatggctcctttacccaggtgcagtgccatacttacactgggtactgctggtgtgtcaccccggatgggaagcccatcagtggctcttctgtgcagaataaaactcctgtatgttcaggttcagtcaccgacaagcccttgagccagggtaactcaggaaggaaagatgacgggtctaagccgacacccacgatggagacccagccggtgttcgatggagatgaaatcacagccccaactctatggattaaacacttggtgatcaaggactccaaactgaacaacaccaacataagaaattcagagaaagtctattcgtgtgaccaggagaggcagagtgccctggaagaggcccagcagaatccccgtgagggtattgtcatccctgaatgtgcccctgggggactctataagccagtgcaatgccaccagtccactggctactgctggtgtgtgctggtggacacagggcgcccgctgcctgggacctccacacgctacgtgatgcccagttgtgagagcgacgccagggccaagactacagaggcggatgaccccttcaaggacagggagctaccaggctgtccagaagggaagaaaatggagtttatcaccagcctactggatgctctcaccactgacatggttcaggccattaactcagcagcgcccactggaggtgggaggttctcagagccagaccccagccacaccctggaggagcgggtagtgcactggtatttcagccagctggacagcaatagcagcaacgacattaacaagcgggagatgaagcccttcaagcgctacgtgaagaagaaagccaagcccaagaaatgtgcccggcgtttcaccgactactgtgacctgaacaaagacaaggtcatttcactgcctgagctgaagggctgcctgggtgttagcaaagaaggacgcctcgtctaaggagcagaaaacccaagggcaggtggagagtccagggaggcaggatggatcaccagacacctaaccttcagcgttgcccatggccctgccacatcccgtgtaacataagtggtgcccaccatgtttgcacttttaataactcttacttgcgtgttttgtttttggtttcattttaaaacaccaatatctaataccacagtgggaaaaggaaagggaagaaagactttattctctctcttattgtaagtttttggatctgctactgacaacttttagagggttttgggggggtgggggagggtgttgttggggctgagaagaaagagatttatatgctgtatataaatatatatgtaaattgtatagttcttttgtacaggcattggcattgctgttgtttatttctctccctctgcctgctgtgggtggtgggcactctggacacatagtccagctttctaaaatccaggactctatcctgggcctactaaacttctgtttggagactgacccttgtgtataaagacgggagtcctgcaattgtactgcggactccacgagttcttttctggtgggaggactatattgccccatgccattagttgtcaaaattgataagtcacttggctctcggccttgtccagggaggttgggctaaggagagatggaaactgccctgggagaggaagggagtccagatcccatgaatagcccacacaggtaccggctctcagagggtccgtgcattcctgctctccggacccccaaagggcccagcattggtgggtgcaccagtatcttagtgaccctcggagcaaattatccacaaaggatttgcattacgtcactcgaaacgttttcatccatgcttagcatctactctgtataacgcatgagaggggaggcaaagaagaaaaagacacacagaagggcctttaaaaaagtagatatttaatatctaagcaggggaggggacaggacagaaagcctgcactgaggggtgcggtgccaacagggaaactcttcacctccctgcaaacctaccagtgaggctcccagagacgcagctgtctcagtgccaggggcagattgggtgtgacctctccactcctccatctcctgctgttgtcctagtggctatcacaggcctgggtgggtgggttgggggaggtgtcagtcaccttgttggtaacactaaagttgttttgttggttttttaaaaacccaatactgaggttcttcctgttccctcaagttttcttatgggcttccaggctttaagctaattccagaagtaaaactgatcttgggtttcctattctgcctcccctagaagggcaggggtgataacccagctacagggaaatcccggcccagctttccacaggcatcacaggcatcttccgcggattctagggtgggctgcccagccttctggtctgaggcgcagctccctctgcccaggtgctgtgcctattcaagtggccttcaggcagagcagcaagtggcccttagcgccccttcccataagcagctgtggtggcagtgagggaggttgggtagccctggactggtcccctcctcagatcacccttgcaaatctggcctcatcttgtattccaacccgacatccctaaaagtacctccacccgttccgggtctggaaggcgttggcaccacaagcactgtccctgtgggaggagcacaaccttctcgggacaggatctgatggggtcttgggctaaaggaggtccctgctgtcctggagaaagtcctagaggttatctcaggaatgactggtggccctgccccaacgtggaaaggtgggaaggaagccttctcccattagccccaatgagagaactcaacgtgccggagctgagtgggccttgcacgagacactggccccactttcaggcctggaggaagcatgcacacatggagacggcgcctgcctgtagatgtttggatcttcgagatctccccaggcatcttgtctcccacaggatcgtgtgtgtaggtggtgttgtgtggttttcctttgtgaaggagagagggaaactatttgtagcttgttttataaaaaataaaaaatgggtaaatcttgacncaaaaacacaaaccccaaccaccacaacaaaacaaaacaaaggggcgccacacagagagacccacccagggggggaccaaagtagaggtaaccacgcagaagcgggacaaacgagaggccacaaagaggcgaggcataaagcgaccgag

SEQ ID NO: 427552 - DNA, 2992 bp, Homo sapiens
gttgtgaggaagggaggggaactgggaggagtggatgtgggagagagctgaagcctcaatgcctcagactttgaaaaatgactattaagaagtctgaggttacacttccactcacatagtctctttgcccagactttttctctctccttttcctcacccctagaaatcacagccccaactctatggattaaacacttggtgatcaaggactccaaactgaacaacaccaacataagaaattcagagaaagtctattcgtgtgaccaggagaggcagagtgccctggaagaggcccagcagaatccccgtgagggtattgtcatccctgaatgtgcccctgggggactctataagccagtgcaatgccaccagtccactggctactgctggtgtgtgctggtggacacagggcgcccgctgcctgggacctccacacgctacgtgatgcccagttgtgagagcgacgccagggccaagactacagaggcggatgaccccttcaaggacagggagctaccaggctgtccagaagggaagaaaatggagtttatcaccagcctactggatgctctcaccactgacatggttcaggccattaactcagcagcgcccactggaggtgggaggttctcagagccagaccccagccacaccctggaggagcgggtagtgcactggtatttcagccagctggacagcaatagcagcaacgacattaacaagcgggagatgaagcccttcaagcgctacgtgaagaagaaagccaagcccaagaaatgtgcccggcgtttcaccgactactgtgacctgaacaaagacaaggtcatttcactgcctgagctgaagggctgcctgggtgttagcaaagaaggacgcctcgtctaaggagcagaaaacccaagggcaggtggagagtccagggaggcaggatggatcaccagacacctaaccttcagcgttgcccatggccctgccacatcccgtgtaacataagtggtgcccaccatgtttgcacttttaataactcttacttgcgtgttttgtttttggtttcattttaaaacaccaatatctaataccacagtgggaaaaggaaagggaagaaagactttattctctctcttattgtaagtttttggatctgctactgacaacttttagagggttttgggggggtgggggagggtgttgttggggctgagaagaaagagatttatatgctgtatataaatatatatgtaaattgtatagttcttttgtacaggcattggcattgctgttgtttatttctctccctctgcctgctgtgggtggtgggcactctggacacatagtccagctttctaaaatccaggactctatcctgggcctactaaacttctgtttggagactgacccttgtgtataaagacgggagtcctgcaattgtactgcggactccacgagttcttttctggtgggaggactatattgccccatgccattagttgtcaaaattgataagtcacttggctctcggccttgtccagggaggttgggctaaggagagatggaaactgccctgggagaggaagggagtccagatcccatgaatagcccacacaggtaccggctctcagagggtccgtgcattcctgctctccggacccccaaagggcccagcattggtgggtgcaccagtatcttagtgaccctcggagcaaattatccacaaaggatttgcattacgtcactcgaaacgttttcatccatgcttagcatctactctgtataacgcatgagaggggaggcaaagaagaaaaagacacacagaagggcctttaaaaaagtagatatttaatatctaagcaggggaggggacaggacagaaagcctgcactgaggggtgcggtgccaacagggaaactcttcacctccctgcaaacctaccagtgaggctcccagagacgcagctgtctcagtgccaggggcagattgggtgtgacctctccactcctccatctcctgctgttgtcctagtggctatcacaggcctgggtgggtgggttgggggaggtgtcagtcaccttgttggtaacactaaagttgttttgttggttttttaaaaacccaatactgaggttcttcctgttccctcaagttttcttatgggcttccaggctttaagctaattccagaagtaaaactgatcttgggtttcctattctgcctcccctagaagggcaggggtgataacccagctacagggaaatcccggcccagctttccacaggcatcacaggcatcttccgcggattctagggtgggctgcccagccttctggtctgaggcgcagctccctctgcccaggtgctgtgcctattcaagtggccttcaggcagagcagcaagtggcccttagcgccccttcccataagcagctgtggtggcagtgagggaggttgggtagccctggactggtcccctcctcagatcacccttgcaaatctggcctcatcttgtattccaacccgacatccctaaaagtacctccacccgttccgggtctggaaggcgttggcaccacaagcactgtccctgtgggaggagcacaaccttctcgggacaggatctgatggggtcttgggctaaaggaggtccctgctgtcctggagaaagtcctagaggttatctcaggaatgactggtggccctgccccaacgtggaaaggtgggaaggaagccttctcccattagccccaatgagagaactcaacgtgccggagctgagtgggccttgcacgagacactggccccactttcaggcctggaggaagcatgcacacatggagacggcgcctgcctgtagatgtttggatcttcgagatctccccaggcatcttgtctcccacaggatcgtgtgtgtaggtggtgttgtgtggttttcctttgtgaaggagagagggaaactatttgtagcttgttttataaaaaataaaaaatgggtaaatcttg

SEQ ID NO: 427553 - DNA, 2459 bp, Homo sapiens
cggtgggtcgttctcagagccagaccccagccacaccctggaggagcgggtagtgcactggtatttcagccagctggacagcaatagcagaacgttctcagagccagaccccagccacaccctggaggagcgggtagtgcactggtatttcagccagctggacagcaatagcagcaacgacattaacaagcgggagatgaagcccttcaagcgctacgtgaagaagaaagccaagcccaagaaatgtgcccggcgtttcaccgactactgtgacctgaacaaagacaaggtcatttcactgcctgagctgaagggctgcctgggtgttagcaaagaaggacgcctcgtctaaggagcagaaaacccaagggcaggtggagagtccagggaggcaggatggatcaccagacacctaaccttcagcgttgcccatggccctgccacatcccgtgtaacataagtggtgcccaccatgtttgcacttttaataactcttacttgcgtgttttgtttttggtttcattttaaaacaccaatatctaataccacagtgggaaaaggaaagggaagaaagactttattctctctcttattgtaagtttttggatctgctactgacaacttttagagggttttgggggggtgggggagggtgttgttggggctgagaagaaagagatttatatgctgtatataaatatatatgtaaattgtatagttcttttgtacaggcattggcattgctgttgtttatttctctccctctgcctgctgtgggtggtgggcactctggacacatagtccagctttctaaaatccaggactctatcctgggcctactaaacttctgtttggagactgacccttgtgtataaagacgggagtcctgcaattgtactgcggactccacgagttcttttctggtgggaggactatattgccccatgccattagttgtcaaaattgataagtcacttggctctcggccttgtccagggaggttgggctaaggagagatggaaactgccctgggagaggaagggagtccagatcccatgaatagcccacacaggtaccggctctcagagggtccgtgcattcctgctctccggacccccaaagggcccagcattggtgggtgcaccagtatcttagtgaccctcggagcaaattatccacaaaggatttgcattacgtcactcgaaacgttttcatccatgcttagcatctactctgtataacgcatgagaggggaggcaaagaagaaaaagacacacagaagggcctttaaaaaagtagatatttaatatctaagcaggggaggggacaggacagaaagcctgcactgaggggtgcggtgccaacagggaaactcttcacctccctgcaaacctaccagtgaggctcccagagacgcagctgtctcagtgccaggggcagattgggtgtgacctctccactcctccatctcctgctgttgtcctagtggctatcacaggcctgggtgggtgggttgggggaggtgtcagtcaccttgttggtaacactaaagttgttttgttggttttttaaaaacccaatactgaggttcttcctgttccctcaagttttcttatgggcttccaggctttaagctaattccagaagtaaaactgatcttgggtttcctattctgcctcccctagaagggcaggggtgataacccagctacagggaaatcccggcccagctttccacaggcatcacaggcatcttccgcggattctagggtgggctgcccagccttctggtctgaggcgcagctccctctgcccaggtgctgtgcctattcaagtggccttcaggcagagcagcaagtggcccttagcgccccttcccataagcagctgtggtggcagtgagggaggttgggtagccctggactggtcccctcctcagatcacccttgcaaatctggcctcatcttgtattccaacccgacatccctaaaagtacctccacccgttccgggtctggaaggcgttggcaccacaagcactgtccctgtgggaggagcacaaccttctcgggacaggatctgatggggtcttgggctaaaggaggtccctgctgtcctggagaaagtcctagaggttatctcaggaatgactggtggccctgccccaacgtggaaaggtgggaaggaagccttctcccattagccccaatgagagaactcaacgtgccggagctgagtgggccttgcacgagacactggccccactttcaggcctggaggaagcatgcacacatggagacggcgcctgcctgtagatgtttggatcttcgagatctccccaggcatcttgtctcccacaggatcgtgtgtgtaggtggtgttgtgtggttttcctttgtgaaggagagagggaaactatttgtagcttgttttataaaaaataaaaaatgggtaaatcttg

SEQ ID NO: 427554 - DNA, 2080 bp, Homo sapiens
gaatacaaaagctagtttcacattaagaactagaagtgacactgctgttttctcaccagcagaatactaacttttcaagtcccattcatattacgacaaaaaagaatggcttcacaaatctcattcattttataagtagcatcatcttcatcttaaaaatataagtcatctaattgtttacagtgttacacactgttcaaagaaccacatagctctgattccttccttccaaaaatttacattccaaggaagatatactgatgtgaagactcaccaaatgcagacaagaactattaaaagtaccccatggatggacctccaaatgagtttagggtaattgcgcttaaaatattaggaccaaagtacatttattttatagatggaggaggggaggagacgagtggggaccagcttgacatccagtcttcacctggacatatggaaagaacaaatgtgcgatctgctcgttccctctgaaggtctctgttacgtatttcctcctctcctccagagcataataaccaatgactgctctcagaaaggtactgtgaccaccacttgcttggctctccaacttcctcccccatttccctcttgactcctgtttgccataacaccttctgtcccctagccttgcctcaggtccccgacgaatcctgcccttaatctgtgggggtggtaggtggcactggtttgaagagcttactggatctccctcagtgagtcagcctggagttgtgtttgaaaaccacaggccctgactgtggctgtcagacctcccagacaccacctgctgctgcctatcatcatcttcaggtgctgggctcccctgtgggcctcgtctgcccgccctctgctgcagctgtcccatgggcgcccgccctctctgacaccacaagagagcccatctagattccaggaaaaaactcatctttatttgccttcttcccactgaaggtaaaagcaacattaataaccacaacaaatacttagtgagtgcttactattattcatttaattgttggcccttccatccctggccatgatgagagacatgccatagcttactcctaaagagacctgaggacacacgtgcacaaacatattgggcatatcatcaatggcatcaaaactgattttccctgtctacccagaacaggcctgagggagagggaaaagcggatacccacctgtgtcgctgtttgcgtgccaagtccaggaacagtccatacagccctgctgcatcccacgacgctgtcacaaagcaggagttcatccgaggccaagatggagaaactgaggcccagaaattgatgtccagaatgctttgctcttagccactgtactattatggcatattttatctttatgtattgcatcatttcatggattcaagtttatcaatgtcctttgacaagtttaaaaatctgtctgctaaaatctatcaaatacattaaggaaaagtcccacttggcacatctcccacaccagatgttaattattcatactgcatgactgaggattttggaggcagagagagattcatctgcaatatttggaacaccaatggaggtctacgtcaacacagaatttatacagcagctggtgctagtcagagctaatgacagaatttcagtttaataaaaagacccccaactgagcacaccatcttgaaaaaagtatacttatcaaacagctttcaatcagttcaagagagacaccttaattggggagaggaagaattgcagagtagtttgtaatcatgccaattccagatcaataactgcatgtctgttctttggtagaaatagcttttgctttatattaagtaatcacatatatattctctctatttggataaggaaaccttcgctttatttgacaatgtataatgatatactcttctaattcacctctgtgtcttcacaataaacatgagtaaaatttagacaagtgatggtaaaggtcaatataattatttatttttaaaataaattttgtatctaacaggaaagcagttcttatgaaatttttatattttcaaaaattgttttgttcaaataaaattttatgagtaaag

SEQ ID NO: 427555 - DNA, 1610 bp, Homo sapiens
agggatcccgggctgctgccgctaccaacaagggtacacactgcggtcctcaaggccaggaggggggtgggggcagggaatgcctcagccaacagggcagcggctcggccctgctgctggcccggtgggaagtagcctggggccccgcgactgaaatccgagccaggcctgggcagtctccgctagaaacgctctgggcgcgcactcctggagacgcggaggcccgggcgctccagaccagtgtccttgtaggaggcttcttcacgaagcttagagtttggcctttcatagggaaagacttgctcgggagcaagtctaagggattttaagggattttaaatcttcctgggccagggctagggagctctagtgacagtgtcttggtctggaatccaactctccaattttgaggccgcagggaggaattctgagactttagaggccgcacagccttcagcgcgctcaccgcgtccaggcgtcagtgaggggctatctcgaggcgcgagtgcacaaaaggtagcgcgagtctcttctcaggcgatccagataagaggaaatgagagccgggttttctgacttccaactcattagggaccaggttctttttcttcaggatcaggcacagagactgactgaatggctccaattatcaggatttgaaaacccagtatcagaatctaccactttgtgcctgagggagagggaaaagcggatacccacctgtgtcgctgtttgcgtgccaagtccaggaacagtccatacagccctgctgcatcccacgacgctgtcacaaagcaggagttcatccgaggccaagatggagaaactgaggcccagaaattgatgtccagaatgctttgctcttagccactgtactattatggcatattttatctttatgtattgcatcatttcatggattcaagtttatcaatgtcctttgacaagtttaaaaatctgtctgctaaaatctatcaaatacattaaggaaaagtcccacttggcacatctcccacaccagatgttaattattcatactgcatgactgaggattttggaggcagagagagattcatctgcaatatttggaacaccaatggaggtctacgtcaacacagaatttatacagcagctggtgctagtcagagctaatgacagaatttcagtttaataaaaagacccccaactgagcacaccatcttgaaaaaagtatacttatcaaacagctttcaatcagttcaagagagacaccttaattggggagaggaagaattgcagagtagtttgtaatcatgccaattccagatcaataactgcatgtctgttctttggtagaaatagcttttgctttatattaagtaatcacatatatattctctctatttggataaggaaaccttcgctttatttgacaatgtataatgatatactcttctaattcacctctgtgtcttcacaataaacatgagtaaaatttagacaagtgatggtaaaggtcaatataattatttatttttaaaataaattttgtatctaacaggaaagcagttcttatgaaatttttatattttcaaaaattgttttgttcaaataaaattttatgagtaaag

SEQ ID NO: 427556 - DNA, 1983 bp, Homo sapiens
gaatacaaaagctagtttcacattaagaactagaagtgacactgctgttttctcaccagcagaatactaacttttcaagtcccattcatattacgacaaaaaagaatggcttcacaaatctcattcattttataagtagcatcatcttcatcttaaaaatataagtcatctaattgtttacagtgttacacactgttcaaagaaccacatagctctgattccttccttccaaaaatttacattccaaggaagatatactgatgtgaagactcaccaaatgcagacaagaactattaaaagtaccccatggatggacctccaaatgagtttagggtaattgcgcttaaaatattaggaccaaagtacatttattttatagatggaggaggggaggagacgagtggggaccagcttgacatccagtcttcacctggacatatggaaagaacaaatgtgcgatctgctcgttccctctgaaggtctctgttacgtatttcctcctctcctccagagcataataaccaatgactgctctcagaaaggtactgtgaccaccacttgcttggctctccaacttcctcccccatttccctcttgactcctgtttgccataacaccttctgtcccctagccttgcctcaggtccccgacgaatcctgcccttaatctgtgggggtggtaggtggcactggtttgaagagcttactggatctccctcagtgctgggctcccctgtgggcctcgtctgcccgccctctgctgcagctgtcccatgggcgcccgccctctctgacaccacaagagagcccatctagattccaggaaaaaactcatctttatttgccttcttcccactgaaggtaaaagcaacattaataaccacaacaaatacttagtgagtgcttactattattcatttaattgttggcccttccatccctggccatgatgagagacatgccatagcttactcctaaagagacctgaggacacacgtgcacaaacatattgggcatatcatcaatggcatcaaaactgattttccctgtctacccagaacaggcctgagggagagggaaaagcggatacccacctgtgtcgctgtttgcgtgccaagtccaggaacagtccatacagccctgctgcatcccacgacgctgtcacaaagcaggagttcatccgaggccaagatggagaaactgaggcccagaaattgatgtccagaatgctttgctcttagccactgtactattatggcatattttatctttatgtattgcatcatttcatggattcaagtttatcaatgtcctttgacaagtttaaaaatctgtctgctaaaatctatcaaatacattaaggaaaagtcccacttggcacatctcccacaccagatgttaattattcatactgcatgactgaggattttggaggcagagagagattcatctgcaatatttggaacaccaatggaggtctacgtcaacacagaatttatacagcagctggtgctagtcagagctaatgacagaatttcagtttaataaaaagacccccaactgagcacaccatcttgaaaaaagtatacttatcaaacagctttcaatcagttcaagagagacaccttaattggggagaggaagaattgcagagtagtttgtaatcatgccaattccagatcaataactgcatgtctgttctttggtagaaatagcttttgctttatattaagtaatcacatatatattctctctatttggataaggaaaccttcgctttatttgacaatgtataatgatatactcttctaattcacctctgtgtcttcacaataaacatgagtaaaatttagacaagtgatggtaaaggtcaatataattatttatttttaaaataaattttgtatctaacaggaaagcagttcttatgaaatttttatattttcaaaaattgttttgttcaaataaaattttatgagtaaag

SEQ ID NO: 427557 - DNA, 1876 bp, Homo sapiens
gaatacaaaagctagtttcacattaagaactagaagtgacactgctgttttctcaccagcagaatactaacttttcaagtcccattcatattacgacaaaaaagaatggcttcacaaatctcattcattttataagtagcatcatcttcatcttaaaaatataagtcatctaattgtttacagtgttacacactgttcaaagaaccacatagctctgattccttccttccaaaaatttacattccaaggaagatatactgatgtgaagactcaccaaatgcagacaagaactattaaaagtaccccatggatggacctccaaatgagtttagggtaattgcgcttaaaatattaggaccaaagtacatttattttatagatggaggaggggaggagacgagtggggaccagcttgacatccagtcttcacctggacatatggaaagaacaaatgtgcgatctgctcgttccctctgaaggtctctgttacgtatttcctcctctcctccagagcataataaccaatgactgctctcagaaaggtactgtgaccaccacttgcttggctctccaacttcctcccccatttccctcttgactcctgtttgccataacaccttctgtcccctagccttgcctcaggtccccgacgaatcctgcccttaatctgtgggggtggtaggtggcactggtttgaagagcttactggatctccctcagtgagtcagcctggagttgtgtttgaaaaccacaggccctgactgtggctgtcagacctcccagacaccacctgctgctgcctatcatcatcttcaggtgctgggctcccctgtgggcctcgtctgcccgccctctgctgcagctgtcccatgggcgcccgccctctctgacaccacaagagagcccatctagattccaggaaaaaactcatctttatttgccttcttcccactgaaggtaaaagcaacattaataaccacaacaaatacttagtgagtgcttactattattcatttaattgttggcccttccatccctggccatgatgagagacatgccatagcttactcctaaagagacctgaggacacacgtgcacaaacatattgggcatatcatcaatggcatcaaaactgattttccctgtctacccagaacaggcctgagggagagggaaaagcggatacccacctgtgtcgctgtttgcgtgccaagtccaggaacagtccatacagccctgctgcatcccacgacgctgtcacaaagcaggagttcatccgaggccaagatgttaattattcatactgcatgactgaggattttggaggcagagagagattcatctgcaatatttggaacaccaatggaggtctacgtcaacacagaatttatacagcagctggtgctagtcagagctaatgacagaatttcagtttaataaaaagacccccaactgagcacaccatcttgaaaaaagtatacttatcaaacagctttcaatcagttcaagagagacaccttaattggggagaggaagaattgcagagtagtttgtaatcatgccaattccagatcaataactgcatgtctgttctttggtagaaatagcttttgctttatattaagtaatcacatatatattctctctatttggataaggaaaccttcgctttatttgacaatgtataatgatatactcttctaattcacctctgtgtcttcacaataaacatgagtaaaatttagacaagtgatggtaaaggtcaatataattatttatttttaaaataaattttgtatctaacaggaaagcagttcttatgaaatttttatattttcaaaaattgttttgttcaaataaaattttatgagtaaag

SEQ ID NO: 427558 - DNA, 1482 bp, Homo sapiens
agggatcccgggctgctgccgctaccaacaagggtacacactgcggtcctcaaggccaggaggggggtgggggcagggaatgcctcagccaacagggcagcggctcggccctgctgctggcccggtgggaagtagcctggggccccgcgactgaaatccgagccaggcctgggcagtctccgctagaaacgctctgggcgcgcactcctggagacgcggaggcccgggcgctccagaccagtgtccttgtaggaggcttcttcacgaagcttagagtttggcctttcatagggaaagacttgctcgggagcaagtctaagggattttaagggattttaaatcttcctgggccagggctagggagctctagtgacagtgtcttggtctggaatccaactctccaattttgaggccgcagggaggaattctgagactttagaggccgcacagccttcagcgcgctcaccgcgtccaggcgtcagtgaggggctatctcgaggcgcgagtgcacaaaaggtagcgcgagtctcttctcaggcgatccagataagaggaaatgagagccgggttttctgacttccaactcattagggaccaggttctttttcttcaggatcaggcacagagactgactgaatggctccaattatcaggatttgaaaacccagtatcagaatctaccactttgtatggagaaactgaggcccagaaattgatgtccagaatgctttgctcttagccactgtactattatggcatattttatctttatgtattgcatcatttcatggattcaagtttatcaatgtcctttgacaagtttaaaaatctgtctgctaaaatctatcaaatacattaaggaaaagtcccacttggcacatctcccacaccagatgttaattattcatactgcatgactgaggattttggaggcagagagagattcatctgcaatatttggaacaccaatggaggtctacgtcaacacagaatttatacagcagctggtgctagtcagagctaatgacagaatttcagtttaataaaaagacccccaactgagcacaccatcttgaaaaaagtatacttatcaaacagctttcaatcagttcaagagagacaccttaattggggagaggaagaattgcagagtagtttgtaatcatgccaattccagatcaataactgcatgtctgttctttggtagaaatagcttttgctttatattaagtaatcacatatatattctctctatttggataaggaaaccttcgctttatttgacaatgtataatgatatactcttctaattcacctctgtgtcttcacaataaacatgagtaaaatttagacaagtgatggtaaaggtcaatataattatttatttttaaaataaattttgtatctaacaggaaagcagttcttatgaaatttttatattttcaaaaattgttttgttcaaataaaattttatgagtaaag

SEQ ID NO: 427559 - DNA, 1406 bp, Homo sapiens
agggatcccgggctgctgccgctaccaacaagggtacacactgcggtcctcaaggccaggaggggggtgggggcagggaatgcctcagccaacagggcagcggctcggccctgctgctggcccggtgggaagtagcctggggccccgcgactgaaatccgagccaggcctgggcagtctccgctagaaacgctctgggcgcgcactcctggagacgcggaggcccgggcgctccagaccagtgtccttgtaggaggcttcttcacgaagcttagagtttggcctttcatagggaaagacttgctcgggagcaagtctaagggattttaagggattttaaatcttcctgggccagggctagggagctctagtgacagtgtcttggtctggaatccaactctccaattttgaggccgcagggaggaattctgagactttagaggccgcacagccttcagcgcgctcaccgcgtccaggcgtcagtgaggggctatctcgaggcgcgagtgcacaaaaggtagcgcgagtctcttctcaggcgatccagataagaggaaatgagagccgggttttctgacttccaactcattagggaccaggttctttttcttcaggatcaggcacagagactgactgaatggctccaattatcaggatttgaaaacccagtatcagaatctaccactttgtgcctgagggagagggaaaagcggatacccacctgtgtcgctgtttgcgtgccaagtccaggaacagtccatacagccctgctgcatcccacgacgctgtcacaaagcaggagttcatccgaggccaagatgttaattattcatactgcatgactgaggattttggaggcagagagagattcatctgcaatatttggaacaccaatggaggtctacgtcaacacagaatttatacagcagctggtgctagtcagagctaatgacagaatttcagtttaataaaaagacccccaactgagcacaccatcttgaaaaaagtatacttatcaaacagctttcaatcagttcaagagagacaccttaattggggagaggaagaattgcagagtagtttgtaatcatgccaattccagatcaataactgcatgtctgttctttggtagaaatagcttttgctttatattaagtaatcacatatatattctctctatttggataaggaaaccttcgctttatttgacaatgtataatgatatactcttctaattcacctctgtgtcttcacaataaacatgagtaaaatttagacaagtgatggtaaaggtcaatataattatttatttttaaaataaattttgtatctaacaggaaagcagttcttatgaaatttttatattttcaaaaattgttttgttcaaataaaattttatgagtaaag

SEQ ID NO: 427560 - DNA, 1025 bp, Homo sapiens
accttgattacagtgttgtgagactctaagcagagggcccatctaagccatgcccttacctagaaactgtaagataataagtagttgttgtttagagccacaaagtatgcagtaatttgttacgcagaaatagaaaacaaatacacggtgctgtgctaatgatcacatgcatgatctcttagtgcttcaagtaacgtcataagcccgatactaatattatcttcatttacagatggagaaactgaggcccagaaattgatgtccagaatgctttgctcttagccactgtactattatggcatattttatctttatgtattgcatcatttcatggattcaagtttatcaatgtcctttgacaagtttaaaaatctgtctgctaaaatctatcaaatacattaaggaaaagtcccacttggcacatctcccacaccagatgttaattattcatactgcatgactgaggattttggaggcagagagagattcatctgcaatatttggaacaccaatggaggtctacgtcaacacagaatttatacagcagctggtgctagtcagagctaatgacagaatttcagtttaataaaaagacccccaactgagcacaccatcttgaaaaaagtatacttatcaaacagctttcaatcagttcaagagagacaccttaattggggagaggaagaattgcagagtagtttgtaatcatgccaattccagatcaataactgcatgtctgttctttggtagaaatagcttttgctttatattaagtaatcacatatatattctctctatttggataaggaaaccttcgctttatttgacaatgtataatgatatactcttctaattcacctctgtgtcttcacaataaacatgagtaaaatttagacaagtgatggtaaaggtcaatataattatttatttttaaaataaattttgtatctaacaggaaagcagttcttatgaaatttttatattttcaaaaattgttttgttcaaataaaattttatgagtaaag

SEQ ID NO: 427561 - DNA, 1417 bp, Homo sapiens
gaatacaaaagctagtttcacattaagaactagaagtgacactgctgttttctcaccagcagaatactaacttttcaagtcccattcatattacgacaaaaaagaatggcttcacaaatctcattcattttataagtagcatcatcttcatcttaaaaatataagtcatctaattgtttacagtgttacacactgttcaaagaaccacatagctctgattccttccttccaaaaatttacattccaaggaagatatactgatgtgaagactcaccaaatgcagacaagaactattaaaagtaccccatggatggacctccaaatgagtttagggtaattgcgcttaaaatattaggaccaaagtacatttattttatagatggaggaggggaggagacgagtggggaccagcttgacatccagtcttcacctggacatatggaaagaacaaatgtgcgatctgctcgttccctctgaaggtctctgttacgtatttcctcctctcctccagagcataataaccaatgactgctctcagaaaggtactgtgaccaccacttgcttggctctccaacttcctcccccatttccctcttgactcctgtttgccataacaccttctgtcccctagccttgcctcaggtccccgacgaatcctgcccttaatctgtgggggtggtaggtggcactggtttgaagagcttactggatctccctcagtgagtcagcctggagttgtgtttgaaaaccacaggccctgactgtggctgtcagacctcccagacaccacctgctgctgcctatcatcatcttcaggtgctgggctcccctgtgggcctcgtctgcccgccctctgctgcagctgtcccatgggcgcccgccctctctgacaccacaagagagcccatctagattccaggaaaaaactcatctttatttgccttcttcccactgaaggtaaaagcaacattaataaccacaacaaatacttagtgagtgcttactattattcatttaattgttggcccttccatccctggccatgatgagagacatgccatagcttactcctaaagagacctgaggacacacgtgcacaaacatattgggcatatcatcaatggcatcaaaactgattttccctgtctacccagaacaggcctgagggagagggaaaagcggatacccacctgtgtcgctgtttgcgtgccaagtccaggaacagtccatacagccctgctgcatcccacgacgctgtcacaaagcaggagttcatccgaggccaaggtgttgtcatgagaatattcgttaaagtagggacgctgactttgttcttgggcagattctcttcctgtggagtatccagcctgtttgcctagttttcctgttcttctggggtctgatctctatctgtttt

SEQ ID NO: 427562 - DNA, 949 bp, Homo sapiens
agggatcccgggctgctgccgctaccaacaagggtacacactgcggtcctcaaggccaggaggggggtgggggcagggaatgcctcagccaacagggcagcggctcggccctgctgctggcccggtgggaagtagcctggggccccgcgactgaaatccgagccaggcctgggcagtctccgctagaaacgctctgggcgcgcactcctggagacgcggaggcccgggcgctccagaccagtgtccttgtaggaggcttcttcacgaagcttagagtttggcctttcatagggaaagacttgctcgggagcaagtctaagggattttaagggattttaaatcttcctgggccagggctagggagctctagtgacagtgtcttggtctggaatccaactctccaattttgaggccgcagggaggaattctgagactttagaggccgcacagccttcagcgcgctcaccgcgtccaggcgtcagtgaggggctatctcgaggcgcgagtgcacaaaaggtagcgcgagtctcttctcaggcgatccagataagaggaaatgagagccgggttttctgacttccaactcattagggaccaggttctttttcttcaggatcaggcacagagactgactgaatggctccaattatcaggatttgaaaacccagtatcagaatctaccactttgtatgttaattattcatactgcatgactgaggattttggaggcagagagagattcatctgcaatatttggaacaccaatggaggtctacgtcaacacagaatttatacagcagctggtgctagtcagagcgtctactggcacaatttccgtttgatacgtaggcctatcgatggccacaccatcatgcgaccactatacgcatcctacacctatcaatcatttcgagtataactactcgattgacgagagcaaccagtaccg

SEQ ID NO: 427563 - DNA, 322 bp, Homo sapiens
gcggaggttgcagtgagccaagatggcactactgtacaccagcctgggcgacagagtgagactccatctcaaaaacaacaaaaacttcaagtgcctattctaataaccttgcttggacagttaatttggatttggtgtctgttataagcaaaaatttataatttagattttgctttttaaagtttgttctttgagtatgggaattagcaagctgtttttttccttttttttaaaaaaagtaaacatgaatactttgcctaccatcctaataagattgaatcagcactgtaatatagcacaaaagggtattagaatctagctc

SEQ ID NO: 427564 - DNA, 3067 bp, Homo sapiens
tcggctagtacgaggctgggtttaatcggccgaggctcaacatggctgctgcccttgtcagtggaggtggagttcggaggtggtgcggagctcctgtttgacggtattaagaaacatcgagtcactttgcctggacaggaggaaccctgggacatccggaacctgctcatctggatcaagaagaatttgctaaaagagcggccagagttgttcatccagggagacagcgtgtgagtcccactcctcccttccctgaagcaggtggagggagggacggatatttgagcccccaccctcgggttcagtcctggccttctctgaatccggttctccccttcctcctccctaactcttccagctctgagatctgttttcagttttcttgttactaaaccgaactcttgaggattttttaaatcccagatgaaaggagcctggtgaatttctcagaaaacttggattctgccctctggttgccacagacttgctgtgggaccttaggcgacttacttcgcttctctgggcctcagttactctctacacagaaagtgctgaggaaaaaacgtagctagtacaactgaagagctaaatattctgttttatttcattgtaatttaaatagccacatgcagctagtagattaccatacagtgcagcacgggtctagaattccaaggagtcattgactctgtgcgtgcacacacccatgcacatgcacacacactcactggggacaccccatagaagcccagtgcagtctccttggaaaggaccaggttccagttgccacgaagttacttctaaaacaaggccagtcccccacgtgaaaggtggccggtgcagttgtgaggctcgcttatttgcctcgaagcataggtcactgtcaggtcctaagggatcaggcctaggggatcagccctccttcaggtcatggtccagtggtcctggaggccacctctaaggccagcagtgctccttgggccattaccagtgggagccaggctaagctgcctgaccaaatgttgacctaccctgccttatgccaggcaggactgcacgtgagcattgccatgtggcatggcaactgattcggaagaggcaaaacagccttctctccaggatgggcatgcagaggcctaaaaaaaagccgaagttcttttccagggctaacgagaataagattagacccctggaaaagtcctactaatggttaccatgacagtgtggcaagcactccacacatatcagctcatttcgttttcgtataggccttgtgggttagacagtatcacttatcccattttcagatgaggaacctgatactcagaaacaaaatgacctgcccatggtctgggtggtggtgctggctggcatttgcacccattttccatctggctacaaagaccatgcatgactgacctggtttccttcacactcagaccagcctccccttcctgggatatctttagccagaccccaggaggaaggctcctcagcacactctcctgcagcccaaagctctcagcctctcttcctctgtgctactgcctcctgcctctcactccttgctactcaccaccatctttcccacaggcggccaggaattctggtgctgattaacgatgccgactgggagctactggtcagtaccttgggggacatccctcccccagcccctgcccttgctgcttcagtgggaaagcgttgggcctctcctcaggcacatatagagtggctgggtaatcctccgccccactccagccccacactgaggctgctggagtctcccactccaggtgaggaagggatgggtagctggggacatgggagtactcctccatcctgaagatttgcaggttgaggtataggatacccatttttctggtagagtctgtctcttccagagcagccagtcctcagcccctgttctcccaactcctggggtggacctgggaaggtggccctgagggtctcccgctcccctctctcccgcaccagggtgagctggactaccagcttcaggaccaggacagcgtcctcttcatctccactctgcacggcggctgagggcccttctctgggcctgggcacccttagaggggagaacgaagcaatcagacatccccttgggccctgcttccaggtctccctgtcccccttgcctgccttcttccctgctctgtcccctaagctccctccaggcagggaaaagaggccaggtgctaaaaatgagcctttctcaagcacgtgagcagcggaaggcagacaggcgccagagcccagcactcccttttccagcagctgtggtgggggagggttcccctccagtttgtcaagagttgaaggaggctctgtggccaggtgacctggctgccttccactccttgtacctcagtctaaacatggagtggccgctgacaaggcgctccagccccagagccagcgtcttcatggggaagatgaatggacctgagtagctgaaggaaggcccctccctacccaaagactggaggcttctcagcctcaatttccctgtctgtacagctgagggctctgcctgtcccccactgctatcagtatggaaccccagctggggtcccctattgagtgccgactccccccaccgccagcagctgctcctccagccacacccctcctgctccccccacccctagcccttgaccctggctggcctgccccgctccacaggccaccagatgggctcctgagaccctccccaggctgcttacagctcattctgctgggggtagagatgaggggagggagtaagttaaaccttggactagcaagtagaagcctggggggatgcgtgtgcctcagtttcctcctccacaactgaatatagtggctgaaaactggggagatacttgatggcgcgaatgtccgttttctctcccttcccacctcctgcaggaagcaggacggggcaggcagcacctggtaggcacagtgctttgcccctcctccccttcccttctggaagtcttggggcctcagtgcttgcaacagccggccttgggcaaataaaagactaggttgtttacta

SEQ ID NO: 427565 - DNA, 228 bp, Homo sapiens
cgaatcttacctactgacctcacctatacgcggcaactttgagccactaccgacggacacaatacgtacaataatgcagtgccgaattcgcacgaggcctcgtgcggggcaggcagcacctggtaggcacagtgctttgcccctcctccccttcccttctggaagtcttggggcctcagtgcttgcaacagccggccttgggcaaataaaagactaggttgtttacta

SEQ ID NO: 427566 - DNA, 1322 bp, Homo sapiens
cccggaaatttgcgggcgcgccggaagttgaggggagtttcctgcgagctcggcttcctcaacatggctgcgcccttgtcagtggaggtggagttcggaggtggtgcggagctcctgtttgacggtattaagaaacatcgagtcactttgcctggacaggaggaaccctgggacatccggaacctgctcatctggatcaagaagaatttgctaaaagagcggccagagttgttcatccagggagacagcgtgcggccaggaattctggtgctgattaacgatgccgactgggagctactgggtgagctggactaccagcttcaggaccaggacagcgtcctcttcatctccactctgcacggcggctgagggcccttctctgggcctgggcacccttagaggggagaacgaagcaatcagacatccccttgggccctgcttccaggtctccctgtcccccttgcctgccttcttccctgctctgtcccctaagctccctccaggcagggaaaagaggccaggtgctaaaaatgagcctttctcaagcacgtgagcagcggaaggcagacaggcgccagagcccagcactcccttttccagcagctgtggtgggggagggttcccctccagtttgtcaagagttgaaggaggctctgtggccaggtgacctggctgccttccactccttgtacctcagtctaaacatggagtggccgctgacaaggcgctccagccccagagccagcgtcttcatggggaagatgaatggacctgagtagctgaaggaaggcccctccctacccaaagactggaggcttctcagcctcaatttccctgtctgtacagctgagggctctgcctgtcccccactgctatcagtatggaaccccagctggggtcccctattgatcctgctccccccacccctagcccttgaccctggctggcctgccccgctccacaggccaccagatgggctcctgagaccctccccaggctgcttacagctcattctgctgggggtagagatgaggggagggagtaagttaaaccttggactagcaagtagaagcctggggggatgcgtgtgcctcagtttcctcctccacaactgaatatagtggctgaaaactggggagatacttgatggcgcgaatgtccgttttctctcccttcccacctcctgcaggaagcaggacggggcaggcagcacctggtaggcacagtgctttgcccctcctccccttcccttctggaagtcttggggcctcagtgcttgcaacagccggccttgggcaaataaaagactaggttgtttacta

SEQ ID NO: 427567 - DNA, 1348 bp, Homo sapiens
tcggctagtacgaggctgggtttaatcggccgaggctcaacatggctgctgcccttgtcagtggaggtggagttcggaggtggtgcggagctcctgtttgacggtattaagaaacatcgagtcactttgcctggacaggaggaaccctgggacatccggaacctgctcatctggatcaagaagaatttgctaaaagagcggccagagttgttcatccagggagacagcgtgcggccaggaattctggtgctgattaacgatgccgactgggagctactgggtgagctggactaccagcttcaggaccaggacagcgtcctcttcatctccactctgcacggcggctgagggcccttctctgggcctgggcacccttagaggggagaacgaagcaatcagacatccccttgggccctgcttccaggtctccctgtcccccttgcctgccttcttccctgctctgtcccctaagctccctccaggcagggaaaagaggccaggtgctaaaaatgagcctttctcaagcacgtgagcagcggaaggcagacaggcgccagagcccagcactcccttttccagcagctgtggtgggggagggttcccctccagtttgtcaagagttgaaggaggctctgtggccaggtgacctggctgccttccactccttgtacctcagtctaaacatggagtggccgctgacaaggcgctccagccccagagccagcgtcttcatggggaagatgaatggacctgagtagctgaaggaaggcccctccctacccaaagactggaggcttctcagcctcaatttccctgtctgtacagctgagggctctgcctgtcccccactgctatcagtatggaaccccagctggggtcccctattgagtgccgactccccccaccgccagcagctgctcctccagccacacccctcctgctccccccacccctagcccttgaccctggctggcctgccccgctccacaggccaccagatgggctcctgagaccctccccaggctgcttacagctcattctgctgggggtagagatgaggggagggagtaagttaaaccttggactagcaagtagaagcctggggggatgcgtgtgcctcagtttcctcctccacaactgaatatagtggctgaaaactggggagatacttgatggcgcgaatgtccgttttctctcccttcccacctcctgcaggaagcaggacggggcaggcagcacctggtaggcacagtgctttgcccctcctccccttcccttctggaagtcttggggcctcagtgcttgcaacagccggccttgggcaaataaaagactaggttgtttacta

SEQ ID NO: 427568 - DNA, 1387 bp, Homo sapiens
catttattgagtgcctaccatgtgccgggcagcaagccagacactgaggatacaaagataaatagaagtctgtccgtgccctacagcgttcagcatttctgccccttagaagggggaggtggtgcggagctcctgtttgacggtattaagaaacatcgagtcactttgcctggacaggaggaaccctgggacatccggaacctgctcatctggatcaagaagaatttgctaaaagagcggccagagttgttcatccagggagacagcgtgcggccaggaattctggtgctgattaacgatgccgactgggagctactgggtgagctggactaccagcttcaggaccaggacagcgtcctcttcatctccactctgcacggcggctgagggcccttctctgggcctgggcacccttagaggggagaacgaagcaatcagacatccccttgggccctgcttccaggtctccctgtcccccttgcctgccttcttccctgctctgtcccctaagctccctccaggcagggaaaagaggccaggtgctaaaaatgagcctttctcaagcacgtgagcagcggaaggcagacaggcgccagagcccagcactcccttttccagcagctgtggtgggggagggttcccctccagtttgtcaagagttgaaggaggctctgtggccaggtgacctggctgccttccactccttgtacctcagtctaaacatggagtggccgctgacaaggcgctccagccccagagccagcgtcttcatggggaagatgaatggacctgagtagctgaaggaaggcccctccctacccaaagactggaggcttctcagcctcaatttccctgtctgtacagctgagggctctgcctgtcccccactgctatcagtatggaaccccagctggggtcccctattgagtgccgactccccccaccgccagcagctgctcctccagccacacccctcctgctccccccacccctagcccttgaccctggctggcctgccccgctccacaggccaccagatgggctcctgagaccctccccaggctgcttacagctcattctgctgggggtagagatgaggggagggagtaagttaaaccttggactagcaagtagaagcctggggggatgcgtgtgcctcagtttcctcctccacaactgaatatagtggctgaaaactggggagatacttgatggcgcgaatgtccgttttctctcccttcccacctcctgcaggaagcaggacggggcaggcagcacctggtaggcacagtgctttgcccctcctccccttcccttctggaagtcttggggcctcagtgcttgcaacagccggccttgggcaaataaaagactaggttgtttacta

SEQ ID NO: 427569 - DNA, 3129 bp, Homo sapiens
cccggaaatttgcgggcgcgccggaagttgaggggagtttcctgcgagctcggcttcctcaacatggctgcgcccttgtcagtggaggtggagttcgggagctcacctggctgtctttttctctggtcctcctttgcagaggtggtgcggagctcctgtttgacggtattaagaaacatcgagtcactttgcctggacaggaggaaccctgggacatccggaacctgctcatctggatcaagaagaatttgctaaaagagcggccagagttgttcatccagggagacagcgtgtgagtcccactcctcccttccctgaagcaggtggagggagggacggatatttgagcccccaccctcgggttcagtcctggccttctctgaatccggttctccccttcctcctccctaactcttccagctctgagatctgttttcagttttcttgttactaaaccgaactcttgaggattttttaaatcccagatgaaaggagcctggtgaatttctcagaaaacttggattctgccctctggttgccacagacttgctgtgggaccttaggcgacttacttcgcttctctgggcctcagttactctctacacagaaagtgctgaggaaaaaacgtagctagtacaactgaagagctaaatattctgttttatttcattgtaatttaaatagccacatgcagctagtagattaccatacagtgcagcacgggtctagaattccaaggagtcattgactctgtgcgtgcacacacccatgcacatgcacacacactcactggggacaccccatagaagcccagtgcagtctccttggaaaggaccaggttccagttgccacgaagttacttctaaaacaaggccagtcccccacgtgaaaggtggccggtgcagttgtgaggctcgcttatttgcctcgaagcataggtcactgtcaggtcctaagggatcaggcctaggggatcagccctccttcaggtcatggtccagtggtcctggaggccacctctaaggccagcagtgctccttgggccattaccagtgggagccaggctaagctgcctgaccaaatgttgacctaccctgccttatgccaggcaggactgcacgtgagcattgccatgtggcatggcaactgattcggaagaggcaaaacagccttctctccaggatgggcatgcagaggcctaaaaaaaagccgaagttcttttccagggctaacgagaataagattagacccctggaaaagtcctactaatggttaccatgacagtgtggcaagcactccacacatatcagctcatttcgttttcgtataggccttgtgggttagacagtatcacttatcccattttcagatgaggaacctgatactcagaaacaaaatgacctgcccatggtctgggtggtggtgctggctggcatttgcacccattttccatctggctacaaagaccatgcatgactgacctggtttccttcacactcagaccagcctccccttcctgggatatctttagccagaccccaggaggaaggctcctcagcacactctcctgcagcccaaagctctcagcctctcttcctctgtgctactgcctcctgcctctcactccttgctactcaccaccatctttcccacaggcggccaggaattctggtgctgattaacgatgccgactgggagctactggtcagtaccttgggggacatccctcccccagcccctgcccttgctgcttcagtgggaaagcgttgggcctctcctcaggcacatatagagtggctgggtaatcctccgccccactccagccccacactgaggctgctggagtctcccactccaggtgaggaagggatgggtagctggggacatgggagtactcctccatcctgaagatttgcaggttgaggtataggatacccatttttctggtagagtctgtctcttccagagcagccagtcctcagcccctgttctcccaactcctggggtggacctgggaaggtggccctgagggtctcccgctcccctctctcccgcaccagggtgagctggactaccagcttcaggaccaggacagcgtcctcttcatctccactctgcacggcggctgagggcccttctctgggcctgggcacccttagaggggagaacgaagcaatcagacatccccttgggccctgcttccaggtctccctgtcccccttgcctgccttcttccctgctctgtcccctaagctccctccaggcagggaaaagaggccaggtgctaaaaatgagcctttctcaagcacgtgagcagcggaaggcagacaggcgccagagcccagcactcccttttccagcagctgtggtgggggagggttcccctccagtttgtcaagagttgaaggaggctctgtggccaggtgacctggctgccttccactccttgtacctcagtctaaacatggagtggccgctgacaaggcgctccagccccagagccagcgtcttcatggggaagatgaatggacctgagtagctgaaggaaggcccctccctacccaaagactggaggcttctcagcctcaatttccctgtctgtacagctgagggctctgcctgtcccccactgctatcagtatggaaccccagctggggtcccctattgagtgccgactccccccaccgccagcagctgctcctccagccacacccctcctgctccccccacccctagcccttgaccctggctggcctgccccgctccacaggccaccagatgggctcctgagaccctccccaggctgcttacagctcattctgctgggggtagagatgaggggagggagtaagttaaaccttggactagcaagtagaagcctggggggatgcgtgtgcctcagtttcctcctccacaactgaatatagtggctgaaaactggggagatacttgatggcgcgaatgtccgttttctctcccttcccacctcctgcaggaagcaggacggggcaggcagcacctggtaggcacagtgctttgcccctcctccccttcccttctggaagtcttggggcctcagtgcttgcaacagccggccttgggcaaataaaagactaggttgtttacta

SEQ ID NO: 427570 - DNA, 2975 bp, Homo sapiens
caataatccaccggccggttgtactcgagtcactttgcctggacaggaggaaccctgggacatccggaacctgctcatctggatcaagaagaatttgctaaaagagcggccagagttgttcatccagggagacagcgtgtgagtcccactcctcccttccctgaagcaggtggagggagggacggatatttgagcccccaccctcgggttcagtcctggccttctctgaatccggttctccccttcctcctccctaactcttccagctctgagatctgttttcagttttcttgttactaaaccgaactcttgaggattttttaaatcccagatgaaaggagcctggtgaatttctcagaaaacttggattctgccctctggttgccacagacttgctgtgggaccttaggcgacttacttcgcttctctgggcctcagttactctctacacagaaagtgctgaggaaaaaacgtagctagtacaactgaagagctaaatattctgttttatttcattgtaatttaaatagccacatgcagctagtagattaccatacagtgcagcacgggtctagaattccaaggagtcattgactctgtgcgtgcacacacccatgcacatgcacacacactcactggggacaccccatagaagcccagtgcagtctccttggaaaggaccaggttccagttgccacgaagttacttctaaaacaaggccagtcccccacgtgaaaggtggccggtgcagttgtgaggctcgcttatttgcctcgaagcataggtcactgtcaggtcctaagggatcaggcctaggggatcagccctccttcaggtcatggtccagtggtcctggaggccacctctaaggccagcagtgctccttgggccattaccagtgggagccaggctaagctgcctgaccaaatgttgacctaccctgccttatgccaggcaggactgcacgtgagcattgccatgtggcatggcaactgattcggaagaggcaaaacagccttctctccaggatgggcatgcagaggcctaaaaaaaagccgaagttcttttccagggctaacgagaataagattagacccctggaaaagtcctactaatggttaccatgacagtgtggcaagcactccacacatatcagctcatttcgttttcgtataggccttgtgggttagacagtatcacttatcccattttcagatgaggaacctgatactcagaaacaaaatgacctgcccatggtctgggtggtggtgctggctggcatttgcacccattttccatctggctacaaagaccatgcatgactgacctggtttccttcacactcagaccagcctccccttcctgggatatctttagccagaccccaggaggaaggctcctcagcacactctcctgcagcccaaagctctcagcctctcttcctctgtgctactgcctcctgcctctcactccttgctactcaccaccatctttcccacaggcggccaggaattctggtgctgattaacgatgccgactgggagctactggtcagtaccttgggggacatccctcccccagcccctgcccttgctgcttcagtgggaaagcgttgggcctctcctcaggcacatatagagtggctgggtaatcctccgccccactccagccccacactgaggctgctggagtctcccactccaggtgaggaagggatgggtagctggggacatgggagtactcctccatcctgaagatttgcaggttgaggtataggatacccatttttctggtagagtctgtctcttccagagcagccagtcctcagcccctgttctcccaactcctggggtggacctgggaaggtggccctgagggtctcccgctcccctctctcccgcaccagggtgagctggactaccagcttcaggaccaggacagcgtcctcttcatctccactctgcacggcggctgagggcccttctctgggcctgggcacccttagaggggagaacgaagcaatcagacatccccttgggccctgcttccaggtctccctgtcccccttgcctgccttcttccctgctctgtcccctaagctccctccaggcagggaaaagaggccaggtgctaaaaatgagcctttctcaagcacgtgagcagcggaaggcagacaggcgccagagcccagcactcccttttccagcagctgtggtgggggagggttcccctccagtttgtcaagagttgaaggaggctctgtggccaggtgacctggctgccttccactccttgtacctcagtctaaacatggagtggccgctgacaaggcgctccagccccagagccagcgtcttcatggggaagatgaatggacctgagtagctgaaggaaggcccctccctacccaaagactggaggcttctcagcctcaatttccctgtctgtacagctgagggctctgcctgtcccccactgctatcagtatggaaccccagctggggtcccctattgagtgccgactccccccaccgccagcagctgctcctccagccacacccctcctgctccccccacccctagcccttgaccctggctggcctgccccgctccacaggccaccagatgggctcctgagaccctccccaggctgcttacagctcattctgctgggggtagagatgaggggagggagtaagttaaaccttggactagcaagtagaagcctggggggatgcgtgtgcctcagtttcctcctccacaactgaatatagtggctgaaaactggggagatacttgatggcgcgaatgtccgttttctctcccttcccacctcctgcaggaagcaggacggggcaggcagcacctggtaggcacagtgctttgcccctcctccccttcccttctggaagtcttggggcctcagtgcttgcaacagccggccttgggcaaataaaagactaggttgtttacta

SEQ ID NO: 427571 - DNA, 1704 bp, Homo sapiens
tcggctagtacgaggctgggtttaatcggccgaggctcaacatggctgctgcccttgtcagtggaggtggagttcggaggtggtgcggagctcctgtttgacggtattaagaaacatcgagtcactttgcctggacaggaggaaccctgggacatccggaacctgctcatctggatcaagaagaatttgctaaaagagcggccagagttgttcatccagggagacagcgtgcggccaggaattctggtgctgattaacgatgccgactgggagctactggtcagtaccttgggggacatccctcccccagcccctgcccttgctgcttcagtgggaaagcgttgggcctctcctcaggcacatatagagtggctgggtaatcctccgccccactccagccccacactgaggctgctggagtctcccactccaggtgaggaagggatgggtagctggggacatgggagtactcctccatcctgaagatttgcaggttgaggtataggatacccatttttctggtagagtctgtctcttccagagcagccagtcctcagcccctgttctcccaactcctggggtggacctgggaaggtggccctgagggtctcccgctcccctctctcccgcaccagggtgagctggactaccagcttcaggaccaggacagcgtcctcttcatctccactctgcacggcggctgagggcccttctctgggcctgggcacccttagaggggagaacgaagcaatcagacatccccttgggccctgcttccaggtctccctgtcccccttgcctgccttcttccctgctctgtcccctaagctccctccaggcagggaaaagaggccaggtgctaaaaatgagcctttctcaagcacgtgagcagcggaaggcagacaggcgccagagcccagcactcccttttccagcagctgtggtgggggagggttcccctccagtttgtcaagagttgaaggaggctctgtggccaggtgacctggctgccttccactccttgtacctcagtctaaacatggagtggccgctgacaaggcgctccagccccagagccagcgtcttcatggggaagatgaatggacctgagtagctgaaggaaggcccctccctacccaaagactggaggcttctcagcctcaatttccctgtctgtacagctgagggctctgcctgtcccccactgctatcagtatggaaccccagctggggtcccctattgagtgccgactccccccaccgccagcagctgctcctccagccacacccctcctgctccccccacccctagcccttgaccctggctggcctgccccgctccacaggccaccagatgggctcctgagaccctccccaggctgcttacagctcattctgctgggggtagagatgaggggagggagtaagttaaaccttggactagcaagtagaagcctggggggatgcgtgtgcctcagtttcctcctccacaactgaatatagtggctgaaaactggggagatacttgatggcgcgaatgtccgttttctctcccttcccacctcctgcaggaagcaggacggggcaggcagcacctggtaggcacagtgctttgcccctcctccccttcccttctggaagtcttggggcctcagtgcttgcaacagccggccttgggcaaataaaagactaggttgtttacta

SEQ ID NO: 427572 - DNA, 930 bp, Homo sapiens
cccggaaatttgcgggcgcgccggaagttgaggggagtttcctgcgagctcggcttcctcaacatggctgcgcccttgtcagtggaggtggagttcggaggtggtgcggagctcctgtttgacggtattaagaaacatcgagtcactttgcctggacaggaggaaccctgggacatccggaacctgctcatctggatcaagaagaatttgctaaaagagcggccagagttgttcatccagggagacagcgtgcggccaggaattctggtgctgattaacgatgccgactgggagctactgggtgagctggactaccagcttcaggaccaggacagcgtcctcttcatctccactctgcacggcggctgagggcccttctctgggcctgggcacccttagaggggagaacgaagcaatcagacatcccccactgctatcagtatggaaccccagctggggtcccctattgagtgccgactccccccaccgccagcagctgctcctccagccacacccctcctgctccccccacccctagcccttgaccctggctggcctgccccgctccacaggccaccagatgggctcctgagaccctccccaggctgcttacagctcattctgctgggggtagagatgaggggagggagtaagttaaaccttggactagcaagtagaagcctggggggatgcgtgtgcctcagtttcctcctccacaactgaatatagtggctgaaaactggggagatacttgatggcgcgaatgtccgttttctctcccttcccacctcctgcaggaagcaggacggggcaggcagcacctggtaggcacagtgctttgcccctcctccccttcccttctggaagtcttggggcctcagtgcttgcaacagccggccttgggcaaataaaagactaggttgtttacta

SEQ ID NO: 427573 - DNA, 1057 bp, Homo sapiens
cccggaaatttgcgggcgcgccggaagttgaggggagtttcctgcgagctcggcttcctcaacatggctgcgcccttgtcagtggaggtggagttcgggagctcacctggctgtctttttctctggtcctcctttgcagaggtggtgcggagctcctgtttgacggtattaagaaacatcgagtcactttgcctggacaggaggaaccctgggacatccggaacctgctcatctggatcaagaagaatttgctaaaagagcggccagagttgttcatccagggagacagcgtgcggccaggaattctggtgctgattaacgatgccgactgggagctactgggtgagctggactaccagcttcaggaccaggacagcgtcctcttcatctccactctgcacggcggctgagggcccttctctgggcctgggcacccttagaggggagaacgaagcaatcagacatccccttgggccctgcttccaggtctccctgtcccccttgcctgccttcttccctgctctgtcccctaagctccctccaggcagggaaaagaggccaggtgctaaaaatgagcctttctcaagcacgtgagcagcggaaggcagacaggcgccagagcccagcactcccttttccagcagtcctgctccccccacccctagcccttgaccctggctggcctgccccgctccacaggccaccagatgggctcctgagaccctccccaggctgcttacagctcattctgctgggggtagagatgaggggagggagtaagttaaaccttggactagcaagtagaagcctggggggatgcgtgtgcctcagtttcctcctccacaactgaatatagtggctgaaaactggggagatacttgatggcgcgaatgtccgttttctctcccttcccacctcctgcaggaagcaggacggggcaggcagcacctggtaggcacagtgctttgcccctcctccccttcccttctggaagtcttggggcctcagtgcttgcaacagccggccttgggcaaataaaagactaggttgtttacta

SEQ ID NO: 427574 - DNA, 506 bp, Homo sapiens
tcggctagtacgaggctgggtttaatcggccgaggctcaacatggctgctgcccttgtcagtggaggtggagttcggaggtggtgcggagctcctgtttgacggtattaagaaacatcgagtcactttgcctggacaggaggaaccctgtgagtattggctttctgaacccctctcttggggccattgaacaggagttggtccatggggaacactcagccccgttcaggcctgtgttctgcatccgtgtgctaagctgcctctctagcaggcagaggaataaaaacaagagtctacacggctgggccggtggctcatgcctgtaatcccagcactttgggaggccaaggtgggtggatcacaaggtcaggagttcgagaccagcctggccaacatggtgaaatcctgtctctattaaaaatacaaaaattagctgggcatggtggcgcgtgcatgtaatcccagctactcaggaggctgaggcaggagaattgcttgaaccggaac

SEQ ID NO: 427575 - DNA, 466 bp, Homo sapiens
cccggaaatttgcgggcgcgccggaagttgaggggagtttcctgcgagctcggcttcctcaacatggctgcgcccttgtcagtggaggtggagttcgggtgagtcacagagctggggcgccgtggggatggattgaagtcgtcgggcccagaattcctttccttctgccgtggggcctgacacggccgaatcactgggtgtcccagtgcccgctgtgagctacgctacccgcctaggagagtctgagaggccagtctctcttggcagtgaggccgtctgtccggaaatagaggcgcacattgggagggaaatgctctctgtgtaccactcggtgccctgtgctccgccggagtcggaggtcgtgactgttagcaggcagcctctctctcttcttttccattcctatctcggaccaatcccatctgtttggcatctgagctcctagaacctagaaggaccaccctcc

SEQ ID NO: 427576 - DNA, 1369 bp, Homo sapiens
cccggaaatttgcgggcgcgccggaagttgaggggagtttcctgcgagctcggcttcctcaacatggctgcgcccttgtcagtggaggtggagttcggaggtggtgcggagctcctgtttgacggtattaagaaacatcgagtcactttgcctggacaggaggaaccctgggacatccggaacctgctcatctggatcaagaagaatttgctaaaagagcggccagagttgttcatccagggagacagcgtgcggccaggaattctggtgctgattaacgatgccgactgggagctactgggtgagctggactaccagcttcaggaccaggacagcgtcctcttcatctccactctgcacggcggctgagggcccttctctgggcctgggcacccttagaggggagaacgaagcaatcagacatccccttgggccctgcttccaggtctccctgtcccccttgcctgccttcttccctgctctgtcccctaagctccctccaggcagggaaaagaggccaggtgctaaaaatgagcctttctcaagcacgtgagcagcggaaggcagacaggcgccagagcccagcactcccttttccagcagctgtggtgggggagggttcccctccagtttgtcaagagttgaaggaggctctgtggccaggtgacctggctgccttccactccttgtacctcagtctaaacatggagtggccgctgacaaggcgctccagccccagagccagcgtcttcatggggaagatgaatggacctgagtagctgaaggaaggcccctccctacccaaagactggaggcttctcagcctcaatttccctgtctgtacagctgagggctctgcctgtcccccactgctatcagtatggaaccccagctggggtcccctattgagtgccgactccccccaccgccagcagctgctcctccagccacacccctcctgctccccccacccctagcccttgaccctggctggcctgccccgctccacaggccaccagatgggctcctgagaccctccccaggctgcttacagctcattctgctgggggtagagatgaggggagggagtaagttaaaccttggactagcaagtagaagcctggggggatgcgtgtgcctcagtttcctcctccacaactgaatatagtggctgaaaactggggagatacttgatggcgcgaatgtccgttttctctcccttcccacctcctgcaggaagcaggacggggcaggcagcacctggtaggcacagtgctttgcccctcctccccttcccttctggaagtcttggggcctcagtgcttgcaacagccggccttgggcaaataaaagactaggttgtttacta

SEQ ID NO: 427577 - DNA, 1393 bp, Homo sapiens
cccggaaatttgcgggcgcgccggaagttgaggggagtttcctgcgagctcggcttcctcaacatggctgcgcccttgtcagtggaggtggagttcggaggtggtgcggagctcctgtttgacggtattaagaaacatcgagtcactttgcctggacaggaggaaccctgggacatccggaacctgctcatctggatcaagaagaatttgctaaaagagcggccagagttgttcatccagggagacagcgtgcggccaggaattctggtgctgattaacgatgccgactgggagctactgggtgagctggactaccagcttcaggaccaggacagcgtcctcttcatctccactctgcacggcggctgagggcccttctctgggcctgggcacccttagaggggagaacgaagcaatcagacatccccttgggccctgcttccaggtctccctgtcccccttgcctgccttcttccctgctctgtcccctaagctccctccaggcagggaaaagaggccaggtgctaaaaatgagcctttctcaagcacgtgagcagcggaaggcagacaggcgccagagcccagcactcccttttccagcagctgtggtgggggagggttcccctccagtttgtcaagagttgaaggaggctctgtggccaggtgacctggctgccttccactccttgtacctcagtctaaacatggagtggccgctgacaaggcgctccagccccagagccagcgtcttcatggggaagatgaatggacctgagtagctgaaggaaggcccctccctacccaaagactggaggcttctcagcctcaatttccctgtctgtacagctgagggctctgcctgtcccccactgctatcagtatggaaccccagctggggtcccctattgagtgccgactccccccaccgccagcagctgctcctccagccacacccctcctgctccccccacccctagcccttgaccctggctggcctgccccgctccacaggccaccagatgggctcctgagaccctccccaggctgcttacagctcattctgctgggggtagagatgaggggagggagtaagttaaaccttggactagcaagtagaagcctggggggatgcgtgtgcctcagtttcctcctccacaactgaatatagtggctgaaaactggggagatacttgatggcgcgaatgtccgttttctctcccttcccacctcctgcaggaagcaggacggggcaggcagcacctggtaggcacagtgctttgcccctcctccccttcccttctggaagtcttggggcctcagtgcttgcaacagccggccttgggcaaataaaagactaggttgtttactaaaaaaaaaaaaacacaacaacaaa

SEQ ID NO: 427578 - DNA, 1410 bp, Homo sapiens
cccggaaatttgcgggcgcgccggaagttgaggggagtttcctgcgagctcggcttcctcaacatggctgcgcccttgtcagtggaggtggagttcgggagctcacctggctgtctttttctctggtcctcctttgcagaggtggtgcggagctcctgtttgacggtattaagaaacatcgagtcactttgcctggacaggaggaaccctgggacatccggaacctgctcatctggatcaagaagaatttgctaaaagagcggccagagttgttcatccagggagacagcgtgcggccaggaattctggtgctgattaacgatgccgactgggagctactgggtgagctggactaccagcttcaggaccaggacagcgtcctcttcatctccactctgcacggcggctgagggcccttctctgggcctgggcacccttagaggggagaacgaagcaatcagacatccccttgggccctgcttccaggtctccctgtcccccttgcctgccttcttccctgctctgtcccctaagctccctccaggcagggaaaagaggccaggtgctaaaaatgagcctttctcaagcacgtgagcagcggaaggcagacaggcgccagagcccagcactcccttttccagcagctgtggtgggggagggttcccctccagtttgtcaagagttgaaggaggctctgtggccaggtgacctggctgccttccactccttgtacctcagtctaaacatggagtggccgctgacaaggcgctccagccccagagccagcgtcttcatggggaagatgaatggacctgagtagctgaaggaaggcccctccctacccaaagactggaggcttctcagcctcaatttccctgtctgtacagctgagggctctgcctgtcccccactgctatcagtatggaaccccagctggggtcccctattgagtgccgactccccccaccgccagcagctgctcctccagccacacccctcctgctccccccacccctagcccttgaccctggctggcctgccccgctccacaggccaccagatgggctcctgagaccctccccaggctgcttacagctcattctgctgggggtagagatgaggggagggagtaagttaaaccttggactagcaagtagaagcctggggggatgcgtgtgcctcagtttcctcctccacaactgaatatagtggctgaaaactggggagatacttgatggcgcgaatgtccgttttctctcccttcccacctcctgcaggaagcaggacggggcaggcagcacctggtaggcacagtgctttgcccctcctccccttcccttctggaagtcttggggcctcagtgcttgcaacagccggccttgggcaaataaaagactaggttgtttacta

SEQ ID NO: 427579 - DNA, 1225 bp, Homo sapiens
gttcgatctgtgcatccctttccacgggacatccggaacctgctcatctggatcaagaagaatttgctaaaagagcggccagagttgttcatccagggagacagcgtgcggccaggaattctggtgctgattaacgatgccgactgggagctactgggtgagctggactaccagcttcaggaccaggacagcgtcctcttcatctccactctgcacggcggctgagggcccttctctgggcctgggcacccttagaggggagaacgaagcaatcagacatccccttgggccctgcttccaggtctccctgtcccccttgcctgccttcttccctgctctgtcccctaagctccctccaggcagggaaaagaggccaggtgctaaaaatgagcctttctcaagcacgtgagcagcggaaggcagacaggcgccagagcccagcactcccttttccagcagctgtggtgggggagggttcccctccagtttgtcaagagttgaaggaggctctgtggccaggtgacctggctgccttccactccttgtacctcagtctaaacatggagtggccgctgacaaggcgctccagccccagagccagcgtcttcatggggaagatgaatggacctgagtagctgaaggaaggcccctccctacccaaagactggaggcttctcagcctcaatttccctgtctgtacagctgagggctctgcctgtcccccactgctatcagtatggaaccccagctggggtcccctattgagtgccgactccccccaccgccagcagctgctcctccagccacacccctcctgctccccccacccctagcccttgaccctggctggcctgccccgctccacaggccaccagatgggctcctgagaccctccccaggctgcttacagctcattctgctgggggtagagatgaggggagggagtaagttaaaccttggactagcaagtagaagcctggggggatgcgtgtgcctcagtttcctcctccacaactgaatatagtggctgaaaactggggagatacttgatggcgcgaatgtccgttttctctcccttcccacctcctgcaggaagcaggacggggcaggcagcacctggtaggcacagtgctttgcccctcctccccttcccttctggaagtcttggggcctcagtgcttgcaacagccggccttgggcaaataaaagactaggttgtttacta

SEQ ID NO: 427580 - DNA, 1725 bp, Homo sapiens
cccggaaatttgcgggcgcgccggaagttgaggggagtttcctgcgagctcggcttcctcaacatggctgcgcccttgtcagtggaggtggagttcggaggtggtgcggagctcctgtttgacggtattaagaaacatcgagtcactttgcctggacaggaggaaccctgggacatccggaacctgctcatctggatcaagaagaatttgctaaaagagcggccagagttgttcatccagggagacagcgtgcggccaggaattctggtgctgattaacgatgccgactgggagctactggtcagtaccttgggggacatccctcccccagcccctgcccttgctgcttcagtgggaaagcgttgggcctctcctcaggcacatatagagtggctgggtaatcctccgccccactccagccccacactgaggctgctggagtctcccactccaggtgaggaagggatgggtagctggggacatgggagtactcctccatcctgaagatttgcaggttgaggtataggatacccatttttctggtagagtctgtctcttccagagcagccagtcctcagcccctgttctcccaactcctggggtggacctgggaaggtggccctgagggtctcccgctcccctctctcccgcaccagggtgagctggactaccagcttcaggaccaggacagcgtcctcttcatctccactctgcacggcggctgagggcccttctctgggcctgggcacccttagaggggagaacgaagcaatcagacatccccttgggccctgcttccaggtctccctgtcccccttgcctgccttcttccctgctctgtcccctaagctccctccaggcagggaaaagaggccaggtgctaaaaatgagcctttctcaagcacgtgagcagcggaaggcagacaggcgccagagcccagcactcccttttccagcagctgtggtgggggagggttcccctccagtttgtcaagagttgaaggaggctctgtggccaggtgacctggctgccttccactccttgtacctcagtctaaacatggagtggccgctgacaaggcgctccagccccagagccagcgtcttcatggggaagatgaatggacctgagtagctgaaggaaggcccctccctacccaaagactggaggcttctcagcctcaatttccctgtctgtacagctgagggctctgcctgtcccccactgctatcagtatggaaccccagctggggtcccctattgagtgccgactccccccaccgccagcagctgctcctccagccacacccctcctgctccccccacccctagcccttgaccctggctggcctgccccgctccacaggccaccagatgggctcctgagaccctccccaggctgcttacagctcattctgctgggggtagagatgaggggagggagtaagttaaaccttggactagcaagtagaagcctggggggatgcgtgtgcctcagtttcctcctccacaactgaatatagtggctgaaaactggggagatacttgatggcgcgaatgtccgttttctctcccttcccacctcctgcaggaagcaggacggggcaggcagcacctggtaggcacagtgctttgcccctcctccccttcccttctggaagtcttggggcctcagtgcttgcaacagccggccttgggcaaataaaagactaggttgtttacta

SEQ ID NO: 427581 - DNA, 1059 bp, Homo sapiens
cccggaaatttgcgggcgcgccggaagttgaggggagtttcctgcgagctcggcttcctcaacatggctgcgcccttgtcagtggaggtggagttcggaggtggtgcggagctcctgtttgacggtattaagaaacatcgagtcactttgcctggacaggaggaaccctgggacatccggaacctgctcatctggatcaagaagaatttgctaactaaaaatgagcctttctcaagcacgtgagcagcggaaggcagacaggcgccagagcccagcactcccttttccagcagctgtggtgggggagggttcccctccagtttgtcaagagttgaaggaggctctgtggccaggtgacctggctgccttccactccttgtacctcagtctaaacatggagtggccgctgacaaggcgctccagccccagagccagcgtcttcatggggaagatgaatggacctgagtagctgaaggaaggcccctccctacccaaagactggaggcttctcagcctcaatttccctgtctgtacagctgagggctctgcctgtcccccactgctatcagtatggaaccccagctggggtcccctattgagtgccgactccccccaccgccagcagctgctcctccagccacacccctcctgctccccccacccctagcccttgaccctggctggcctgccccgctccacaggccaccagatgggctcctgagaccctccccaggctgcttacagctcattctgctgggggtagagatgaggggagggagtaagttaaaccttggactagcaagtagaagcctggggggatgcgtgtgcctcagtttcctcctccacaactgaatatagtggctgaaaactggggagatacttgatggcgcgaatgtccgttttctctcccttcccacctcctgcaggaagcaggacggggcaggcagcacctggtaggcacagtgctttgcccctcctccccttcccttctggaagtcttggggcctcagtgcttgcaacagccggccttgggcaaataaaagactaggttgtttacta

SEQ ID NO: 427582 - DNA, 573 bp, Homo sapiens
tcggctagtacgaggctgggtttaatcggccgaggctcaacatggctgctgcccttgtcagtggaggtggagttcggaggtggtgcggagctcctgtttgacggtattaagaaacatcgagtcactttgcctggacaggaggaaccctgggacatccggaacctgctcatctggatcaagaagaatttgctaagctggcctgccccgctccacaggccaccagatgggctcctgagaccctccccaggctgcttacagctcattctgctgggggtagagatgaggggagggagtaagttaaaccttggactagcaagtagaagcctggggggatgcgtgtgcctcagtttcctcctccacaactgaatatagtggctgaaaactggggagatacttgatggcgcgaatgtccgttttctctcccttcccacctcctgcaggaagcaggacggggcaggcagcacctggtaggcacagtgctttgcccctcctccccttcccttctggaagtcttggggcctcagtgcttgcaacagccggccttgggcaaataaaagactaggttgtttacta

SEQ ID NO: 427583 - DNA, 773 bp, Homo sapiens
gcgaattcactagtgattatccccggttcctgggtaggccccctgttcctatttacaggatccataaagagactcaaagagatagggtagtgccagccccagagagagggggctgtggagggacttctacccccagggcttctcagtggcatctcctggctggcccctgacactcaatcttccttggtttccaagatgcttcatgatcttccccctccctgacatccccgacctcccttttctgtcccttttgcaactcattgtcctctacctgccatcagatgtggctgttcctcagtctcagtccagagtcctctcttctcactcagcatctctcctcctgtgacctcgtctgcacccacaactccagttacaaggcacgaggtttggttatgaaatcactcacagatttataactgcaggcttggctccttccgggagcttgagacccactgccgcctccgcaacacctccacctgggagtttcagaggcgctctccctcagcgtgtctgcagctgcgtgcctgcagctgcgtgcctgccttctccctgcacctgctctgctccccaggtccctttctcagaccaaagcctgcccgggcttcacaggctgagggtccaccttgccacctccgtttgcctcagtcctcatggagccctggctccactgtctgctggcttctccccatctactctgtgtcactccatccgaccaccattgtctccatcaggacagttggaacacctcttctcagcactctcgcccccaccca

SEQ ID NO: 427584 - DNA, 1108 bp, Homo sapiens
agaacgggtgaaaagccaggcctcaagcccacactactgacactgcactacaccacctctcaggagagaaggcaaatatttccttgactcagccaccttcctcctagcaaggcttagacccccaggctctgggggtcccttcctgctacagtatgaccctctctggtgcttgtcatcaagaagtggtatgcggtggacttgctggagagagtgtctgcagccaggcatcatggagggagggatggatcttgagggactgtaatggttgtgaatgggggagttggcccccagcactctctggtggccgtatgaccttgggcacgtctcctgaccactctaagcagcttttgattcccctgtccaagagggtaggccccctgttcctatttacaggatccataaagagactcaaagagatagggtagtgccagccccagagagagggggctgtggagggacttctacccccagggcttctcagtggcatctcctggctggcccctgacactcaatcttccttggtttccaagatgcttcatgatcttccccctccctgacatccccgacctcccttttctgtcccttttgcaactcattgtcctctacctgccatcagatgtggctgttcctcagtctcagtccagagtcctctcttctcactcagcatctctcctcctgtgacctcgtctgcacccacaactccagttacaaggcacgaggtttggttatgaaatcactcacagatttataactgcaggcttggctccttccgggagcttgagacccactgccgcctccgcaacacctccacctgggagtttcagaggcgctctccctcagcgtgtctgcagctgcgtgcctgcagctgcgtgcctgccttctccctgcacctgctctgctccccaggtccctttctcagaccaaagcctgcccgggcttcacaggctgagggtccaccttgccacctccgtttgcctcagtcctcatggagccctggctccactgtctgctggcttctccccatctactctgtgtcactccatccgaccaccattgtctccatcaggacagttggaacacctcttctcagcactctcgcccccaccca

SEQ ID NO: 427585 - DNA, 650 bp, Homo sapiens
tccctcatgggttctgcaggatgaaggaaaggaaaggaaaagacagagaaaggaaggaaatagcttttcatgagcacctactgtgtaccaggtgcttccctggcatgagctctcgtaacccttatagcaacatgagtttagagcaagaatcacaccccgactttacagagatggaaactgaggctcagagaagtaagggacctgcccaaggccactcagcacctagaaagtgtgcctagcacataggaggcacacaaaaatatgtgttgaatgggtgaatgaatgagagaacgggtgaaaagccaggcctcaagcccacactactgacactgcactacaccacctctcaggagagaaggcaaatatttccttgactcagccaccttcctcctagcaaggcttagacccccaggctctgggggtcccttcctgctacagtatgaccctctctggtgcttgtcatcaagaagtggtatgcggtggacttgctggagagagtgtctgcagccaggcatcatggagggagggatggatcttgagggactgtaatggttgtgaatgggggagttggcccccagcactctctggtggccgtatgaccttgggcacgtctcctgaccactctaagcagcttttgattcccctgtcca

SEQ ID NO: 427586 - DNA, 607 bp, Homo sapiens
aagttgttgccgctggcttccggtcccctgagactggggcctcgctcgctcccgacccggttgcaagtgttgcggtgggagaaagtcgcgtccgcatcggaggggaagcgccgtcatgcctaagtattatgaggacaagccgcagggcggcgcgtgcgcgggcctgaaggaggacctgggcgcgtgtctgctgcagtcggactgtgtggtccaggaaggaaaatcacctcggcagtgtttgaaggaaggatactgcaactctttgaagtacgcattttttgagtgtaaaagatcagtgttggataacagggcaagattcagaggaagaaaaggatattgatgcattatgttgaagccaacatggaaaacaacaaatattttccctggtcattaacacaaagaagccaaaacaggaaacatactttttactacatctgtttggttggaccagatttcccctccgtggaacactgaagaaagtggatgagttgttttcgaatatgtataaagtaaatgattctcttgatccaagttatttttagaagaaaaacctaattgaacaggtatgggttgggagcataataaatgtgttttgagaattgttcta

SEQ ID NO: 427587 - DNA, 514 bp, Homo sapiens
attcggcacgacgcggctttttaaatgaccccaggcctcgctaaaaataagcggcggcgcgtgcgcgggcctgaaggaggacctgggcgcgtgtctgctgcagtcggactgtgtggtccaggaaggaaaatcacctcggcagtgtttgaaggaaggatactgcaactctttgaagtacgcattttttgagtgtaaaagatcagtgttggataacagggcaagattcagaggaagaaaaggatattgatgcattatgttgaagccaacatggaaaacaacaaatattttccctggtcattaacacaaagaagccaaaacaggaaacatactttttactacatctgtttggttggaccagatttcccctccgtggaacactgaagaaagtggatgagttgttttcgaatatgtataaagtaaatgattctcttgatccaagttatttttagaagaaaaacctaattgaacaggtatgggttgggagcataataaatgtgttttgagaattgttcta

SEQ ID NO: 427588 - DNA, 2339 bp, Homo sapiens
atggcaggttggtgctgtagtctcttcttgccagtctttaacccacctgaaacctgcagcacctcgctctagggaggaattcaacataaacatgtatttagttctaggtgctgctttgggagactgtcaaggagttagagggcctcagagaaactcagggtaatggtaaggatgtaaattccagtggggctggaggaaagcagggaaaaagcagattcaaaaggcatctcttgaagagacttcttaggatttaatgactcctggatgatcaggacaatgaaactctgccagaggaacttcactcatcatagggtatcttcgtctccactaacagcttccagatccactgactcttcatcagaatcacctagaagtggtgtggctttttaaaagtacagattccactgctgccctcaccctacccccaataagttaaaagtttctttcctaggttggttttgggcacagccatgtttgagagcactgactgatcttgacctcagaaggcaaaaaagcttgggagtgtattagttagaatatagattcaagtgcatgttacagagacccagaataatagtggcttaaacgagatagagaactttctcttttgtccttgtgcctataatcagggcctagtcatttccctcagtcttccatgaacacagacactgttgatcttgtgactctgtgctgtgaaaataggaaaatatagcaagtagggtgttactctcatattcatggtccaagactggtttgcttccacatcatcaggcccggcaaccttatggagtgaagtgaggaaaggggcaagcctctttaaggaccaacccagaagttctacacctgtttcccacacattccagtggctagaacttagtcacaggaccacagctagatgcaagggcgtctaggagatctcacccagccatatgctggataaaaaggaagagcagacagctagcagtctgttatttggggtggagtggataacgaatgactgtctcttagctttagtgtatctagatggatctttaccccaggcagttgacaatataggttgaaagcttttgaaaaaggtagcatcttagatacagtttgaagaggcatcagcttataaactatagttataaccttttatatggttagtcttcttttgtctgcctccacgtcgttcatgtgggcaacacatcccaccagcagaattgcagagtttggagaggaaggaaacctgctactcttatccacttttgagagtcactgaggtagatgacatttgatatctaggacccaggcagacatacagactggaaggtggccaagactcctggggaacaggaataccacagacatagtaccctgtagcttttcataggaaaaactggcagagcgtgcctggcacttgcaacataaaggttctggggagtggctgcagtgatgcggctgtagagtcaaaatctgcttgagggaaaatccctgattatgcagagcagatgagctttgggttatattttttctggtgcatgaatgggccacatgtttctatttaagtagtattccagcctgccttgttaatatctttgtgaagtgtttcgtgccaacactaaaaatattctgattttagggtacccagttcacacatttcacccataaggaaatgaagataaccctttctagatttttatataaacagtttaaggaaaagtatccaatagaaaccagtgttttcaagaattcaacagtgtccttaaagttcccaagttactttacaatttttttttcattctttaggcaccaatagcccaaatgaattaagaactatttcctacataactttctattttcctcctttaacacttttaaaaaggactattttcagaaggacaattattttgtactttgtgagaaaatttccaaggtgtttatattgttttatgtgtctgtcataggaaggaaaatcacctcggcagtgtttgaaggaaggatactgcaactctttgaagtacgcattttttgagtgtaaaagatcagtgttggataacagggcaagattcagaggaagaaaaggatattgatgcattatgttgaagccaacatggaaaacaacaaatattttccctggtcattaacacaaagaagccaaaacaggaaacatactttttactacatctgtttggttggaccagatttcccctccgtggaacactgaagaaagtggatgagttgttttcgaatatgtataaagtaaatgattctcttgatccaagttatttttagaagaaaaacctaattgaacaggtatgggttgggagcataataaatgtgttttgagaattgttcta

SEQ ID NO: 427589 - DNA, 1690 bp, Homo sapiens
aagttgttgccgctggcttccggtcccctgagactggggcctcgctcgctcccgacccggttgcaagtgttgcggtgggagaaagtcgcgtccgcatcggaggggaagcgccgtcatgcctaagtattatgaggacaagccgcagggcggcgcgtgcgcgggcctgaaggaggacctgggcgcgtgtctgctgcagtcggactgtgtggtccaggaaggaaaatcacctcggcagtgtttgaaggaaggatactgcaactctttgaagtacgcattttttgagtgtaaaagatcagtgttggataacagggcaagattcagaggaagaaaaggatattgatgcattatgttgaagccaacatggaaaacaacaaatattttccctggtcattaacacaaagaagccaaaacaggaaacatactttttactacatctgtttggttggaccagatttcccctccgtggaacactgaagaaagtggatgagttgttttcgaatatgtataaagtaaatgattctcttgatccaagttatttttagaagaaaaacctaattgaacaggtatgggttgggagcataataaatgtgttttgagaattgttctaaagcacagaaaatggaaagactgttatttgcaaacttgactcttcaattgaattacccaattagtacaggccactgatttgactgacacagtcgataacatgcagcctatccagaaggtgtctgttgggaaagtttaggataaaactttttctttagttcagtcttttcctgtctagttctaaaatgaattgtgtttgattccttagagaagaaatacttcatttgtgctctgattcactgaagtaataacctcagcactttaatagcgtccacaggcatagctgatgctaggccccagattgtgttgcccaggctctttaccatcatcttcggactgtttttgtttcctggttacattttcagtctggcccgctctacataatgggccagtgtcagctccaagtccacatccttattatccatgattcaaaagggagagagagaacttcctttttcagggtccacaaatcaaatctataaaaggactctggtcttcccaggatcacctgcccttgcattggaccagtccctgtggaagaggggatgggggcctgtgatcttggccaggcctgggctatctatctgcactgtcattgctaactcctgtcagaatcacatggatgagtagtgggctgaatcccaaaaggaaaggggtttagagcaagtggaaacaacagatgttcactatagaaagcaagaatgaaaaccatgaagtggttgaagattagccttacagtaattttattctgatcacttaatacagtagagtcaaacaggaatccaagtttccaactttattatttttggcactgaagaattacaaagaactctagcgtctttatacctccgtggttcactggagttaaagcaatcggggcgttgtacagctcacttgagtttttaaaggttctactaaaaagtgagaattccacagcaatatgggtcattgttgcagaatatcacaaaggtctgttgtgtatactccttttcaccaggaaagggacaataatagtttttttcaatgtatatatatataagtgatctaactttttattaataaaagtaaacaactctaaaatgta

SEQ ID NO: 427590 - DNA, 3422 bp, Homo sapiens
atggcaggttggtgctgtagtctcttcttgccagtctttaacccacctgaaacctgcagcacctcgctctagggaggaattcaacataaacatgtatttagttctaggtgctgctttgggagactgtcaaggagttagagggcctcagagaaactcagggtaatggtaaggatgtaaattccagtggggctggaggaaagcagggaaaaagcagattcaaaaggcatctcttgaagagacttcttaggatttaatgactcctggatgatcaggacaatgaaactctgccagaggaacttcactcatcatagggtatcttcgtctccactaacagcttccagatccactgactcttcatcagaatcacctagaagtggtgtggctttttaaaagtacagattccactgctgccctcaccctacccccaataagttaaaagtttctttcctaggttggttttgggcacagccatgtttgagagcactgactgatcttgacctcagaaggcaaaaaagcttgggagtgtattagttagaatatagattcaagtgcatgttacagagacccagaataatagtggcttaaacgagatagagaactttctcttttgtccttgtgcctataatcagggcctagtcatttccctcagtcttccatgaacacagacactgttgatcttgtgactctgtgctgtgaaaataggaaaatatagcaagtagggtgttactctcatattcatggtccaagactggtttgcttccacatcatcaggcccggcaaccttatggagtgaagtgaggaaaggggcaagcctctttaaggaccaacccagaagttctacacctgtttcccacacattccagtggctagaacttagtcacaggaccacagctagatgcaagggcgtctaggagatctcacccagccatatgctggataaaaaggaagagcagacagctagcagtctgttatttggggtggagtggataacgaatgactgtctcttagctttagtgtatctagatggatctttaccccaggcagttgacaatataggttgaaagcttttgaaaaaggtagcatcttagatacagtttgaagaggcatcagcttataaactatagttataaccttttatatggttagtcttcttttgtctgcctccacgtcgttcatgtgggcaacacatcccaccagcagaattgcagagtttggagaggaaggaaacctgctactcttatccacttttgagagtcactgaggtagatgacatttgatatctaggacccaggcagacatacagactggaaggtggccaagactcctggggaacaggaataccacagacatagtaccctgtagcttttcataggaaaaactggcagagcgtgcctggcacttgcaacataaaggttctggggagtggctgcagtgatgcggctgtagagtcaaaatctgcttgagggaaaatccctgattatgcagagcagatgagctttgggttatattttttctggtgcatgaatgggccacatgtttctatttaagtagtattccagcctgccttgttaatatctttgtgaagtgtttcgtgccaacactaaaaatattctgattttagggtacccagttcacacatttcacccataaggaaatgaagataaccctttctagatttttatataaacagtttaaggaaaagtatccaatagaaaccagtgttttcaagaattcaacagtgtccttaaagttcccaagttactttacaatttttttttcattctttaggcaccaatagcccaaatgaattaagaactatttcctacataactttctattttcctcctttaacacttttaaaaaggactattttcagaaggacaattattttgtactttgtgagaaaatttccaaggtgtttatattgttttatgtgtctgtcataggaaggaaaatcacctcggcagtgtttgaaggaaggatactgcaactctttgaagtacgcattttttgagtgtaaaagatcagtgttggataacagggcaagattcagaggaagaaaaggatattgatgcattatgttgaagccaacatggaaaacaacaaatattttccctggtcattaacacaaagaagccaaaacaggaaacatactttttactacatctgtttggttggaccagatttcccctccgtggaacactgaagaaagtggatgagttgttttcgaatatgtataaagtaaatgattctcttgatccaagttatttttagaagaaaaacctaattgaacaggtatgggttgggagcataataaatgtgttttgagaattgttctaaagcacagaaaatggaaagactgttatttgcaaacttgactcttcaattgaattacccaattagtacaggccactgatttgactgacacagtcgataacatgcagcctatccagaaggtgtctgttgggaaagtttaggataaaactttttctttagttcagtcttttcctgtctagttctaaaatgaattgtgtttgattccttagagaagaaatacttcatttgtgctctgattcactgaagtaataacctcagcactttaatagcgtccacaggcatagctgatgctaggccccagattgtgttgcccaggctctttaccatcatcttcggactgtttttgtttcctggttacattttcagtctggcccgctctacataatgggccagtgtcagctccaagtccacatccttattatccatgattcaaaagggagagagagaacttcctttttcagggtccacaaatcaaatctataaaaggactctggtcttcccaggatcacctgcccttgcattggaccagtccctgtggaagaggggatgggggcctgtgatcttggccaggcctgggctatctatctgcactgtcattgctaactcctgtcagaatcacatggatgagtagtgggctgaatcccaaaaggaaaggggtttagagcaagtggaaacaacagatgttcactatagaaagcaagaatgaaaaccatgaagtggttgaagattagccttacagtaattttattctgatcacttaatacagtagagtcaaacaggaatccaagtttccaactttattatttttggcactgaagaattacaaagaactctagcgtctttatacctccgtggttcactggagttaaagcaatcggggcgttgtacagctcacttgagtttttaaaggttctactaaaaagtgagaattccacagcaatatgggtcattgttgcagaatatcacaaaggtctgttgtgtatactccttttcaccaggaaagggacaataatagtttttttcaatgtatatatatataagtgatctaactttttattaataaaagtaaacaactctaaaatgta

SEQ ID NO: 427591 - DNA, 1769 bp, Homo sapiens
aagttgttgccgctggcttccggtcccctgagactggggcctcgctcgctcccgacccggttgcaagtgttgcggtgggagaaagtcgcgtccgcatcggaggggaagcgccgtcatgcctaagtattatgaggacaagccgcagggcggcgcgtgcgcgggcctgaaggaggacctgggcgcgtgtctgctgcagtcggactgtgtggtccaggaaggaaaatcacctcggcagtgtttgaaggaaggatactgcaactctttgaagtacgcattttttgagtgtaaaagatcagtgttggataacagggcaagattcagaggaagaaaaggatattgatgcattatgttgaagccaacatggaaaacaacaaatattttccctggtcattaacacaaagaagccaaaacaggaaacatactttttactacatctgtttggttggaccagatttcccctccgtggaacactgaagaaagtggatgagttgttttcgaatatgtataaagtaaatgattctcttgatccaagttatttttagaagaaaaacctaattgaacaggtatgggttgggagcataataaatgtgttttgagaattgttctaaagcacagaaaatggaaagactgttatttgcaaacttgactcttcaattgaattacccaattagtacaggccactgatttgactgacacagtcgataacatgcagcctatccagaaggtgtctgttgggaaagtttaggataaaactttttctttagttcagtcttttcctgtctagttctaaaatgaattgtgtttgattccttagagaagaaatacttcatttgtgctctgattcactgaagtaataacctcagcactttaatagcgtccacaggcatagctgatgctaggccccagattgtgttgcccaggctctttaccatcatcttcggactgtttttgtttcctggttacattttcagtctggcccgctctacataatgggccagtgtcagctccaagtccacatccttattatccatgattcaaaagggagagagagaacttcctttttcagggtccacaaatcaaatctataaaaggactctggtcttcccaggatcacctgcccttgcattggaccagtccctgtggaagaggggatgggggcctgtgatcttggccaggcctgggctatctatctgcactgtcattgctaactcctgtcagaatcacatggatgagtagtgggctgaatcccaaaaggaaaggggtttagagcaagtggaaacaacagatgttcactatagaaagcaagaatgaaaaccatgaagtggttgaagattagccttacagtaattttattctgatcacttaatacagtagagtcaaacaggaatccaagtttccaactttattatttttggcactgaagaattacaaagaactctagcgtctttatacctccgtggttcactggagttaaagcaatcggggcgttgtacagctcacttgagtttttaaaggttctactaaaaagtgagaattccacagcaatatgggtcattgttgcagaatatcacaaaggtctgttgtgtatactccttttcaccaggaaagggacaataatagtttttttcaatgtatatatatataagtgatctaactttttattaataaaagtaaacaactctaaaatgtatattataaagccctgtcatctttgttgagtaatagctttattgagctttatttggagaaatacacataccgtaaaattc

SEQ ID NO: 427592 - DNA, 1536 bp, Homo sapiens
aagttgttgccgctggcttccggtcccctgagactggggcctcgctcgctcccgacccggttgcaagtgttgcggtgggagaaagtcgcgtccgcatcggaggggaagcgccgtcatgcctaagtattatgaggacaagccgcagggcggcgcgtgcgcgggcctgaaggaggacctgggcgcgtgtctgctgcagtcggactgtgtggtccaggaaggaaaatcacctcggcagtgtttgaaggaaggatactgcaactctttgaagtacgcattttttgagtgtaaaagatcagtgttggataacagggcaagattcagaggaagaaaaggatattgatgcattatgttgaaagtaaatgattctcttgatccaagttatttttagaagaaaaacctaattgaacaggtatgggttgggagcataataaatgtgttttgagaattgttctaaagcacagaaaatggaaagactgttatttgcaaacttgactcttcaattgaattacccaattagtacaggccactgatttgactgacacagtcgataacatgcagcctatccagaaggtgtctgttgggaaagtttaggataaaactttttctttagttcagtcttttcctgtctagttctaaaatgaattgtgtttgattccttagagaagaaatacttcatttgtgctctgattcactgaagtaataacctcagcactttaatagcgtccacaggcatagctgatgctaggccccagattgtgttgcccaggctctttaccatcatcttcggactgtttttgtttcctggttacattttcagtctggcccgctctacataatgggccagtgtcagctccaagtccacatccttattatccatgattcaaaagggagagagagaacttcctttttcagggtccacaaatcaaatctataaaaggactctggtcttcccaggatcacctgcccttgcattggaccagtccctgtggaagaggggatgggggcctgtgatcttggccaggcctgggctatctatctgcactgtcattgctaactcctgtcagaatcacatggatgagtagtgggctgaatcccaaaaggaaaggggtttagagcaagtggaaacaacagatgttcactatagaaagcaagaatgaaaaccatgaagtggttgaagattagccttacagtaattttattctgatcacttaatacagtagagtcaaacaggaatccaagtttccaactttattatttttggcactgaagaattacaaagaactctagcgtctttatacctccgtggttcactggagttaaagcaatcggggcgttgtacagctcacttgagtttttaaaggttctactaaaaagtgagaattccacagcaatatgggtcattgttgcagaatatcacaaaggtctgttgtgtatactccttttcaccaggaaagggacaataatagtttttttcaatgtatatatatataagtgatctaactttttattaataaaagtaaacaactctaaaatgta

SEQ ID NO: 427593 - DNA, 651 bp, Homo sapiens
aagttgttgccgctggcttccggtcccctgagactggggcctcgctcgctcccgacccggttgcaagtgttgcggtgggagaaagtcgcgtccgcatcggaggggaagcgccgtcatgcctaagtattatgaggacaagccgcagggcggcgcgtgcgcgggcctgaaggaggacctgggcgcgtgtctgctgcagtcggactgtgtggtccaggtagcgcggccgggcgctcccggtggtgacgacccctgtcccaggaaggaaaatcacctcggcagtgtttgaaggaaggatactgcaactctttgaagtacgcattttttgagtgtaaaagatcagtgttggataacagggcaagattcagaggaagaaaaggatattgatgcattatgttgaagccaacatggaaaacaacaaatattttccctggtcattaacacaaagaagccaaaacaggaaacatactttttactacatctgtttggttggaccagatttcccctccgtggaacactgaagaaagtggatgagttgttttcgaatatgtataaagtaaatgattctcttgatccaagttatttttagaagaaaaacctaattgaacaggtatgggttgggagcataataaatgtgttttgagaattgttcta

SEQ ID NO: 427594 - DNA, 1734 bp, Homo sapiens
aagttgttgccgctggcttccggtcccctgagactggggcctcgctcgctcccgacccggttgcaagtgttgcggtgggagaaagtcgcgtccgcatcggaggggaagcgccgtcatgcctaagtattatgaggacaagccgcagggcggcgcgtgcgcgggcctgaaggaggacctgggcgcgtgtctgctgcagtcggactgtgtggtccaggtagcgcggccgggcgctcccggtggtgacgacccctgtcccaggaaggaaaatcacctcggcagtgtttgaaggaaggatactgcaactctttgaagtacgcattttttgagtgtaaaagatcagtgttggataacagggcaagattcagaggaagaaaaggatattgatgcattatgttgaagccaacatggaaaacaacaaatattttccctggtcattaacacaaagaagccaaaacaggaaacatactttttactacatctgtttggttggaccagatttcccctccgtggaacactgaagaaagtggatgagttgttttcgaatatgtataaagtaaatgattctcttgatccaagttatttttagaagaaaaacctaattgaacaggtatgggttgggagcataataaatgtgttttgagaattgttctaaagcacagaaaatggaaagactgttatttgcaaacttgactcttcaattgaattacccaattagtacaggccactgatttgactgacacagtcgataacatgcagcctatccagaaggtgtctgttgggaaagtttaggataaaactttttctttagttcagtcttttcctgtctagttctaaaatgaattgtgtttgattccttagagaagaaatacttcatttgtgctctgattcactgaagtaataacctcagcactttaatagcgtccacaggcatagctgatgctaggccccagattgtgttgcccaggctctttaccatcatcttcggactgtttttgtttcctggttacattttcagtctggcccgctctacataatgggccagtgtcagctccaagtccacatccttattatccatgattcaaaagggagagagagaacttcctttttcagggtccacaaatcaaatctataaaaggactctggtcttcccaggatcacctgcccttgcattggaccagtccctgtggaagaggggatgggggcctgtgatcttggccaggcctgggctatctatctgcactgtcattgctaactcctgtcagaatcacatggatgagtagtgggctgaatcccaaaaggaaaggggtttagagcaagtggaaacaacagatgttcactatagaaagcaagaatgaaaaccatgaagtggttgaagattagccttacagtaattttattctgatcacttaatacagtagagtcaaacaggaatccaagtttccaactttattatttttggcactgaagaattacaaagaactctagcgtctttatacctccgtggttcactggagttaaagcaatcggggcgttgtacagctcacttgagtttttaaaggttctactaaaaagtgagaattccacagcaatatgggtcattgttgcagaatatcacaaaggtctgttgtgtatactccttttcaccaggaaagggacaataatagtttttttcaatgtatatatatataagtgatctaactttttattaataaaagtaaacaactctaaaatgta

SEQ ID NO: 427595 - DNA, 682 bp, Homo sapiens
agctgccggagcgggtcgcgccggaggggggcggaggcggaagtggcggtgccgggcccggggagtaggaaggagccggggctgtagccggagtggagcggctgccagccgaggagcaggcgcggccgcggcgccatattgcggccctcagcggccgcgaccgagtcatggctgagacctacggtgagggtggtggacgaagctggggtcctgggtctgggcccagggaggatgcggcctgtgggaatgggcggggctttgtagatcagggggcggggtctggtgtgatggaggcaggacctaagtggatgctgggaggggtttagtgggtctgaggctgagcttaatcgatttaggtggagcctgagggtctggtgcgtgggttaaatagatctggggcgggatttgagggagctggtcctgaggggttcagggaggccctgagggaagaggtgggccttaatggatctgggcggagcctgagtgaaggggcggggctgactgcatgaatggcaggagtcgggcttatgggctagagggaacactgaatggaagctcgggaccctggggctgatctggctggagagagctctggaatgggtttggggatgggctgtccttgagttaggggcaggacttagtggctcttaaaggggatgggagctggccctcgttccgaatt

SEQ ID NO: 427596 - DNA, 1198 bp, Homo sapiens
agctgccggagcgggtcgcgccggaggggggcggaggcggaagtggcggtgccgggcccggggagtaggaaggagccggggctgtagccggagtggagcggctgccagccgaggagcaggcgcggccgcggcgccatattgcggccctcagcggccgcgaccgagtcatggctgagacctacgacttcctcttcaaattcctggtgattggcagtgcaggaactggcaaatcatgtctccttcatcagttcattgagaataagttcaaacaggactccaaccacacaatcggcgtggagtttggatcccgggtggtcaacgtgggtgggaagactgtgaagctacagatttgggacacggctggccaggagcggtttcggtcagtgacgcggagttattaccgaggggcggctggagccctgctggtgtacgacatcaccagccgggagacatacaactcactggctgcctggctgacggatgcccgcaccctggccagccccaacatcgtggtcatcctctgtggcaacaagaaggacctggaccctgagcgggaggtcactttcctggaggcctcccgctttgcccaggagaatgagctgatgttcctggagaccagcgctctcacaggcgagaacgtggaggaggcgttcctcaagtgtgcccgcactatcctcaacaagattgactcaggcgagctagacccggagaggatgggctctggcattcagtacggggatgcgtccctccgccagcttcggcagcctcggagtgcccaggccgtggcccctcagccgtgtggctgctgagctctgtggagccagctcacctgttctccaggaccagccctgctggggcccaggcccaggctctgagaggccgtgtcctaacctgccctggccccggagaagctacgttgccacctgtcccccttccctggcctggtggggcctggctttggggcaagactgagccacgggggaagggggaatcccgtacctgctgctgcttcctctgtcttggctaacgtctgtccccctgaacccctaaccatatcccaagagctcccaaagcctgagaccagggtcatttgtccccaactccccatctggccctgctgttgctagtacctgttatttattacctggaggcctgtccagcacccaccctacccccataaagcattgtttacacctgt

SEQ ID NO: 427597 - DNA, 1733 bp, Homo sapiens
tgcaagtataaactcatttgaaaacattgtgttggccaaaccacccacatctggtggcttgagatctgcctgtgttcccctgttttgcaacctccaggtttaaaggaggttttgccatcagagaggtgtgggtgtgaattcagctctgattttctgactgtggggccttgtcatgctgctgatgggtagactctggttggcctgttcctgtcctagatggtgctagagacacagtgttggagacagccctaggcccaaccttcatggagctcacagttcagtgggtgagggtggaaggacagacccacttccagacagtgacacctcaggaaggtcagggcttgatggtgaagcaccgggagacaggggtcagagccagcaggggagagccccagagggtcagggccagtactgggggggcaggcagagggatcggggtgggatggagaacacaggcagaggggtcagggctgggatagggcaggcagaggcagaggggtcagttgggatgaggggacacaggcagaggagttacatgggatggggggcaagggcagaggggttggggtgggatggggggcccaggtagaggggtcaaggccaagtttgggaggcacaggcagagcggttgcatgggatgggggagcatgggcagagggctcaggggtggaatggggcaggcctaggcagaagggtcaggggtggaatggggcaggtccaggcagaagggtcaggaaaggaatggggcaggcccaggcagaagggtcaggggtgggatggggacccaggcagagggttggggccaggatgaggaagcacaagcagtggggtcagggccaggatagggggccacaagaagctgtgggagccctaagtcggtacctgactcagcccaggaagtcagggaggacttcttggaggaggagctgtgtgagctgagctctgaaggaagagctgggtgggcatatcgggaagcggacattagtggcagggaaatggcatgcgcagaggcctgaggtgagggtaaggggggatggaacattggaggaacaggatgagagtcagcaggtgagagctcagtggagggtggggactaactggggccctgacctcagagtgtgtgcccctgcagagctgatgttcctggagaccagcgctctcacaggcgagaacgtggaggaggcgttcctcaagtgtgcccgcactatcctcaacaagattgactcaggcgagctagacccggagaggatgggctctggcattcagtacggggatgcgtccctccgccagcttcggcagcctcggagtgcccaggccgtggcccctcagccgtgtggctgctgagctctgtggagccagctcacctgttctccaggaccagccctgctggggcccaggcccaggctctgagaggccgtgtcctaacctgccctggccccggagaagctacgttgccacctgtcccccttccctggcctggtggggcctggctttggggcaagactgagccacgggggaagggggaatcccgtacctgctgctgcttcctctgtcttggctaacgtctgtccccctgaacccctaaccatatcccaagagctcccaaagcctgagaccagggtcatttgtccccaactccccatctggccctgctgttgctagtacctgttatttattacctggaggcctgtccagcacccaccctacccccataaagcattgtttacacctgt

SEQ ID NO: 427598 - DNA, 833 bp, Homo sapiens
agctgccggagcgggtcgcgccggaggggggcggaggcggaagtggcggtgccgggcccggggagtaggaaggagccggggctgtagccggagtggagcggctgccagccgaggagcaggcgcggccgcggcgccatattgcggccctcagcggccgcgaccgagtcatggctgagacctacgacttcctcttcaaattcctggtgattggcagtgcaggaactggcaaatcatgtctccttcatcagttcattgagaataagtgtgagtttcccgcagtggtcctgggaaccctgagctgtgtttatgcgcatggtgtgggctggtgggcagccggtggggagggcagggctggccataggtacaagtccagtgctggctttttggtccttgctttgtcgtatgtcctttactaggttctccttgacctcaagtcactccagcaaggagaatgggtttgtagagactgagagggccttggaggatgggggatcctctgagctgtctcctctctccctgtactgccccttctgttcctcctactcccagtcaaacaggactccaaccacacaatcggcgtggagtttggatcccgggtggtcaacgtgggtgggaagactgtgaagctacagatttgggacacggctggccaggagcggtttcggtcagtgacgcggagttattaccgaggggcggctggagccctgctggtgtacgacatcaccagagcggagacatacactactggctgctgctgacggatgcccgcatcctggtttggcaggtcgacgggaggatggatcctgacatggtgaaatggccataggacagac

SEQ ID NO: 427599 - DNA, 1135 bp, Homo sapiens
agctgccggagcgggtcgcgccggaggggggcggaggcggaagtggcggtgccgggcccggggagtaggaaggagccggggctgtagccggagtggagcggctgccagccgaggagcaggcgcggccgcggcgccatattgcggccctcagcggccgcgaccgagtcatggctgagacctacgacttcctcttcaaattcctggtgattggcagtgcaggaactggcaaatcatgtctccttcatcagttcattgagaataagttcaaacaggactccaaccacacaatcggcgtggagtttggatcccgggtggtcaacgtgggtgggaagactgtgaagctacagatttgggacacggctggccaggagcggtttcgccgggagacatacaactcactggctgcctggctgacggatgcccgcaccctggccagccccaacatcgtggtcatcctctgtggcaacaagaaggacctggaccctgagcgggaggtcactttcctggaggcctcccgctttgcccaggagaatgagctgatgttcctggagaccagcgctctcacaggcgagaacgtggaggaggcgttcctcaagtgtgcccgcactatcctcaacaagattgactcaggcgagctagacccggagaggatgggctctggcattcagtacggggatgcgtccctccgccagcttcggcagcctcggagtgcccaggccgtggcccctcagccgtgtggctgctgagctctgtggagccagctcacctgttctccaggaccagccctgctggggcccaggcccaggctctgagaggccgtgtcctaacctgccctggccccggagaagctacgttgccacctgtcccccttccctggcctggtggggcctggctttggggcaagactgagccacgggggaagggggaatcccgtacctgctgctgcttcctctgtcttggctaacgtctgtccccctgaacccctaaccatatcccaagagctcccaaagcctgagaccagggtcatttgtccccaactccccatctggccctgctgttgctagtacctgttatttattacctggaggcctgtccagcacccaccctacccccataaagcattgtttacacctgt

SEQ ID NO: 427600 - DNA, 1741 bp, Homo sapiens
  misc_feature (788)..(788): n is a, c, g, or t
agctgccggagcgggtcgcgccggaggggggcggaggcggaagtggcggtgccgggcccggggagtaggaaggagccggggctgtagccggagtggagcggctgccagccgaggagcaggcgcggccgcggcgccatattgcggccctcagcggccgcgaccgagtcatggctgagacctacgacttcctcttcaaattcctggtgattggcagtgcaggaactggcaaatcatgtctccttcatcagttcattgagaataagttcaaacaggactccaaccacacaatcggcgtggagtttggatcccgggtggtcaacgtgggtgggaagactgtgaagctacagatttgggacacggctggccaggagcggtttcggtcagtgacgcggagttattaccgaggggcggctggagccctgctggtgtacgacatcaccagccgggagacatacaactcactggctgcctggctgacggatgcccgcaccctggccagccccaacatcgtggtcatcctctgtggcaacaagaaggacctggaccctgagcgggaggtcactttcctggaggcctcccgctttgcccaggagaatgagctgatgttcctggagaccagcgctctcacaggcgagaacgtggaggaggcgttcctcaagtgtgcccgcactatcctcaacaagattgactcaggcgagctagacccggagaggatgggctctggcattcagtacggggatgcggtcctccgccagcttcggcagcctcggagtgcccagggcgtggcncctcagccgtgtggctgctgagctctgtggagccagctcacctgttctccaggaccagccctgctggggccacaagaagctgtgggagccctaagtcggtacctgactcagcccaggaagtcagggaggacttcttggaggaggagctgtgtgagctgagctctgaaggaagagctgggtgggcatatcgggaagcggacattagtggcagggaaatggcatgcgcagaggcctgaggtgagggtaaggggggatggaacattggaggaacaggatgagagtcagcaggtgagagctcagtggagggtggggactaactggggccctgacctcagagtgtgtgcccctgcagagctgatgttcctggagaccagcgctctcacaggcgagaacgtggaggaggcgttcctcaagtgtgcccgcactatcctcaacaagattgactcaggcgagctagacccggagaggatgggctctggcattcagtacggggatgcgtccctccgccagcttcggcagcctcggagtgcccaggccgtggcccctcagccgtgtggctgctgagctctgtggagccagctcacctgttctccaggaccagccctgctggggcccaggcccaggctctgagaggccgtgtcctaacctgccctggccccggagaagctacgttgccacctgtcccccttccctggcctggtggggcctggctttggggcaagactgagccacgggggaagggggaatcccgtacctgctgctgcttcctctgtcttggctaacgtctgtccccctgaacccctaaccatatcccaagagctcccaaagcctgagaccagggtcatttgtccccaactccccatctggccctgctgttgctagtacctgttatttattacctggaggcctgtccagcacccaccctacccccataaagcattgtttacacctgt

SEQ ID NO: 427601 - DNA, 1841 bp, Homo sapiens
  misc_feature (5)..(5): n is a, c, g, or t
ggcangaccctgaggtgagaaccagcttgtcattttcagggaatagactgaaggtcaggagctatagtggagtgaatgagtcagagggtggtaggaggtgaagaggaacaagggctatatcgtagtccttgtttaaatagctttcaagagactttagcgacaaaatagctaagatctgggactctggagcccttggcctaggtttgaatctcacttctgcccagctgtgtcactttgggcaagtcagttaacctttctggcctgttacctcatccggaaaatgggaataatttttagtctacctccctcatagagttttcctgaggatgatgtgagctgttgatgtgagtaaagacctttagaactgttcctggcccacaacaacacacaattgacccatgtaacaaacctgcacatgtgggctgggcgcggtggctcatgcctgtaatcccagcactttgggaggctgaggcaggcggatcacctgaggtcgggagtttgagaccagcctgaccaacatggagaaaccccgtctctactaaaaatacagaattagctgagtgtggtggcgcatgcctgtaatcccagctactcgggaggctgaggcaggagaattgcttgaacctgggaggtggaggttgcggtgagccgagatcgcgccattgcactccagcctgggcaacgaaaagtgaaactctgtctcaaaaaaacaaaaacaacgacaaaaaaacccctgcacatgtactccctgaatctaaaataaaagttgaaaaaaaatatatagaatgtgcctggcacatggcaagtactacataagagttatctgttactgttacctattggtttgtttctgcccaaccaatagaatattcttattatatatgatgcactctggtatttgccgttctgtgctattctgtttgaatttaaaaattggtcaagacccaccaaactgatttccccaccaaggcagtgacacacattagaatgacctggagaattttaaaagatactgatgcccaggcctcaccctagagattctgaagtggtttcaggactttttcttaattaaaagataaatagagatgaggtctcactatgttgcccaggctggtctcaaactcctgggctcaagcattcctcctgccttggcttcccacagtgctgggattacaggcgtgagccactgcgtccatccagattcatgatatttagatgttgaaatgtggctttacagactcagacagctctctgaggcaaacaaagagggagatgcaggtaccctcagcacaagccccaaattacctgcaggggagaggcggaaaatcagacaatgtagaaaccgggagaagaaaggtatggacagaccgatgcagataggaggggaaggaaatacctggaaatgagatagagaccggctggacagaccccggggaccctgcaggtcaccacacccttctctttcagctcacctgttctccaggaccagccctgctggggcccaggcccaggctctgagaggccgtgtcctaacctgccctggccccggagaagctacgttgccacctgtcccccttccctggcctggtggggcctggctttggggcaagactgagccacgggggaagggggaatcccgtacctgctgctgcttcctctgtcttggctaacgtctgtccccctgaacccctaaccatatcccaagagctcccaaagcctgagaccagggtcatttgtccccaactccccatctggccctgctgttgctagtacctgttatttattacctggaggcctgtccagcacccaccctacccccataaagcattgtttacacctgt

SEQ ID NO: 427602 - DNA, 970 bp, Homo sapiens
agctgccggagcgggtcgcgccggaggggggcggaggcggaagtggcggtgccgggcccggggagtaggaaggagccggggctgtagccggagtggagcggctgccagccgaggagcaggcgcggccgcggcgccatattgcggccctcagcggccgcgaccgagtcatggctgagacctacgacttcctcttcaaattcctggtgattggcagtgcaggaactggcaaatcatgtctccttcatcagttcattgagaataagtgtgagtttcccgcagtggtcctgggaaccctgagctgtgtttatgcgcatggtgtgggctggtgggcagccggtggggagggcagggctggccataggtacaagtccagtgctggctttttggtccttgctttgtcgtatgtcctttactaggttctccttgacctcaagtcactccagcaaggagaatgggtttgtagagactgagagggccttggaggatgggggatcctctgagctgtctcctctctccctgtactgccccttctgttcctcctactcccagtcaaacaggactccaaccacacaatcggcgtggagtttggatcccgggtggtcaacgtgggtgggaagactgtgaagctacagatttgggacacggctggccaggagcggtttcggtaggtgggctgggctcccaagggtgatggggagagagagtgagaaggaaagagagagatgtgtgtgtagagtcacttggagacactgagagggcagacaaggcagacagagagagatgagacaccgtagttagcaggtatatatatccaaggagagagggagtactggagagataaagagatggtggaagaaaaagaggtaggggccaggcgcaatggctcatgccggtaatccccgtgctttgggaggccatggtgggaagattgcctgagcccaggagtttgagaccagcctgggcaacatag

SEQ ID NO: 427603 - DNA, 1992 bp, Homo sapiens
  misc_feature (5)..(5): n is a, c, g, or t
ggcangaccctgaggtgagaaccagcttgtcattttcagggaatagactgaaggtcaggagctatagtggagtgaatgagtcagagggtggtaggaggtgaagaggaacaagggctatatcgtagtccttgtttaaatagctttcaagagactttagcgacaaaatagctaagatctgggactctggagcccttggcctaggtttgaatctcacttctgcccagctgtgtcactttgggcaagtcagttaacctttctggcctgttacctcatccggaaaatgggaataatttttagtctacctccctcatagagttttcctgaggatgatgtgagctgttgatgtgagtaaagacctttagaactgttcctggcccacaacaacacacaattgacccatgtaacaaacctgcacatgtgggctgggcgcggtggctcatgcctgtaatcccagcactttgggaggctgaggcaggcggatcacctgaggtcgggagtttgagaccagcctgaccaacatggagaaaccccgtctctactaaaaatacagaattagctgagtgtggtggcgcatgcctgtaatcccagctactcgggaggctgaggcaggagaattgcttgaacctgggaggtggaggttgcggtgagccgagatcgcgccattgcactccagcctgggcaacgaaaagtgaaactctgtctcaaaaaaacaaaaacaacgacaaaaaaacccctgcacatgtactccctgaatctaaaataaaagttgaaaaaaaatatatagaatgtgcctggcacatggcaagtactacataagagttatctgttactgttacctattggtttgtttctgcctatgtctgtttctctccctctaactgtgatggttagagagagagattggattggaatccatcttttttccctgtatctttctctccctgtgggtatccctgattttggctccatctggtcagacttcctcttcaaattcctggtgattggcagtgcaggaactggcaaatcatgtctccttcatcagttcattgagaataagttcaaacaggactccaaccacacaatcggcgtggagtttggatcccgggtggtcaacgtgggtgggaagactgtgaagctacagatttgggacacggctggccaggagcggtttcggtcagtgacgcggagttattaccgaggggcggctggagccctgctggtgtacgacatcaccagccgggagacatacaactcactggctgcctggctgacggatgcccgcaccctggccagccccaacatcgtggtcatcctctgtggcaacaagaaggacctggaccctgagcgggaggtcactttcctggaggcctcccgctttgcccaggagaatgagctgatgttcctggagaccagcgctctcacaggcgagaacgtggaggaggcgttcctcaagtgtgcccgcactatcctcaacaagattgactcaggcgagctagacccggagaggatgggctctggcattcagtacggggatgcgtccctccgccagcttcggcagcctcggagtgcccaggccgtggcccctcagccgtgtggctgctgagctctgtggagccagctcacctgttctccaggaccagccctgctggggcccaggcccaggctctgagaggccgtgtcctaacctgccctggccccggagaagctacgttgccacctgtcccccttccctggcctggtggggcctggctttggggcaagactgagccacgggggaagggggaatcccgtacctgctgctgcttcctctgtcttggctaacgtctgtccccctgaacccctaaccatatcccaagagctcccaaagcctgagaccagggtcatttgtccccaactccccatctggccctgctgttgctagtacctgttatttattacctggaggcctgtccagcacccaccctacccccataaagcattgtttacacctgt

SEQ ID NO: 427604 - DNA, 1483 bp, Homo sapiens
agctgccggagcgggtcgcgccggaggggggcggaggcggaagtggcggtgccgggcccggggagtaggaaggagccggggctgtagccggagtggagcggctgccagccgaggagcaggcgcggccgcggcgccatattgcggccctcagcggccgcgaccgagtcatggctgagacctacgacttcctcttcaaattcctggtgattggcagtgcaggaactggcaaatcatgtctccttcatcagttcattgagaataagtgtgagtttcccgcagtggtcctgggaaccctgagctgtgtttatgcgcatggtgtgggctggtgggcagccggtggggagggcagggctggccataggtacaagtccagtgctggctttttggtccttgctttgtcgtatgtcctttactaggttctccttgacctcaagtcactccagcaaggagaatgggtttgtagagactgagagggccttggaggatgggggatcctctgagctgtctcctctctccctgtactgccccttctgttcctcctactcccagtcaaacaggactccaaccacacaatcggcgtggagtttggatcccgggtggtcaacgtgggtgggaagactgtgaagctacagatttgggacacggctggccaggagcggtttcggtcagtgacgcggagttattaccgaggggcggctggagccctgctggtgtacgacatcaccagccgggagacatacaactcactggctgcctggctgacggatgcccgcaccctggccagccccaacatcgtggtcatcctctgtggcaacaagaaggacctggaccctgagcgggaggtcactttcctggaggcctcccgctttgcccaggagaatgagctgatgttcctggagaccagcgctctcacaggcgagaacgtggaggaggcgttcctcaagtgtgcccgcactatcctcaacaagattgactcaggcgagctagacccggagaggatgggctctggcattcagtacggggatgcgtccctccgccagcttcggcagcctcggagtgcccaggccgtggcccctcagccgtgtggctgctgagctctgtggagccagctcacctgttctccaggaccagccctgctggggcccaggcccaggctctgagaggccgtgtcctaacctgccctggccccggagaagctacgttgccacctgtcccccttccctggcctggtggggcctggctttggggcaagactgagccacgggggaagggggaatcccgtacctgctgctgcttcctctgtcttggctaacgtctgtccccctgaacccctaaccatatcccaagagctcccaaagcctgagaccagggtcatttgtccccaactccccatctggccctgctgttgctagtacctgttatttattacctggaggcctgtccagcacccaccctacccccataaagcattgtttacacctgt

SEQ ID NO: 427605 - DNA, 1179 bp, Homo sapiens
agctgccggagcgggtcgcgccggaggggggcggaggcggaagtggcggtgccgggcccggggagtaggaaggagccggggctgtagccggagtggagcggctgccagccgaggagcaggcgcggccgcggcgccatattgcggccctcagcggccgcgaccgagtcatggctgagacctacgacttcctcttcaaattcctggtgattggcagtgcaggaactggcaaatcatgtctccttcatcagttcattgagaataagttcaaacaggactccaaccacacaatcggcgtggagtttggatcccgggtggtcaacgtgggtgggaagactgtgaagctacagatttgggacacggctggccaggagcggtttcggtcagtgacgcggagttattaccgaggggcggctggagccctgctggtgtacgacatcaccagccgggagacatacaactcactggctgcctggctgacggatgcccgcaccctggccagccccaacatcgtggtcatcctctgtggcaacaagaaggacctggaccctgagcgggaggtcactttcctggaggcctcccgctttgcccaggagaatgagctgatgttcctggagaccagcgctctcacaggcgagaacgtggaggaggcgttcctcaagtgtgcccgcactatcctcaacaagattgactcaggcgagctagacccggagaggatgggctctggcattcagtacggggatgcgtccctccgccagcttcggcagcctcggagtgcccaggccgtggcccctcagccgtgtggctgctgagctctgtggagccaggactttgcacctgctgtgcctgagcctaagtttgctcatctgtaaaatgaggctaataatagcacctgcttctatagatgttgagaagaagaaatacattaattcacgaaagtgctcagaatggggcctgatggtcaagacttgatcgatgagggctgtttttaaagttttcttcttatccatctttgggctgagctcaaatgaatgggtgtgtcttcttcacctcagggcttagcagagactctgtcctagagagtttgccctcagtaggtgaaatgtaacaaggcaaggcaaggctttttcacactttgctgactgcaatctacaggaggaaatatattttatgtgttaatca

SEQ ID NO: 427606 - DNA, 563 bp, Homo sapiens
  misc_feature (16)..(16): n is a, c, g, or t
  misc_feature (64)..(64): n is a, c, g, or t
  misc_feature (66)..(66): n is a, c, g, or t
ggcacggcattcgatnagtgtggggaggaatggggtgggttttgtatgttcaaactgtcatttnanttctacgttgttagatatggggtgtcggcagctgctgtagcgaagagagtttggcgcgatgtctcacaccattttgctggtacagcctaccaagaggccagaaggcagaacttatgctgactacgaatctgtgaatgaatgcatggaaggtgtttgtaaaatgtatgaagaacatctgaaaagaatgaatcccaacagtccctctatcacatatgacatcagtcagttgtttgatttcatcgatgatctggcagacctcagctgcctggtttaccgagctgatacccagacataccagccttataacaaagactggattaaagagaagatctacgtgctccttcgtcggcaggcccaacaggctgggaaataattgtgttggaagcactgggggggttggggtgggcttggaaacggcatggttgtgaagctagcgaacctgttgagtggaaacggtgaataagatgaatgcaggctccacctttgtaatactctag

SEQ ID NO: 427607 - DNA, 829 bp, Homo sapiens
gggctcctctcgcgaggattggctgttagcggcgttgtagttaagctcgtgtaacggcggcggtgtcggcagctgctgtagcgaagagagtttggcgcgatgtctcacaccattttgctggtacagcctaccaagaggccagaaggcagaacttatgctgactacgaatctgtgaatgaatgcatggaaggtgtttgtaaaatgtatgaagaacatctgaaaagaatgaatcccaacagtccctctatcacatatgacatcagtcagttgtttgatttcatcgatgatctggcagacctcagctgcctggtttaccgagctgatacccagacataccagccttataacaaagactggattaaagagaagatctacgtgctccttcgtcggcaggcccaacaggctgggaaataattgtgttggaagcactgggggggttggggtgggcttggaacacaggtgtgtacagcgtgctgtagtggaagttttgtatcatagtaatcctgtttccactttgttatactctagccaagattgactgtattagatgaaatgtgaggatcttgttcaatcggaaacccccgttacctcctctttttctttctctttctttttttttttttacttaaacatttttatgatgatttagatggaagttgttcttcgtcacttaatgttggttccagtccttcaactgttcatatctactttataacattcacatactaacccttcttcaagatggggtggggggtggaaatgcagtttagccatgtcctcaagataaagtcttggtaaaaataaataaatgtcctttagttatattttc

SEQ ID NO: 427608 - DNA, 888 bp, Homo sapiens
  misc_feature (16)..(16): n is a, c, g, or t
  misc_feature (64)..(64): n is a, c, g, or t
  misc_feature (66)..(66): n is a, c, g, or t
ggcacggcattcgatnagtgtggggaggaatggggtgggttttgtatgttcaaactgtcatttnanttctacgttgttagatatggagcggcgttgtagttaagctcgtgtaacggcggcggtgtcggcagctgctgtagcgaagagagtttggcgcgatgtctcacaccattttgctggtacagcctaccaagaggccagaaggcagaacttatgctgactacgaatctgtgaatgaatgcatggaaggtgtttgtaaaatgtatgaagaacatctgaaaagaatgaatcccaacagtccctctatcacatatgacatcagtcagttgtttgatttcatcgatgatctggcagacctcagctgcctggtttaccgagctgatacccagacataccagccttataacaaagactggattaaagagaagatctacgtgctccttcgtcggcaggcccaacaggctgggaaataattgtgttggaagcactgggggggttggggtgggcttggaacacaggtgtgtacagcgtgctgtagtggaagttttgtatcatagtaatcctgtttccactttgttatactctagccaagattgactgtattagatgaaatgtgaggatcttgttcaatcggaaacccccgttacctcctctttttctttctctttctttttttttttttacttaaacatttttatgatgatttagatggaagttgttcttcgtcacttaatgttggttccagtccttcaactgttcatatctactttataacattcacatactaacccttcttcaagatggggtggggggtggaaatgcagtttagccatgtcctcaagataaagtcttggtaaaaataaataaatgtcctttagttatattttc

SEQ ID NO: 427609 - DNA, 860 bp, Homo sapiens
ctggagttggttaaaaaatagtagagggatgatgctaactacttaggccggggtggggagcggcgttgtagttaagctcgtgtaacggcggcggtgtcggcagctgctgtagcgaagagagtttggcgcgatgtctcacaccattttgctggtacagcctaccaagaggccagaaggcagaacttatgctgactacgaatctgtgaatgaatgcatggaaggtgtttgtaaaatgtatgaagaacatctgaaaagaatgaatcccaacagtccctctatcacatatgacatcagtcagttgtttgatttcatcgatgatctggcagacctcagctgcctggtttaccgagctgatacccagacataccagccttataacaaagactggattaaagagaagatctacgtgctccttcgtcggcaggcccaacaggctgggaaataattgtgttggaagcactgggggggttggggtgggcttggaacacaggtgtgtacagcgtgctgtagtggaagttttgtatcatagtaatcctgtttccactttgttatactctagccaagattgactgtattagatgaaatgtgaggatcttgttcaatcggaaacccccgttacctcctctttttctttctctttctttttttttttttacttaaacatttttatgatgatttagatggaagttgttcttcgtcacttaatgttggttccagtccttcaactgttcatatctactttataacattcacatactaacccttcttcaagatggggtggggggtggaaatgcagtttagccatgtcctcaagataaagtcttggtaaaaataaataaatgtcctttagttatattttc

SEQ ID NO: 427610 - DNA, 778 bp, Homo sapiens
cggacgcgtgggtcgacccacgcgtccgagcgaagagagtttggcgcgatgtctcacaccattttgctggtacagcctaccaagaggccagaaggcagaacttatgctgactacgaatctgtgaatgaatgcatggaaggtgtttgtaaaatgtatgaagaacatctgaaaagaatgaatcccaacagtccctctatcacatatgacatcagtcagttgtttgatttcatcgatgatctggcagacctcagctgcctggtttaccgagctgatacccagacataccagccttataacaaagactggattaaagagaagatctacgtgctccttcgtcggcaggcccaacaggctgggaaataattgtgttggaagcactgggggggttggggtgggcttggaacacaggtgtgtacagcgtgctgtagtggaagttttgtatcatagtaatcctgtttccactttgttatactctagccaagattgactgtattagatgaaatgtgaggatcttgttcaatcggaaacccccgttacctcctctttttctttctctttctttttttttttttacttaaacatttttatgatgatttagatggaagttgttcttcgtcacttaatgttggttccagtccttcaactgttcatatctactttataacattcacatactaacccttcttcaagatggggtggggggtggaaatgcagtttagccatgtcctcaagataaagtcttggtaaaaataaataaatgtcctttagttatattttc

SEQ ID NO: 427611 - DNA, 1287 bp, Homo sapiens
  misc_feature (1174)..(1174): n is a, c, g, or t
gggctcctctcgcgaggattggctgttagcggcgttgtagttaagctcgtgtaacggcggcggtgtcggcagctgctgtagcgaagagagtttggcgcgatgtctcacaccattttgctggtacagcctaccaagaggccagaaggcagaacttatgctgactacgaatctgtgaatgaatgcatggaaggtgtttgtaaaatgtatgaagaacatctgaaaagaatgaatcccaacagtccctctatcacatatgacatcagtcagttgtttgatttcatcgatgatctggcagacctcagctgcctggtttaccgagctgatacccagacataccagccttataacaaagactggattaaagagaagatctacgtgctccttcgtcggcaggcccaacaggctgggaaataattgtgttggaagcactgggggggttggggtgggcttggaacacaggtgtgtacagcgtgctgtagtggaagttttgtatcatagtaatcctgtttccactttgttatactctagccaagattgactgtattagatgaaatgtgaggatcttgttcaatcggaaacccccgttacctcctctttttctttctctttctttttttttttttacttaaacatttttatgatgatttagatggaagttgttcttcgtcacttaatgttggttccagtccttcaactgttcatatctactttataacattcacatactaacccttcttcaagatggggtggggggtggaaatgcagtttagccatgtcctcaagataaagtcttggtaaaaataaataaatgtcctttagttatattttcaaaaaaaaaaaaaaaaaaaaaaaaaaaaaaaaaaaaaaaagggggggggccccaaaaaaaaacccccggggggccccaatggccccccccttttttggacaaagggggccccccaaaagggggggaaaaaaaagaggggggccgggggggggaaaaaaacgggcgggcggaacaccgccgcgggatctcgggaaggcccctcttcgggccgcgcacccaggggcgacccccccccaggaattaggatgcggaggacataaacctggggtgacagggcacccccggcatttgcggggggaactggcccgggctgtcctcgcaaaagacgcgctgacacacacaagntagcagacaacagacaaaagcactagaaagagagcaaaacgagtaaagtcaacgaaaaaaagaaaacacgaaaacagccagcaagacacaggaccgagcacaaacaagacgtc

SEQ ID NO: 427612 - DNA, 815 bp, Homo sapiens
gcgctcgggttaaggagggtgatggtggctatgatggtggggatgatgaggctattgttttttgtgaattcttcgataatggcccatttgggcaaaaagccagcggcgttgtagttaagctcgtgtaacggcggcggtgtcggcagctgctgtagcgaagagagtttggcgcgatggtgtttgtaaaatgtatgaagaacatctgaaaagaatgaatcccaacagtccctctatcacatatgacatcagtcagttgtttgatttcatcgatgatctggcagacctcagctgcctggtttaccgagctgatacccagacataccagccttataacaaagactggattaaagagaagatctacgtgctccttcgtcggcaggcccaacaggctgggaaataattgtgttggaagcactgggggggttggggtgggcttggaacacaggtgtgtacagcgtgctgtagtggaagttttgtatcatagtaatcctgtttccactttgttatactctagccaagattgactgtattagatgaaatgtgaggatcttgttcaatcggaaacccccgttacctcctctttttctttctctttctttttttttttttacttaaacatttttatgatgatttagatggaagttgttcttcgtcacttaatgttggttccagtccttcaactgttcatatctactttataacattcacatactaacccttcttcaagatggggtggggggtggaaatgcagtttagccatgtcctcaagataaagtcttggtaaaaataaataaatgtcctttagttatattttc

SEQ ID NO: 427613 - DNA, 834 bp, Homo sapiens
  misc_feature (16)..(16): n is a, c, g, or t
  misc_feature (64)..(64): n is a, c, g, or t
  misc_feature (66)..(66): n is a, c, g, or t
ggcacggcattcgatnagtgtggggaggaatggggtgggttttgtatgttcaaactgtcatttnanttctacgttgttagatatggagcggcgttgtagttaagctcgtgtaacggcggcggtgtcggcagctgctgtagcgaagagagtttggcgcgatgtctcacaccattttgctggtacagcctaccaagaggccagaaggcagaacttatgctgactacgaatctgtgaatgaatgcatggaaggtgtttgtaaaatgtatgaagaacatctggatttcatcgatgatctggcagacctcagctgcctggtttaccgagctgatacccagacataccagccttataacaaagactggattaaagagaagatctacgtgctccttcgtcggcaggcccaacaggctgggaaataattgtgttggaagcactgggggggttggggtgggcttggaacacaggtgtgtacagcgtgctgtagtggaagttttgtatcatagtaatcctgtttccactttgttatactctagccaagattgactgtattagatgaaatgtgaggatcttgttcaatcggaaacccccgttacctcctctttttctttctctttctttttttttttttacttaaacatttttatgatgatttagatggaagttgttcttcgtcacttaatgttggttccagtccttcaactgttcatatctactttataacattcacatactaacccttcttcaagatggggtggggggtggaaatgcagtttagccatgtcctcaagataaagtcttggtaaaaataaataaatgtcctttagttatattttc

SEQ ID NO: 427614 - DNA, 882 bp, Homo sapiens
  misc_feature (16)..(16): n is a, c, g, or t
  misc_feature (64)..(64): n is a, c, g, or t
  misc_feature (66)..(66): n is a, c, g, or t
  misc_feature (811)..(811): n is a, c, g, or t
ggcacggcattcgatnagtgtggggaggaatggggtgggttttgtatgttcaaactgtcatttnanttctacgttgttagatatggagcggcgttgtagttaagctcgtgtaacggcggcggtgtcggcagctgctgtagcgaagagagtttggcgcgatgtctcacaccattttgctggtacagcctaccaagaggccagaaggcagaacttatgctgactacgaatctgtgaatgaatgcatggaaggtgtttgtaaaatgtatgaagaacatctgaaaagaatgaatcccaacagtccctctatcacatatgacatcagtcagttgtttgatttcatcgatgatctggcagacctcagctgcctggtttaccgagctgatacccagacataccagccttataacaaagactggattaaagagaagatctacgtgctccttcgtcggcaggcccaacaggctgggaaataattgtgttggaagcactgggggggttggggtgggcttggaacacaggtgtgtacagcgtgctgtagtggaagttttgtatcatagtaatcctgtttccactttgttatactctagccaagattgactgtattagatgaaatgtgaggatcttgttcaatcggaaacccccgttacctcctctttttctttctctttctttttttttttttacttaaacatttttatgatgatttagatggaagttgttcttcgtcacttaatgttggttccagtccttcaactgttcagaagtcctcgacggactctgaaagcatgggagcagagatttgcggacgagnggggaaccatcagcaaacaaatgaagccaggaatcacagtaagggcgcaagggctgaggccagttgtttcc

SEQ ID NO: 427615 - DNA, 865 bp, Homo sapiens
  misc_feature (16)..(16): n is a, c, g, or t
  misc_feature (64)..(64): n is a, c, g, or t
  misc_feature (66)..(66): n is a, c, g, or t
  misc_feature (808)..(808): n is a, c, g, or t
  misc_feature (812)..(812): n is a, c, g, or t
ggcacggcattcgatnagtgtggggaggaatggggtgggttttgtatgttcaaactgtcatttnanttctacgttgttagatatggagcggcgttgtagttaagctcgtgtaacggcggcggtgtcggcagctgctgtagcgaagagagtttggcgcgatgtctcacaccattttgctggtacagcctaccaagaggccagaaggcagaacttatgctgactacgaatctgtgaatgaatgcatggaaggtgtttgtaaaatgtatgaagaacatctgaaaagaatgaatcccaacagtccctctatcacatatgacatcagtcagttgtttgatttcatcgatgatctggcagacctcagctgcctggtttaccgagctgatacccagacataccagccttataacaaagactggattaaagagaagatctacgtgctccttcgtcggcaggcccaacaggctgggaaataattgtgttggaagcactgggggggttggggtgggcttggaacacaggtgtgtacagcgtgctgtagtggaagttttgtatcatagtaatcctgtttccactttgttatactctagccaagattgactgtattagatgaaatgtgaggatcttgttcaatcggaaacccccgttacctcctctttttctttctctttctttttttttttttacttaaacatttttatgatgatttagatggaagttgttcttcgtcacttaatgttggttccagtccttcaactgttcaaaaaaacatccccagtccccccgcggggggggacgaaccacaacacanaacnaaaccacggtttagccacatgtcctcagagataaagtcttggtaaaaataaat

SEQ ID NO: 427616 - DNA, 801 bp, Homo sapiens
gggctcctctcgcgaggattggctgttagcggcgttgtagttaagctcgtgtaacggcggcggtgtcggcagctgctgtagcgaagagagtttggcgcgatgtctcacaccattttgctggtacagcctaccaagaggccagaaggcagaacttatgctgactacgaatctgtgaatgaatgcatggaaggtgtttgtaaaatgtatgaagaacatctgaaaagaatgaatcccaacagtccctctatcacatatgacatcagtcagttgtttgatttcatcgatgatctggcagacctcagctgcctggtttaccgagctgatacccagacataccagccttataacaaagactggattaaagagaagatctacgtgctccttcgtcggcaggcccaacaggctgggaaataattgtgttggaaacacaggtgtgtacagcgtgctgtagtggaagttttgtatcatagtaatcctgtttccactttgttatactctagccaagattgactgtattagatgaaatgtgaggatcttgttcaatcggaaacccccgttacctcctctttttctttctctttctttttttttttttacttaaacatttttatgatgatttagatggaagttgttcttcgtcacttaatgttggttccagtccttcaactgttcatatctactttataacattcacatactaacccttcttcaagatggggtggggggtggaaatgcagtttagccatgtcctcaagataaagtcttggtaaaaataaataaatgtcctttagttatattttc

SEQ ID NO: 427617 - DNA, 641 bp, Homo sapiens
gggctcctctcgcgaggattggctgttagcggcgttgtagttaagctcgtgtaacggcggcggtgtcggcagctgctgtagcgaagagagtttggcgcgatgtctcacaccattttgctggtacagcctaccaagaggccagaaggcagaacttatgctgactacgaatctgtgaatgaatgcatggaaggtgtttgtaaaatgtatgaagaacatctgaaaagaatgaatcccaacagtccctctatcacatatgacatcagtcagttgtttgatttcatcgatgatctggcagacctcagctgcctggtttaccgagctgatacccagacataccagccttataacaaagactggattaaagagaagatctacgtgctccttcgtcggcaggcccaacaggctgggaaataattgtgttggaagcactgggggggttggggtgggcttggaacacaggtgtgtacagcgtgctgtagtggaagttttgtatcatagtaatcctgtttccactttgttatactctagccaagattgactgtattagatgaaatgtgaggatcttgttcaaatccatttttatgatgaattacatggttggtctttggcaccttaaggttgtttcccagcccttcctgttc

SEQ ID NO: 427618 - DNA, 521 bp, Homo sapiens
gggctcctctcgcgaggattggctgttagcggcgttgtagttaagctcgtgtaacggcggcggtgtcggcagctgctgtagcgaagagagtttggcgcgatgtctcacaccattttgctggtacagcctaccaagaggccagaaggcagaacttatgctgactacgaatctgtgaatgaatgcatggaaggtgtttgtaaaatgtatgaagaacatctgaaaagaatgaatcccaacagtccctctatcacatatgacatcagtcagttgtttgatttcatcgatgatctggcagacctcagctgcctggtttaccgagctgatacccagacataccagccttataacaaagactggattaaagagaagatctacgtgctccttcgtcggcaggcccaacaggctgggaaataattgtgttggaagcactgggggggttggggtgggcttggaacacaggtgtgtacagcgtgctgtagtggaagttttgtatcttgtggtgtgccgttaggccgatctga

SEQ ID NO: 427619 - DNA, 729 bp, Homo sapiens
  misc_feature (16)..(16): n is a, c, g, or t
  misc_feature (64)..(64): n is a, c, g, or t
  misc_feature (66)..(66): n is a, c, g, or t
ggcacggcattcgatnagtgtggggaggaatggggtgggttttgtatgttcaaactgtcatttnanttctacgttgttagatatggagcggcgttgtagttaagctcgtgtaacggcggcggtgtcggcagctgctgtagcgaagagagtttggcgcgatgtctcacaccattttgctggtacagcctaccaagaggccagaaggcagaacttatgctgactacgaatctgtgaatgaatgcatggaaggtgtttgtaaaatgtatgaagaacatctggatttcatcgatgatctggcagacctcagctgcctggtttaccgagctgatacccagacataccagccttataacaaagactggattaaagagaagatctacgtgctccttcgtcggcaggcccaacaggctgggaaataattgtgttggaagcactgggggggttggggtgggcttggaacacaggtgtgtacagcgtgctgtagtggaagttttgtatccgttcttcgcttccctgtcctcactttgtcctactcttgcctctactgactgtcttaggattactcgtggcgtccctagtcacctagccatccctgcttctctctcttaacacttcctccctcgcctttctcatttcacctgcgcatttctacgtaagtcccaatcgtaatccctattttcttcacctttaccccttgcatccactcctttttcccttgcccaccttatc

SEQ ID NO: 427620 - DNA, 268 bp, Homo sapiens
  misc_feature (16)..(16): n is a, c, g, or t
  misc_feature (64)..(64): n is a, c, g, or t
  misc_feature (66)..(66): n is a, c, g, or t
ggcacggcattcgatnagtgtggggaggaatggggtgggttttgtatgttcaaactgtcatttnanttctacgttgttagatatggagcggcgttgtagttaagctcgtgtaacggcggcggtgtcggcagctgctgtagcgaagagagtttggcgcgatgtctcacaccattttgctggtacagcctaccaagaggtccaatcttccggataccagatatagcctaattacaaagaaagcattaacctgcctctgaggtgactaaag

SEQ ID NO: 427621 - DNA, 392 bp, Homo sapiens
tacagcgtgctgtagtggaagttttgtatcatagtaatcctgtttccactttgttatactctagccaagattgactgtattagatgaaatgtgaggatcttgttcaatcggaaacccccgttacctcctctttttctttctctttctttttttttttttacttaaacatttttatgatgatttagatggaagttgttcttcgtcacttaatgttggttccagtccttcaactgttcatatctactttataacattcacatactaacccttcttcaagatggggtggggggtggaaatgcagtttagccatgtcctcaagataaagtcttggtaaaaataaataaatgtcctttagttatattttctccctgagtgctttttttttttttgtc

SEQ ID NO: 427622 - DNA, 2450 bp, Homo sapiens
gagccgagatcgcgccaccgccctccagcctgggcgacagagcaagactctgtctcaaaaaaaaaaaaaaaaagagcaaattttttttccaaggtgatagggagagtccgtggctgatgtctgcactgaccagacgcccctagggggccagcgagggcgggtcccaggtgcagcggatgcagaggagagaggcccgggcgcggcgcgggggatggtgcgatcccgggcccgagggcatcagacggcggctgattagggtttgcatcacccggaccgggggattagctccggtttgcatcacccggaccgggggccgggcgcgcacgagactcgcagcggaagtggaggcggctccgcgcgcgtccgctgctaggacccgggcagggctggagctgggctgggatcccgagctcggcagcagcgcagcgggccggcccacctgctggtgccctggaggctctgagccccggcggcgcccgggcccacgcggaacgacggggcgagatgcgagccacccctctggctgctcctgcgggttccctgtccaggaagaagcggttggagttggatgacaacttagataccgagcgtcccgtccagaaacgagctcgaagtgggccccagcccagactgcccccctgcctgttgcccctgagcccacctactgctccagatcgtgcaactgctgtggccactgcctcccgtcttgggccctatgtcctcctggagcccgaggagggcgggcgggcctaccaggccctgcactgccctacaggcactgagtatacctgcaaggtgtaccccgtccaggaagccctggccgtgctggagccctacgcgcggctgcccccgcacaagcatgtggctcggcccactgaggtcctggctggtacccagctcctctacgcctttttcactcggacccatggggacatgcacagcctggtgcgaagccgccaccgtatccctgagcctgaggctgccgtgctcttccgccagatggccaccgccctggcgcactgtcaccagcacggtctggtcctgcgtgatctcaagctgtgtcgctttgtcttcgctgaccgtgagaggaagaagctggtgctggagaacctggaggactcctgcgtgctgactgggccagatgattccctgtgggacaagcacgcgtgcccagcctacgtgggacctgagatactcagctcacgggcctcatactcgggcaaggcagccgatgtctggagcctgggcgtggcgctcttcaccatgctggccggccactaccccttccaggactcggagcctgtcctgctcttcggcaagatccgccgcggggcctacgccttgcctgcaggcctctcggcccctgcccgctgtctggttcgctgcctccttcgtcgggagccagctgaacggctcacagccacaggcatcctcctgcacccctggctgcgacaggacccgatgcccttagctccaacccgatcccatctctgggaggctgcccaggtggtccctgatggactggggctggacgaagccagggaagaggagggagacagagaagtggttctgtatggctaggaccaccctactacacgctcagctgccaacagtggattgagtttgggggtagctccaagccttctcctgcctctgaactgagccaaaccttcagtgccttccagaagggagaaaggcagaagcctgtgtggagtgtgctgtgtacacatctgctttgttccacacacatgcagttcctgcttgggtgcttatcaggtgccaagccctgttctcggtgctgggagtacagcagtgagcaaaggagacaatattccctgctcacagagatgacaaactggcatccttgagctgacaacacttttccatgaccataggtcactgtctacactgggtacactttgtaccagtgtcggcctccactgatgctggtgctcaggcacctctgtccaaggacaatccctttcacaaacaaaccagctgcctttgtatcttgtaccttttcagagaaagggaggtatccctgtgccaaaggctccaggcctctcccctgcaactcaggacccaagcccagctcactctgggaactgtgttcccagcatctctgtcctcttgattaagagattctccttccaggcctaagcctgggatttgggccagagataagaatccaaactatgaggctagttcttgtctaactcaagactgttctggaatgagggtccaggcctgtcaaccatggggcttctgacctgagcaccaaggttgagggacaggattaggcagggtctgtcctgtggccacctggaaagtcccaggtgggactcttctggggacacttggggtccacaatcccaggtccatactctaggttttggataccatgagtatgtatgtttacctgtgcctaataaaggagaattatgaaataa

SEQ ID NO: 427623 - DNA, 497 bp, Homo sapiens
gcagatgtgtacacagctgcatgtgtgtggaacaaagcagatgtgtacacagcacactccacacacatgcagttcctgcttgggtgcttatcaggtgccaagccctgttctcggtgctgggagtacagcagtgagcaaaggagacaatattccctgctcacagagatgacaaactggcatccttgagctgacaacacttttccatgaccataggtcactgtctacactgggtacactttgtaccagtgtcggcctccactgatgctggtgctcaggcacctctgtccaagatacaaagaatctgttctttgagatcctggtttccttagcagagttgtaggttgcgggtttcattcacgtggaaattctaagtagaacttttgctgccccattttactgttggtgaagggccgttgttaatggaagtttacgttttaaaactcagatgactcagaaaccagactgtgatcattttttgcagcagcaaaatgacttat

SEQ ID NO: 427624 - DNA, 2487 bp, Homo sapiens
gagccgagatcgcgccaccgccctccagcctgggcgacagagcaagactctgtctcaaaaaaaaaaaaaaaaagagcaaattttttttccaaggtgatagggagagtccgtggctgatgtctgcactgaccagacgcccctagggggccagcgagggcgggtcccaggtgcagcggatgcagaggagagaggcccgggcgcggcgcgggggatggtgcgatcccgggcccgagggcatcagacggcggctgattagctccggtttgcatcacccggaccgggggattagctccggtttgcatcacccggaccgggggattagctccggtttgcatcacccggaccgggggccgggcgcgcacgagactcgcagcggaagtggaggcggctccgcgcgcgtccgctgctaggacccgggcagggctggagctgggctgggatcccgagctcggcagcagcgcagcgggccggcccacctgctggtgccctggaggctctgagccccggcggcgcccgggcccacgcggaacgacggggcgagatgcgagccacccctctggctgctcctgcgggttccctgtccaggaagaagcggttggagttggatgacaacttagataccgagcgtcccgtccagaaacgagctcgaagtgggccccagcccagactgcccccctgcctgttgcccctgagcccacctactgctccagatcgtgcaactgctgtggccactgcctcccgtcttgggccctatgtcctcctggagcccgaggagggcgggcgggcctaccaggccctgcactgccctacaggcactgagtatacctgcaaggtgtaccccgtccaggaagccctggccgtgctggagccctacgcgcggctgcccccgcacaagcatgtggctcggcccactgaggtcctggctggtacccagctcctctacgcctttttcactcggacccatggggacatgcacagcctggtgcgaagccgccaccgtatccctgagcctgaggctgccgtgctcttccgccagatggccaccgccctggcgcactgtcaccagcacggtctggtcctgcgtgatctcaagctgtgtcgctttgtcttcgctgaccgtgagaggaagaagctggtgctggagaacctggaggactcctgcgtgctgactgggccagatgattccctgtgggacaagcacgcgtgcccagcctacgtgggacctgagatactcagctcacgggcctcatactcgggcaaggcagccgatgtctggagcctgggcgtggcgctcttcaccatgctggccggccactaccccttccaggactcggagcctgtcctgctcttcggcaagatccgccgcggggcctacgccttgcctgcaggcctctcggcccctgcccgctgtctggttcgctgcctccttcgtcgggagccagctgaacggctcacagccacaggcatcctcctgcacccctggctgcgacaggacccgatgcccttagctccaacccgatcccatctctgggaggctgcccaggtggtccctgatggactggggctggacgaagccagggaagaggagggagacagagaagtggttctgtatggctaggaccaccctactacacgctcagctgccaacagtggattgagtttgggggtagctccaagccttctcctgcctctgaactgagccaaaccttcagtgccttccagaagggagaaaggcagaagcctgtgtggagtgtgctgtgtacacatctgctttgttccacacacatgcagttcctgcttgggtgcttatcaggtgccaagccctgttctcggtgctgggagtacagcagtgagcaaaggagacaatattccctgctcacagagatgacaaactggcatccttgagctgacaacacttttccatgaccataggtcactgtctacactgggtacactttgtaccagtgtcggcctccactgatgctggtgctcaggcacctctgtccaaggacaatccctttcacaaacaaaccagctgcctttgtatcttgtaccttttcagagaaagggaggtatccctgtgccaaaggctccaggcctctcccctgcaactcaggacccaagcccagctcactctgggaactgtgttcccagcatctctgtcctcttgattaagagattctccttccaggcctaagcctgggatttgggccagagataagaatccaaactatgaggctagttcttgtctaactcaagactgttctggaatgagggtccaggcctgtcaaccatggggcttctgacctgagcaccaaggttgagggacaggattaggcagggtctgtcctgtggccacctggaaagtcccaggtgggactcttctggggacacttggggtccacaatcccaggtccatactctaggttttggataccatgagtatgtatgtttacctgtgcctaataaaggagaattatgaaataa

SEQ ID NO: 427625 - DNA, 2348 bp, Homo sapiens
gatcagacggcggctgattagctccggtttgcatcacccggaccgggggattagctccggttggcatcagacggcggctgattagctccggtttgcatcacccggaccgggggattagctccttgcatcacccggaccgggggattagctccggggtttgcatcacccggaccgggggattagctccggtttgcatcacccggaccgggggccgggcgcgcacgagactcgcagcggaagtggaggcggctccgcgcgcgtccgctgctaggacccgggcagggctggagctgggctgggatcccgagctcggcagcagcgcagcgggccggcccacctgctggtgccctggaggctctgagccccggcggcgcccgggcccacgcggaacgacggggcgagatgcgagccacccctctggctgctcctgcgggttccctgtccaggaagaagcggttggagttggatgacaacttagataccgagcgtcccgtccagaaacgagctcgaagtgggccccagcccagactgcccccctgcctgttgcccctgagcccacctactgctccagatcgtgcaactgctgtggccactgcctcccgtcttgggccctatgtcctcctggagcccgaggagggcgggcgggcctaccaggccctgcactgccctacaggcactgagtatacctgcaaggtgtaccccgtccaggaagccctggccgtgctggagccctacgcgcggctgcccccgcacaagcatgtggctcggcccactgaggtcctggctggtacccagctcctctacgcctttttcactcggacccatggggacatgcacagcctggtgcgaagccgccaccgtatccctgagcctgaggctgccgtgctcttccgccagatggccaccgccctggcgcactgtcaccagcacggtctggtcctgcgtgatctcaagctgtgtcgctttgtcttcgctgaccgtgagaggaagaagctggtgctggagaacctggaggactcctgcgtgctgactgggccagatgattccctgtgggacaagcacgcgtgcccagcctacgtgggacctgagatactcagctcacgggcctcatactcgggcaaggcagccgatgtctggagcctgggcgtggcgctcttcaccatgctggccggccactaccccttccaggactcggagcctgtcctgctcttcggcaagatccgccgcggggcctacgccttgcctgcaggcctctcggcccctgcccgctgtctggttcgctgcctccttcgtcgggagccagctgaacggctcacagccacaggcatcctcctgcacccctggctgcgacaggacccgatgcccttagctccaacccgatcccatctctgggaggctgcccaggtggtccctgatggactggggctggacgaagccagggaagaggagggagacagagaagtggttctgtatggctaggaccaccctactacacgctcagctgccaacagtggattgagtttgggggtagctccaagccttctcctgcctctgaactgagccaaaccttcagtgccttccagaagggagaaaggcagaagcctgtgtggagtgtgctgtgtacacatctgctttgttccacacacatgcagttcctgcttgggtgcttatcaggtgccaagccctgttctcggtgctgggagtacagcagtgagcaaaggagacaatattccctgctcacagagatgacaaactggcatccttgagctgacaacacttttccatgaccataggtcactgtctacactgggtacactttgtaccagtgtcggcctccactgatgctggtgctcaggcacctctgtccaaggacaatccctttcacaaacaaaccagctgcctttgtatcttgtaccttttcagagaaagggaggtatccctgtgccaaaggctccaggcctctcccctgcaactcaggacccaagcccagctcactctgggaactgtgttcccagcatctctgtcctcttgattaagagattctccttccaggcctaagcctgggatttgggccagagataagaatccaaactatgaggctagttcttgtctaactcaagactgttctggaatgagggtccaggcctgtcaaccatggggcttctgacctgagcaccaaggttgagggacaggattaggcagggtctgtcctgtggccacctggaaagtcccaggtgggactcttctggggacacttggggtccacaatcccaggtccatactctaggttttggataccatgagtatgtatgtttacctgtgcctaataaaggagaattatgaaataa

SEQ ID NO: 427626 - DNA, 2316 bp, Homo sapiens
gatcagacggcggctgattagctccggtttgcatcacccggaccgggggattagctccggttggcatcagacggcggctgattagctccggtttgcatcacccggaccgggggattagctccggtttgcatcacccggaccgggggattagctccggtttgcatcacccggaccgggggccgggcgcgcacgagactcgcagcggaagtggaggcggctccgcgcgcgtccgctgctaggacccgggcagggctggagctgggctgggatcccgagctcggcagcagcgcagcgggccggcccacctgctggtgccctggaggctctgagccccggcggcgcccgggcccacgcggaacgacggggcgagatgcgagccacccctctggctgctcctgcgggttccctgtccaggaagaagcggttggagttggatgacaacttagataccgagcgtcccgtccagaaacgagctcgaagtgggccccagcccagactgcccccctgcctgttgcccctgagcccacctactgctccagatcgtgcaactgctgtggccactgcctcccgtcttgggccctatgtcctcctggagcccgaggagggcgggcgggcctaccaggccctgcactgccctacaggcactgagtatacctgcaaggtgtaccccgtccaggaagccctggccgtgctggagccctacgcgcggctgcccccgcacaagcatgtggctcggcccactgaggtcctggctggtacccagctcctctacgcctttttcactcggacccatggggacatgcacagcctggtgcgaagccgccaccgtatccctgagcctgaggctgccgtgctcttccgccagatggccaccgccctggcgcactgtcaccagcacggtctggtcctgcgtgatctcaagctgtgtcgctttgtcttcgctgaccgtgagaggaagaagctggtgctggagaacctggaggactcctgcgtgctgactgggccagatgattccctgtgggacaagcacgcgtgcccagcctacgtgggacctgagatactcagctcacgggcctcatactcgggcaaggcagccgatgtctggagcctgggcgtggcgctcttcaccatgctggccggccactaccccttccaggactcggagcctgtcctgctcttcggcaagatccgccgcggggcctacgccttgcctgcaggcctctcggcccctgcccgctgtctggttcgctgcctccttcgtcgggagccagctgaacggctcacagccacaggcatcctcctgcacccctggctgcgacaggacccgatgcccttagctccaacccgatcccatctctgggaggctgcccaggtggtccctgatggactggggctggacgaagccagggaagaggagggagacagagaagtggttctgtatggctaggaccaccctactacacgctcagctgccaacagtggattgagtttgggggtagctccaagccttctcctgcctctgaactgagccaaaccttcagtgccttccagaagggagaaaggcagaagcctgtgtggagtgtgctgtgtacacatctgctttgttccacacacatgcagttcctgcttgggtgcttatcaggtgccaagccctgttctcggtgctgggagtacagcagtgagcaaaggagacaatattccctgctcacagagatgacaaactggcatccttgagctgacaacacttttccatgaccataggtcactgtctacactgggtacactttgtaccagtgtcggcctccactgatgctggtgctcaggcacctctgtccaaggacaatccctttcacaaacaaaccagctgcctttgtatcttgtaccttttcagagaaagggaggtatccctgtgccaaaggctccaggcctctcccctgcaactcaggacccaagcccagctcactctgggaactgtgttcccagcatctctgtcctcttgattaagagattctccttccaggcctaagcctgggatttgggccagagataagaatccaaactatgaggctagttcttgtctaactcaagactgttctggaatgagggtccaggcctgtcaaccatggggcttctgacctgagcaccaaggttgagggacaggattaggcagggtctgtcctgtggccacctggaaagtcccaggtgggactcttctggggacacttggggtccacaatcccaggtccatactctaggttttggataccatgagtatgtatgtttacctgtgcctaataaaggagaattatgaaataa

SEQ ID NO: 427627 - DNA, 2541 bp, Homo sapiens
gagccgagatcgcgccaccgccctccagcctgggcgacagagcaagactctgtctcaaaaaaaaaaaaaaaaagagcaaattttttttccaaggtgatagggagagtccgtggctgatgtctgcactgaccagacgcccctagggggccagcgagggcgggtcccaggtgcagcggatgcagaggagagaggcccgggcgcggcgcgggggatggtgcgatcccgggcccgagggcatcagacggcggctgattagctccggtttgcatcacccggaccgggggattagctccggtttgcatcacccggaccgggggattagctccggtttgcatcacccggaccgggggccgggcgcgcacgagactcgcagcggaagtggaggcggctccgcgcgcgtccgctgctaggacccgggcagggctggagctgggctgggatcccgagctcggcagcagcgcagcgggccggcccacctgctggtgccctggaggctctgagccccggcggcgcccgggcccacgcggaacgacggggcgagatgcgagccacccctctggctgctcctgcgggttccctgtccaggaagaagcggttggagttggatgacaacttagataccgagcgtcccgtccagaaacgagctcgaagtgggccccagcccagactgcccccctgcctgttgcccctgagcccacctactgctccagatcgtgcaactgctgtggccactgcctcccgtcttgggccctatgtcctcctggagcccgaggagggcgggcgggcctaccaggccctgcactgccctacaggcactgagtatacctgcaaggtgtaccccgtccaggaagccctggccgtgctggagccctacgcgcggctgcccccgcacaagcatgtggctcggcccactgaggtcctggctggtacccagctcctctacgcctttttcactcggacccatggggacatgcacagcctggtgcgaagccgccaccgtatccctgagcctgaggctgccgtgctcttccgccagatggccaccgccctggcgcactgtcaccagcacggtctggtcctgcgtgatctcaagctgtgtcgctttgtcttcgctgaccgtgagaggaagaagctggtgctggagaacctggaggactcctgcgtgctgactgggccagatgattccctgtgggacaagcacgcgtgcccagcctacgtgggacctgagatactcagctcacgggcctcatactcgggcaaggcagccgatgtctggagcctgggcgtggcgctcttcaccatgctggccggccactaccccttccaggactcggagcctgtcctgctcttcggcaagatccgccgcggggcctacgccttgcctgcaggcctctcggcccctgcccgctgtctggttcgctgcctccttcgtcgggagccagctgaacggctcacagccacaggcatcctcctgcacccctggctgcgacaggacccgatgcccttagctccaacccgatcccatctctgggaggctgcccaggtggtccctgatggactggggctggacgaagccagggaagaggagggagacagagaagtggttctgtatggctaggaccaccctactacacgctcagctgccaacagtggattgagtttgggggtagctccaagccttctcctgcctctgaactgagccaaaccttcagtgccttccagaagggagaaaggcagaagcctgtgtggagtgtgctgtgtacacatctgctttgttccacacacatgcagttcctgcttgggtgcttatcaggtgccaagccctgttctcggtgctgggagtacagcagtgagcaaaggagacaatattccctgctcacagagatgacaaactggcatccttgagctgacaacacttttccatgaccataggtcactgtctacactgggtacactttgtaccagtgtcggcctccactgatgctggtgctcaggcacctctgtccaaggacaatccctttcacaaacaaaccagctgcctttgtatcttgtaccttttcagagaaagggaggtatccctgtgccaaaggctccaggcctctcccctgcaactcaggacccaagcccagctcactctgggaactgtgttcccagcatctctgtcctcttgattaagagattctccttccaggcctaagcctgggatttgggccagagataagaatccaaactatgaggctagttcttgtctaactcaagactgttctggaatgagggtccaggcctgtcaaccatggggcttctgacctgagcaccaaggttgagggacaggattaggcagggtctgtcctgtggccacctggaaagtcccaggtgggactcttctggggacacttggggtccacaatcccaggtccatactctaggttttggataccatgagtatgtatgtttacctgtgcctaataaaggagaattatgaaataaaaaaaccaaccacacacacaacccaccaacccaaaacacggagctaacaagaaa

SEQ ID NO: 427628 - DNA, 2672 bp, Homo sapiens
gagccgagatcgcgccaccgccctccagcctgggcgacagagcaagactctgtctcaaaaaaaaaaaaaaaaagagcaaattttttttccaaggtgatagggagagtccgtggctgatgtctgcactgaccagacgcccctagggggccagcgagggcgggtcccaggtgcagcggatgcagaggagagaggcccgggcgcggcgcgggggatggtgcgatcccgggcccgagggcatcagacggcggctgattagctccggtttgcatcacccggaccgggggattagctccggtttgcatcacccggaccgggggattagctccggtttgcatcacccggaccgggggccgggcgcgcacgagactcgcagcggaagtggaggcggctccgcgcgcgtccgctgctaggacccgggcagggctggagctgggctgggatcccgagctcggcagcagcgcagcgggccggcccacctgctggtgccctggaggctctgagccccggcggcgcccgggcccacgcggaacgacggggcgagatgcgagccacccctctggctgctcctgcgggttccctgtccaggaagaagcggttggagttggatgacaacttagataccgagcgtcccgtccagaaacgagctcgaagtgggccccagcccagactgcccccctgcctgttgcccctgagcccacctactgctccagatcgtgcaactgctgtggccactgcctcccgtcttgggccctatgtcctcctggagcccgaggagggcgggcgggcctaccaggccctgcactgccctacaggcactgagtatacctgcaaggtgtaccccgtccaggaagccctggccgtgctggagccctacgcgcggctgcccccgcacaagcatgtggctcggcccactgaggtcctggctggtacccagctcctctacgcctttttcactcggacccatggggacatgcacagcctggtgcgaagccgccaccgtatccctgagcctgaggctgccgtgctcttccgccagatggccaccgccctggcgcactgtcaccagcacggtctggtcctgcgtgatctcaagctgtgtcgctttgtcttcgctgaccgtgagaggaagaagctggtgctggagaacctggaggactcctgcgtgctgactgggccagatgattccctgtgggacaagcacgcgtgcccagcctacgtgggacctgagatactcagctcacgggcctcatactcgggcaaggcagccgatgtctggagcctgggcgtggcgctcttcaccatgctggccggccactaccccttccaggactcggagcctgtcctgctcttcggcaagatccgccgcggggcctacgccttgcctgcaggcctctcggcccctgcccgctgtctggttcgctgcctccttcgtcgggagccagctgaacggctcacagccacaggcatcctcctgcacccctggctgcgacaggacccgatgcccttagctccaacccgatcccatctctgggaggctgcccaggtggtccctgatggactggggctggacgaagccagggaagaggagggagacagagaagtggttctgtatggctaggaccaccctactacacgctcagctgccaacagtggattgagtttgggggtagctccaagccttctcctgcctctgaactgagccaaaccttcagtgccttccagaagggagaaaggcagaagcctgtgtggagtgtgctgtgtacacatctgctttgttccacacacatgcagttcctgcttgggtgcttatcaggtgccaagccctgttctcggtgctgggagtacagcagtgagcaaaggagacaatattccctgctcacagagatgacaaactggcatccttgagctgacaacacttttccatgaccataggtcactgtctacactgggtacactttgtaccagtgtcggcctccactgatgctggtgctcaggcacctctgtccaaggacaatccctttcacaaacaaaccagctgcctttgtatcttgtaccttttcagagaaagggaggtatccctgtgccaaaggctccaggcctctcccctgcaactcaggacccaagcccagctcactctgggaactgtgttcccagcatctctgtcctcttgattaagagattctccttccaggcctaagcctgggatttgggccagagataagaatccaaactatgaggctagttcttgtctaactcaagactgttctggaatgagggtccaggcctgtcaaccatggggcttctgacctgagcaccaaggttgagggacaggattaggcagggtctgtcctgtggccacctggaaagtcccaggtgggactcttctggggacacttggggtccacaatcccaggtccatactctaggttttggataccatgagtatgtatgtttacctgtgcctaataaaggagaattatgaaataattttatttttctctgcaatttcttccatcctttccaacgatctcttaccagtttttcctgccttcaaaactggcccccatggtgaaaggccgtagagttgtgtcttaacctgggctgagtggtttgtgagaacagattacctggagcccagtgggtcttcctgcaccccttctgtcgtcttctcg

SEQ ID NO: 427629 - DNA, 2396 bp, Homo sapiens
gagccgagatcgcgccaccgccctccagcctgggcgacagagcaagactctgtctcaaaaaaaaaaaaaaaaagagcaaattttttttccaaggtgatagggagagtccgtggctgatgtctgcactgaccagacgcccctagggggccagcgagggcgggtcccaggtgcagcggatgcagaggagagaggcccgggcgcggcgcgggggatggtgcgatcccgggcccgagggcatcagacggcggctgattagctccggtttgcatcacccggaccgggggattagctccggtttgcatcacccggaccgggggattagctccggtttgcatcacccggaccgggggccgggcgcgcacgagactcgcagcggaagtggaggcggctccgcgcgcgtccgctgctaggacccgggcagggctggagctgggctgggatcccgagctcggcagcagcgcagcgggccggcccacctgctggtgccctggaggctctgagccccggcggcgcccgggcccacgcggaacgacggggcgagatgcgagccacccctctggctgctcctgcgggttccctgtccaggaagaagcggttggagttggatgacaacttagataccgagcgtcccgtccagaaacgagctcgaagtgggccccagcccagactgcccccctgcctgttgcccctgagcccacctactgctccagatcgtgcaactgctgtggccactgcctcccgtcttgggccctatgtcctcctggagcccgaggagggcgggcgggcctaccaggccctgcactgccctacaggcactgagtatacctgcaaggtgtaccccgtccaggaagccctggccgtgctggagccctacgcgcggctgcccccgcacaagcatgtggctcggcccactgaggtcctggctggtacccagctcctctacgcctttttcactcggacccatggggacatgcacagcctggtgcgaagccgccaccgtatccctgagcctgaggctgccgtgctcttccgccagatggccaccgccctggcgcactgtcaccagcacggtctggtcctgcgtgatctcaagctgtgtcgctttgtcttcgctgaccgtgagaggaagaagctggtgctggagaacctggaggactcctgcgtgctgactgggccagatgattccctgtgggacaagcacgcgtgcccagcctacgtgggacctgagatactcagctcacgggcctcatactcgggcaaggcagccgatgtctggagcctgggcgtggcgctcttcaccatgctggccggccactaccccttccaggactcggagcctgtcctgctcttcggcaagatccgccgcggggcctacgccttgcctgcaggcctctcggcccctgcccgctgtctggttcgctgcctccttcgtcgggagccagctgaacggctcacagccacaggcatcctcctgcacccctggctgcgacaggacccgatgcccttagctccaacccgatcccatctctgggaggctgcccaggtggtccctgatggactggggctggacgaagccagggaagaggagggagacagagaagtggttctgtatggctaggaccaccctactacacgctcagctgccaacagtggattgagtttgggggtagctccaagccttctcctgcctctgaactgagccaaaccttcagtgccttccagaagggagaaaggcagaagcctgtgtggagtgtgctgtgtacacatctgctttgttccacacacatgcagttcctgcttgggtgcttatcaggtgccaagccctgttctcggtgctgggagtacagcagtgagcaaaggagacaatattccctgctcacagagatgacaaactggcatccttgagctgacaacacttttccatgaccataggtcactgtctacactgggtacactttgtaccagtgtcggcctccactgatgctggtgctcaggcacctctgtccaaggacaatccctttcacaaacaaaccagctgcctttgtatcttgtaccttttcagagaaagggaggtatccctgtgccaaaggctccaggcctctcccctgcaactcaggacccaagcccagctcactctgggaactgtgttcccagcatctctgtcctcttgattaagagattctccttccaggcctaagcctgggatttgggccagagataagaatccaaactatgaggctagttcttgtctaactcaagactgttctggaatgagggtccaggtgggactcttctggggacacttggggtccacaatcccaggtccatactctaggttttggataccatgagtatgtatgtttacctgtgcctaataaaggagaattatgaaataa

SEQ ID NO: 427630 - DNA, 2162 bp, Homo sapiens
  misc_feature (2142)..(2143): n is a, c, g, or t
gagccgagatcgcgccaccgccctccagcctgggcgacagagcaagactctgtctcaaaaaaaaaaaaaaaaagagcaaattttttttccaaggtgatagggagagtccgtggctgatgtctgcactgaccagacgcccctagggggccagcgagggcgggtcccaggtgcagcggatgcagaggagagaggcccgggcgcggcgcgggggatggtgcgatcccgggcccgagggcatcagacggcggctgattagctccggtttgcatcacccggaccgggggattagctccggtttgcatcacccggaccgggggattagctccggtttgcatcacccggaccgggggccgggcgcgcacgagactcgcagcggaagtggaggcggctccgcgcgcgtccgctgctaggacccgggcagggctggagctgggctgggatcccgagctcggcagcagcgcagcgggccggcccacctgctggtgccctggaggctctgagccccggcggcgcccgggcccacgcggaacgacggggcgagatgcgagccacccctctggctgctcctgcgggttccctgtccaggaagaagcggttggagttggatgacaacttagataccgagcgtcccgtccagaaacgagctcgaagtgggccccagcccagactgcccccctgcctgttgcccctgagcccacctactgctccagatcgtgcaactgctgtggccactgcctcccgtcttgggccctatgtcctcctggagcccgaggagggcgggcgggcctaccaggccctgcactgccctacaggcactgagtatacctgcaaggtgtaccccgtccaggaagccctggccgtgctggagccctacgcgcggctgcccccgcacaagcatgtggctcggcccactgaggtcctggctggtacccagctcctctacgcctttttcactcggacccatggggacatgcacagcctggtgcgaagccgccaccgtatccctgagcctgaggctgccgtgctcttccgccagatggccaccgccctggcgcactgtcaccagcacggtctggtcctgcgtgatctcaagctgtgtcgctttgtcttcgctgaccgtgagaggaagaagctggtgctggagaacctggaggactcctgcgtgctgactgggccagatgattccctgtgggacaagcacgcgtgcccagcctacgtgggacctgagatactcagctcacgggcctcatactcgggcaaggcagccgatgtctggagcctgggcgtggcgctcttcaccatgctggccggccactaccccttccaggactcggagcctgtcctgctcttcggcaagatccgccgcggggcctacgccttgcctgcaggcctctcggcccctgcccgctgtctggttcgctgcctccttcgtcgggagccagctgaacggctcacagccacaggcatcctcctgcacccctggctgcgacaggacccgatgcccttagctccaacccgatcccatctctgggaggctgcccaggtggtccctgatggactggggctggacgaagccagggaagaggagggagacagagaagtggttctgtatggctaggaccaccctactacacgctcagctgccaacagtggattgagtttgggggtagctccaagccttctcctgcctctgaactgagccaaaccttcagtgccttccagaagggagaaaggcagaagcctgtgtggagtgtgctgtgtacacatctgctttgttccacacacatgcagttcctgcttgggtgcttatcaggtgccaagccctgttctcggtgctgggagtacagcagtgagcaaaggagacaatattccctgctcacagagatgacaaactggcatccttgagctgacaacacttttccatgaccataggtcactgtctacactgggtacactttgtaccagtgtcggcctccactgatgctggtgctcaggcacctctgtccaaggacaatccctttcacaaacaaaccagctgcctttgtatcttgtaccttttcagagaaagggaggtatccctgtgccaaaggctccaggcctctcccctgcaactcgaaagccccaagcggcaactcgaaagcnncaagcgggggatcctctaa

SEQ ID NO: 427631 - DNA, 1880 bp, Homo sapiens
gagccgagatcgcgccaccgccctccagcctgggcgacagagcaagactctgtctcaaaaaaaaaaaaaaaaagagcaaattttttttccaaggtgatagggagagtccgtggctgatgtctgcactgaccagacgcccctagggggccagcgagggcgggtcccaggtgcagcggatgcagaggagagaggcccgggcgcggcgcgggggatggtgcgatcccgggcccgagggcatcagacggcggctgattagctccggtttgcatcacccggaccgggggattagctccggtttgcatcacccggaccgggggattagctccggtttgcatcacccggaccgggggccgggcgcgcacgagactcgcagcggaagtggaggcggctccgcgcgcgtccgctgctaggacccgggcagggctggagctgggctgggatcccgagctcggcagcagcgcagcgggccggcccacctgctggtgccctggaggctctgagccccggcggcgcccgggcccacgcggaacgacggggcgagatgcgagccacccctctggctgctcctgcgggttccctgtccaggaagaagcggttggagttggatgacaacttagataccgagcgtcccgtccagaaacgagctcgaagtgggccccagcccagactgcccccctgcctgttgcccctgagcccacctactgctccagatcgtgcaactgctgtggccactgcctcccgtcttgggccctatgtcctcctggagcccgaggagggcgggcgggcctaccaggccctgcactgccctacaggcactgagtatacctgcaaggtgtaccccgtccaggaagccctggccgtgctggagccctacgcgcggctgcccccgcacaagcatgtggctcggcccactgaggtcctggctggtacccagctcctctacgcctttttcactcggacccatggggacatgcacagcctggtgcgaagccgccaccgtatccctgagcctgaggctgccgtgctcttccgccagatggccaccgccctggcgcactgtcaccagcacggtctggtcctgcgtgatctcaagctgtgtcgctttgtcttcgctgaccgtgagaggaagaagctggtgctggagaacctggaggactcctgcgtgctgactgggccagatgattccctgtgggacaagcacgcgtgcccagcctacgtgggacctgagatactcagctcacgggcctcatactcgggcaaggcagccgatgtctggagcctgggcgtggcgctcttcaccatgctggccggccactaccccttccaggactcggagcctgtcctgctcttcggcaagatccgccgcggggcctacgccttgcctgcaggcctctcggcccctgcccgctgtctggttcgctgcctccttcgtcgggagccagctgaacggctcacagccacaggcatcctcctgcacccctggctgcgacaggacccgatgcccttagctccaacccgatcccatcttctgggaactgtgttcccagcatctctgtcctcttgattaagagattctccttccaggcctaagcctgggatttgggccagagataagaatccaaactatgaggctagttcttgtctaactcaagactgttctggaatgagggtccaggcctgtcaaccatggggcttctgacctgagcaccaaggttgagggacaggattaggcagggtctgtcctgtggccacctggaaagtcccaggtgggactcttctggggacacttggggtccacaatcccaggtccatactctaggttttggataccatgagtatgtatgtttacctgtgcctaataaaggagaattatgaaataa

SEQ ID NO: 427632 - DNA, 2020 bp, Homo sapiens
gttgggctggggaagccaggacggaggtgtccggccgtcacccctagaggagggcgtgcgggggtctgttttgcatgcgagccacccctctggctgctcctgcgggttccctgtccaggaagaagcggttggagttggatgacaacttagataccgagcgtcccgtccagaaacgagctcgaagtgggccccagcccagactgcccccctgcctgttgcccctgagcccacctactgctccagatcgtgcaactgctgtggccactgcctcccgtcttgggccctatgtcctcctggagcccgaggagggcgggcgggcctaccaggccctgcactgccctacaggcactgagtatacctgcaaggtgtaccccgtccaggaagccctggccgtgctggagccctacgcgcggctgcccccgcacaagcatgtggctcggcccactgaggtcctggctggtacccagctcctctacgcctttttcactcggacccatggggacatgcacagcctggtgcgaagccgccaccgtatccctgagcctgaggctgccgtgctcttccgccagatggccaccgccctggcgcactgtcaccagcacggtctggtcctgcgtgatctcaagctgtgtcgctttgtcttcgctgaccgtgagaggaagaagctggtgctggagaacctggaggactcctgcgtgctgactgggccagatgattccctgtgggacaagcacgcgtgcccagcctacgtgggacctgagatactcagctcacgggcctcatactcgggcaaggcagccgatgtctggagcctgggcgtggcgctcttcaccatgctggccggccactaccccttccaggactcggagcctgtcctgctcttcggcaagatccgccgcggggcctacgccttgcctgcaggcctctcggcccctgcccgctgtctggttcgctgcctccttcgtcgggagccagctgaacggctcacagccacaggcatcctcctgcacccctggctgcgacaggacccgatgcccttagctccaacccgatcccatctctgggaggctgcccaggtggtccctgatggactggggctggacgaagccagggaagaggagggagacagagaagtggttctgtatggctaggaccaccctactacacgctcagctgccaacagtggattgagtttgggggtagctccaagccttctcctgcctctgaactgagccaaaccttcagtgccttccagaagggagaaaggcagaagcctgtgtggagtgtgctgtgtacacatctgctttgttccacacacatgcagttcctgcttgggtgcttatcaggtgccaagccctgttctcggtgctgggagtacagcagtgagcaaaggagacaatattccctgctcacagagatgacaaactggcatccttgagctgacaacacttttccatgaccataggtcactgtctacactgggtacactttgtaccagtgtcggcctccactgatgctggtgctcaggcacctctgtccaaggacaatccctttcacaaacaaaccagctgcctttgtatcttgtaccttttcagagaaagggaggtatccctgtgccaaaggctccaggcctctcccctgcaactcaggacccaagcccagctcactctgggaactgtgttcccagcatctctgtcctcttgattaagagattctccttccaggcctaagcctgggatttgggccagagataagaatccaaactatgaggctagttcttgtctaactcaagactgttctggaatgagggtccaggcctgtcaaccatggggcttctgacctgagcaccaaggttgagggacaggattaggcagggtctgtcctgtggccacctggaaagtcccaggtgggactcttctggggacacttggggtccacaatcccaggtccatactctaggttttggataccatgagtatgtatgtttacctgtgcctaataaaggagaattatgaaataa

SEQ ID NO: 427633 - DNA, 2027 bp, Homo sapiens
cacagaccccgccgtcggggcgcggccaggtcagatcccttttgatccgggcctgggctgagtgctccccccgggcttcagatgcgagccacccctctggctgctcctgcgggttccctgtccaggaagaagcggttggagttggatgacaacttagataccgagcgtcccgtccagaaacgagctcgaagtgggccccagcccagactgcccccctgcctgttgcccctgagcccacctactgctccagatcgtgcaactgctgtggccactgcctcccgtcttgggccctatgtcctcctggagcccgaggagggcgggcgggcctaccaggccctgcactgccctacaggcactgagtatacctgcaaggtgtaccccgtccaggaagccctggccgtgctggagccctacgcgcggctgcccccgcacaagcatgtggctcggcccactgaggtcctggctggtacccagctcctctacgcctttttcactcggacccatggggacatgcacagcctggtgcgaagccgccaccgtatccctgagcctgaggctgccgtgctcttccgccagatggccaccgccctggcgcactgtcaccagcacggtctggtcctgcgtgatctcaagctgtgtcgctttgtcttcgctgaccgtgagaggaagaagctggtgctggagaacctggaggactcctgcgtgctgactgggccagatgattccctgtgggacaagcacgcgtgcccagcctacgtgggacctgagatactcagctcacgggcctcatactcgggcaaggcagccgatgtctggagcctgggcgtggcgctcttcaccatgctggccggccactaccccttccaggactcggagcctgtcctgctcttcggcaagatccgccgcggggcctacgccttgcctgcaggcctctcggcccctgcccgctgtctggttcgctgcctccttcgtcgggagccagctgaacggctcacagccacaggcatcctcctgcacccctggctgcgacaggacccgatgcccttagctccaacccgatcccatctctgggaggctgcccaggtggtccctgatggactggggctggacgaagccagggaagaggagggagacagagaagtggttctgtatggctaggaccaccctactacacgctcagctgccaacagtggattgagtttgggggtagctccaagccttctcctgcctctgaactgagccaaaccttcagtgccttccagaagggagaaaggcagaagcctgtgtggagtgtgctgtgtacacatctgctttgttccacacacatgcagttcctgcttgggtgcttatcaggtgccaagccctgttctcggtgctgggagtacagcagtgagcaaaggagacaatattccctgctcacagagatgacaaactggcatccttgagctgacaacacttttccatgaccataggtcactgtctacactgggtacactttgtaccagtgtcggcctccactgatgctggtgctcaggcacctctgtccaaggacaatccctttcacaaacaaaccagctgcctttgtatcttgtaccttttcagagaaagggaggtatccctgtgccaaaggctccaggcctctcccctgcaactcaggacccaagcccagctcactctgggaactgtgttcccagcatctctgtcctcttgattaagagattctccttccaggcctaagcctgggatttgggccagagataagaatccaaactatgaggctagttcttgtctaactcaagactgttctggaatgagggtccaggcctgtcaaccatggggcttctgacctgagcaccaaggttgagggacaggattaggcagggtctgtcctgtggccacctggaaagtcccaggtgggactcttctggggacacttggggtccacaatcccaggtccatactctaggttttggataccatgagtatgtatgtttacctgtgcctaataaaggagaattatgaaataa

SEQ ID NO: 427634 - DNA, 2472 bp, Homo sapiens
gagccgagatcgcgccaccgccctccagcctgggcgacagagcaagactctgtctcaaaaaaaaaaaaaaaaagagcaaattttttttccaaggtgatagggagagtccgtggctgatgtctgcactgaccagacgcccctagggggccagcgagggcgggtcccaggtgcagcggatgcagaggagagaggcccgggcgcggcgcgggggatggtgcgatcccgggcccgagggcatcagacggcggctgattagctccggtttgcatcacccggaccgggggattagctccggtttgcatcacccggaccgggggattagctccggtttgcatcacccggaccgggggccgggcgcgcacgagactcgcagcggaagtggaggcggctccgcgcgcgtccgctgctaggacccgggcagggctggagctgggctgggatcccgagctcggcagcagcgcagcgggccggcccacctgctggtgccctggaggctctgagccccggcggcgcccgggcccacgcggaacgacggggcgagatgcgagccacccctctggctgctcctgcgggttccctgtccaggaagaagcggttggagttggatgacaacttagataccgagcgtcccgtccagaaacgagctcgaagtgggccccagcccagactgcccccctgcctgttgcccctgagcccacctactgctccagatcgtgcaactgctgtggccactgcctcccgtcttgggccctatgtcctcctggagcccgaggagggcgggcgggcctaccaggccctgcactgccctacaggcactgagtatacctgcaaggtgtaccccgtccaggaagccctggccgtgctggagccctacgcgcggctgcccccgcacaagcatgtggctcggcccactgaggtcctggctggtacccagctcctctacgcctttttcactcggacccatggggacatgcacagcctggtgcgaagccgccaccgtatccctgagcctgaggctgccgtgctcttccgccagatggccaccgccctggcgcactgtcacctgcgtgatctcaagctgtgtcgctttgtcttcgctgaccgtgagaggaagaagctggtgctggagaacctggaggactcctgcgtgctgactgggccagatgattccctgtgggacaagcacgcgtgcccagcctacgtgggacctgagatactcagctcacgggcctcatactcgggcaaggcagccgatgtctggagcctgggcgtggcgctcttcaccatgctggccggccactaccccttccaggactcggagcctgtcctgctcttcggcaagatccgccgcggggcctacgccttgcctgcaggcctctcggcccctgcccgctgtctggttcgctgcctccttcgtcgggagccagctgaacggctcacagccacaggcatcctcctgcacccctggctgcgacaggacccgatgcccttagctccaacccgatcccatctctgggaggctgcccaggtggtccctgatggactggggctggacgaagccagggaagaggagggagacagagaagtggttctgtatggctaggaccaccctactacacgctcagctgccaacagtggattgagtttgggggtagctccaagccttctcctgcctctgaactgagccaaaccttcagtgccttccagaagggagaaaggcagaagcctgtgtggagtgtgctgtgtacacatctgctttgttccacacacatgcagttcctgcttgggtgcttatcaggtgccaagccctgttctcggtgctgggagtacagcagtgagcaaaggagacaatattccctgctcacagagatgacaaactggcatccttgagctgacaacacttttccatgaccataggtcactgtctacactgggtacactttgtaccagtgtcggcctccactgatgctggtgctcaggcacctctgtccaaggacaatccctttcacaaacaaaccagctgcctttgtatcttgtaccttttcagagaaagggaggtatccctgtgccaaaggctccaggcctctcccctgcaactcaggacccaagcccagctcactctgggaactgtgttcccagcatctctgtcctcttgattaagagattctccttccaggcctaagcctgggatttgggccagagataagaatccaaactatgaggctagttcttgtctaactcaagactgttctggaatgagggtccaggcctgtcaaccatggggcttctgacctgagcaccaaggttgagggacaggattaggcagggtctgtcctgtggccacctggaaagtcccaggtgggactcttctggggacacttggggtccacaatcccaggtccatactctaggttttggataccatgagtatgtatgtttacctgtgcctaataaaggagaattatgaaataa

SEQ ID NO: 427635 - DNA, 2126 bp, Homo sapiens
gatcagacggcggctgattagctccggtttgcatcacccggaccgggggattagctccggttggcatcagacggcggctgattagctccggtttgcatcacccggaccgggggattagctccggtttgcatcacccggaccgggggattagctccggtttgcatcacccggaccgggggccgggcgcgcacgagaatgcgagccacccctctggctgctcctgcgggttccctgtccaggaagaagcggttggagttggatgacaacttagataccgagcgtcccgtccagaaacgagctcgaagtgggccccagcccagactgcccccctgcctgttgcccctgagcccacctactgctccagatcgtgcaactgctgtggccactgcctcccgtcttgggccctatgtcctcctggagcccgaggagggcgggcgggcctaccaggccctgcactgccctacaggcactgagtatacctgcaaggtgtaccccgtccaggaagccctggccgtgctggagccctacgcgcggctgcccccgcacaagcatgtggctcggcccactgaggtcctggctggtacccagctcctctacgcctttttcactcggacccatggggacatgcacagcctggtgcgaagccgccaccgtatccctgagcctgaggctgccgtgctcttccgccagatggccaccgccctggcgcactgtcacctgcgtgatctcaagctgtgtcgctttgtcttcgctgaccgtgagaggaagaagctggtgctggagaacctggaggactcctgcgtgctgactgggccagatgattccctgtgggacaagcacgcgtgcccagcctacgtgggacctgagatactcagctcacgggcctcatactcgggcaaggcagccgatgtctggagcctgggcgtggcgctcttcaccatgctggccggccactaccccttccaggactcggagcctgtcctgctcttcggcaagatccgccgcggggcctacgccttgcctgcaggcctctcggcccctgcccgctgtctggttcgctgcctccttcgtcgggagccagctgaacggctcacagccacaggcatcctcctgcacccctggctgcgacaggacccgatgcccttagctccaacccgatcccatctctgggaggctgcccaggtggtccctgatggactggggctggacgaagccagggaagaggagggagacagagaagtggttctgtatggctaggaccaccctactacacgctcagctgccaacagtggattgagtttgggggtagctccaagccttctcctgcctctgaactgagccaaaccttcagtgccttccagaagggagaaaggcagaagcctgtgtggagtgtgctgtgtacacatctgctttgttccacacacatgcagttcctgcttgggtgcttatcaggtgccaagccctgttctcggtgctgggagtacagcagtgagcaaaggagacaatattccctgctcacagagatgacaaactggcatccttgagctgacaacacttttccatgaccataggtcactgtctacactgggtacactttgtaccagtgtcggcctccactgatgctggtgctcaggcacctctgtccaaggacaatccctttcacaaacaaaccagctgcctttgtatcttgtaccttttcagagaaagggaggtatccctgtgccaaaggctccaggcctctcccctgcaactcaggacccaagcccagctcactctgggaactgtgttcccagcatctctgtcctcttgattaagagattctccttccaggcctaagcctgggatttgggccagagataagaatccaaactatgaggctagttcttgtctaactcaagactgttctggaatgagggtccaggcctgtcaaccatggggcttctgacctgagcaccaaggttgagggacaggattaggcagggtctgtcctgtggccacctggaaagtcccaggtgggactcttctggggacacttggggtccacaatcccaggtccatactctaggttttggataccatgagtatgtatgtttacctgtgcctaataaaggagaattatgaaataa

SEQ ID NO: 427636 - DNA, 2055 bp, Homo sapiens
gatcagacggcggctgattagctccggtttgcatcacccggaccgggggattagctccggttggcatcagacggcggctgattagctccggtttgcatcacccggaccgggggattagctccttgcatcacccggaccgggggattagctccggggtttgcatcacccggaccgggggattagctccggtttgcatcacccggaccgggggccgggcgcgcacgagactcgcagcggaagtggaggcggctccgcgcgcgtccgctgctaggacccgggcagggctggagctgggctgggatcccgagctcggcagcagcgcagcgggccggcccacctgctggtgccctggaggctctgagccccggcggcgcccgggcccacgcggaacgacggggcgagatgcgagccacccctctggctgctcctgcgggttccctgtccaggaagaagcggttggagttggatgacaacttagataccgagcgtcccgtccagaaacgagctcgaagtgggccccagcccagactgcccccctgcctgttgcccctgagcccacctactgctccagatcgtgcaactgctgtggccactgcctcccgtcttgggccctatgtcctcctggagcccgaggagggcgggcgggcctaccaggccctgcactgccctacaggcactgagtatacctgcaaggaagaagctggtgctggagaacctggaggactcctgcgtgctgactgggccagatgattccctgtgggacaagcacgcgtgcccagcctacgtgggacctgagatactcagctcacgggcctcatactcgggcaaggcagccgatgtctggagcctgggcgtggcgctcttcaccatgctggccggccactaccccttccaggactcggagcctgtcctgctcttcggcaagatccgccgcggggcctacgccttgcctgcaggcctctcggcccctgcccgctgtctggttcgctgcctccttcgtcgggagccagctgaacggctcacagccacaggcatcctcctgcacccctggctgcgacaggacccgatgcccttagctccaacccgatcccatctctgggaggctgcccaggtggtccctgatggactggggctggacgaagccagggaagaggagggagacagagaagtggttctgtatggctaggaccaccctactacacgctcagctgccaacagtggattgagtttgggggtagctccaagccttctcctgcctctgaactgagccaaaccttcagtgccttccagaagggagaaaggcagaagcctgtgtggagtgtgctgtgtacacatctgctttgttccacacacatgcagttcctgcttgggtgcttatcaggtgccaagccctgttctcggtgctgggagtacagcagtgagcaaaggagacaatattccctgctcacagagatgacaaactggcatccttgagctgacaacacttttccatgaccataggtcactgtctacactgggtacactttgtaccagtgtcggcctccactgatgctggtgctcaggcacctctgtccaaggacaatccctttcacaaacaaaccagctgcctttgtatcttgtaccttttcagagaaagggaggtatccctgtgccaaaggctccaggcctctcccctgcaactcaggacccaagcccagctcactctgggaactgtgttcccagcatctctgtcctcttgattaagagattctccttccaggcctaagcctgggatttgggccagagataagaatccaaactatgaggctagttcttgtctaactcaagactgttctggaatgagggtccaggcctgtcaaccatggggcttctgacctgagcaccaaggttgagggacaggattaggcagggtctgtcctgtggccacctggaaagtcccaggtgggactcttctggggacacttggggtccacaatcccaggtccatactctaggttttggataccatgagtatgtatgtttacctgtgcctaataaaggagaattatgaaataa

SEQ ID NO: 427637 - DNA, 1187 bp, Homo sapiens
  misc_feature (1116)..(1116): n is a, c, g, or t
  misc_feature (1124)..(1124): n is a, c, g, or t
  misc_feature (1130)..(1130): n is a, c, g, or t
  misc_feature (1141)..(1141): n is a, c, g, or t
  misc_feature (1143)..(1143): n is a, c, g, or t
  misc_feature (1150)..(1150): n is a, c, g, or t
gagccgagatcgcgccaccgccctccagcctgggcgacagagcaagactctgtctcaaaaaaaaaaaaaaaaagagcaaattttttttccaaggtgatagggagagtccgtggctgatgtctgcactgaccagacgcccctagggggccagcgagggcgggtcccaggtgcagcggatgcagaggagagaggcccgggcgcggcgcgggggatggtgcgatcccgggcccgagggcatcagacggcggctgattagctccggtttgcatcacccggaccgggggattagctccggtttgcatcacccggaccgggggattagctccggtttgcatcacccggaccgggggccgggcgcgcacgagactcgcagcggaagtggaggcggctccgcgcgcgtccgctgctaggacccgggcagggctggagctgggctgggatcccgagctcggcagcagcgcagcgggccggcccacctgctggtgccctggaggctctgagccccggcggcgcccgggcccacgcggaacgacggggcgagatgcgagccacccctctggctgctcctgcgggttccctgtccaggaagaagcggttggagttggatgacaacttagataccgagcgtcccgtccagaaacgagctcgaagtgggccccagcccagactgcccccctgcctgttgcccctgagcccacctactgctccagatcgtgcaactgctgtggccactgcctcccgtcttgggccctatgtcctcctggagcccgaggagggcgggcgggcctaccaggccctgcactgccctacaggcactgagtatacctgcaaggtgtaccccgtccaggaagccctggccgtgctggagccctacgcgcggctgcccccgcacaagcatgtggctcggcccactgaggtcctggctggtacccagctcctctacgcctttttcactcggacccatggggacatgcacagcctggtgcgaagccgccaccgtatccctgagcctgaggctgccgtgctcttccgccagatggccaccgccctggcgcactgtcaccagcacggtctggtcctgcgtgatctcaagctgtgtcgttgtttctgacgtgnaggaaaantgtgtngaactgggggncnggtgtgntggcaagttcctgtgcaggggtgcactagggccggaa

SEQ ID NO: 427638 - DNA, 3402 bp, Homo sapiens
gcaggggtggcctgggttggggcaccacagagagcccccgtggagtggtgaggggtgatgtgataaagtcaacggggggcattcgttccctcccctgggagcagaggcccttctagtgtgtcaggctctgggcggagggcagcagcccctgggcaggcatcggagcttccagcctggggagaccttggagatcatcttggccagagtgaagacccacccagggagggccaggaccacctgtgggctgtgcacatgtgaccctgacgaggatgtgccccaaactacatgtgatgttcttcatttccaaatcaatctggccacgtcggagtcatccttgccgcagcatcgcttgcacatgtgatgttcttcatttccaaatcaacctggccacgtcggagtcttccttgctgcagcatcgcttgcacatgtgatgttcttcatttccaaatcaacctggccacgtcggagtcatccttgctgcagcatcgcttgcacatgtgatgttcttcatttccaaatcaacctggccacgtcagagtcatccttgctgcagcatcgcttgcacatgtgatgttcttcatttccaaatcaatctggccacgtcggagtcatccttgctgcagcatcgcttgcacatgtgatgttcttcatttccaaatcaacctggccatgtcggagtcatccttgctgcagcatcgcttgcactcacctccagcccatacatcaatgggagagaaagggcctgagtttcagccagtaaataccctggaattgtgaggtatagctctaagaatgtgttacgtgactgaacggcttctgtaatgtccatcccagcagaattgagagccactgctatagctgatccttctctgaggctcaggtccttgcttgaaccttcccagcgcttgtctggcttctccttgtatgccccagcagcagggagctcattccctccactggatgggcaacttgcaaaaggaaaactcagagatgtttatcacagcattattcataatcaaaaaccaactgcaaacaccccaggttcaaattaaaaaacgacaggaaaaggattatgagtaagttctggtaaattcacccaatagaatcatcaccagaggttaaaaatgatcactgggaagcttatgtagcaacattgaaaggttttacaaagtgacactgagttaattttacagtatgattgtaaatatatgataaaatatgttgattttaaaaacaaacactacttgagcacttgctatgttttggtccctgtacttagtgttgtcacacattatctcacttagtctcccaactgcccagtaggttagttggtatttgccccttttacagatgaggaaacagagggtcagagtggttcagtggcctgcctgaggccttccagccagaacatcagccaggacttaaattcagacctactggtccctttaccacatcatgctgacatcaagaatagagaagggtgctatgagtattttatttttctttcagacttcctcttctgttgccattattggaaatttctaaggaaaagaagctttgggggctcatttgagggtgtgactccccaggaccagggagatgtttatgtccaactgataacatattttactctcttctccaggatgacatggaagcttaccggacccagaactgcttcctcaactccgagatccaccaggtcacaaagatctggagaaaggtggctgagaaggagaaggcccttctgacgaagtgcgcctacctccaagccagaaactgccaggtggaaagcaagtacctggccggtctgagaaggctgcaggaggccctgggggacgaagccagcgagtgctcagagctgctgaggcagcttgtccaggaggcactgcagtgggaagctggggaggcctcatctgacagcatcgagctgagccccatcagtaagtatgatgagtacggcttcctgacggtgcccgactatgaggtggaagacctgaagctgctggccaagatccaggcattggagtcacgatcccaccacctgctgggcctcgaggctgtggatcggccgctgagggagcgctgggctgccctgggcgatcttgtgccctcagccgagctcaagcagctactgcgggcaggagtaccccgtgaacaccggcctcgtgtctggaggtggctggtccacctccgtgtccagcacctgcacactccaggctgctaccaggaactgctgagccggggccaggcccgcgagcaccctgctgcccgccagattgagctggacctgaaccggaccttccccaacaacaaacacttcacctgccccacctccagcttccccgacaagctccgccgggtgctgctggccttctcctggcagaaccccaccatcggctactgccagggcctgaacaggctggcggccattgccctgctggtcctagaggaggaggagagcgccttctggtgcctggtggccattgtggagaccatcatgcccgctgattactactgcaacacgctgacggcatcccaggtggaccagcgggtgctccaggacctgctctcggagaagctgcccaggctgatggcccatctggggcagcaccacgtggatctctccctcgtcaccttcaactggttcctcgtggtctttgcggacagtctcattagcaacatcctccttcgggtctgggatgccttcctgtacgaggggacgaaggtggtgtttcgctatgccttggccattttcaagtacaacgagaaggagatcttgaggctacagaatggcctggaaatctaccagtacctgcgcttcttcaccaagaccatctccaacagccggaagctgatgaacatcgccttcaatgacatgaaccccttccgcatgaaacagctgcggcagctgcgcatggtccaccgggagcggctggaggctgagctgcgggagctggagcagcttaaggcagagtacctggagaggcgggcatcccggcgcagagctgtgtccgagggctgtgccagcgaggacgaggtggagggggaagcctgacttggccacctcccctccccacagccttcctcacccttggctggcagacccactggaggtcaggcacggaccagtggcccagccctgggtgtcccatcaccatgtgaccttggacatgtcccttcccctctctggccctcagtttccccactgggacattgtgtgctgcaaagccattggttgggctacttcttcataggcacttacttacccagggatgccaccctttcgtcacctcttccacagagcactttggcatgtaaacaagcaagagcactgcctctatagggtaacctggaacattctctaggttatatcaatataaaacaatgtaaatggtggaaatc

SEQ ID NO: 427639 - DNA, 3193 bp, Homo sapiens
ctccctttgggaagctgcccgccgagtctccgagatttgtccctggtggtcccgcggacccctcgtccctccgcagtctccggctggcagcgatggagggcgctggggagaacgccccggagtccagctcctctgcccctgggtccgaagagtctgccagggatccacaggtgccgcctccggaggaagaatcgggggactgcgcccggtccctggaggcggtccccaagaaactctgtgggtatttaagtaagttcggcggcaaagggcccatccggggctggaaatcccgctggttcttctacgacgaaaggaaatgtcagctgtattactcgcggaccgctcaggatgccaatcccttggacagcatcgacctctccagtgcagtgtttgactgtaaggcggacgctgaggaggggatcttcgaaatcaagactcccagccgggttattaccctgaaggccgccaccaagcaagcgatgctgtactggctgcagcagctgcagatgaagcgctgggaattccacaacagcccgccggcacctcctgccacccctgatgccgccctggctgggaatgggcccgtcctgcacctcgagctagggcaagaagaggcagagctggaggagttcctgtgccctgtgaaaacaccccctgggctagtgggcgtggcagctgccttgcagcccttccctgcccttcagaatatttccctcaagcacctggggactgaaatacagaacacaatgcacaacatccgtggcaacaagcaggcccagggaacaggccatgaacctccaggggaagattctccacagagtggggagcctcagagggaggagcagcccttggcctctgacgccagcaccccagggagagagccagaggattctccaaagcctgcacccaagccttctctgaccatcagtttcgctcagaaagccaagcgccagaacaacaccttcccattcttttctgaaggaatcacacggaaccgaactgcccaggagaaagtggcagccttggagcaacaggttctgatgctcaccaaggagttaaagtctcagaaggagctagtgaagatcctgcacaaggcactggaggccgcccagcaggagaagcgggcgtccagcgcatacctggcggcggctgaggacaaggaccggctggagctggtgcggcacaaagtgcggcagatcgcggagctgggccggcgggtggaggccctggagcaggagcgggagagcctggcgcacacagcgagcctgcgggagcagcaggtgcaggagctacagcagcacgtgcagctgcttatggacaagaaccacgccaagcagcaggtcatctgcaagctctctgagaaggtcacccaggacttcacgcacccccctgaccagtctcctttgcgccccgacgctgccaacagggacttcctgagccagcaggggaagatagagcacctgaaggatgacatggaagcttaccggacccagaactgcttcctcaactccgagatccaccaggtcacaaagatctggagaaaggtggctgagaaggagaaggcccttctgacgaagtgcgcctacctccaagccagaaactgccaggtggaaagcaagtacctggccggtctgagaaggctgcaggaggccctgggggacgaagccagcgagtgctcagagctgctgaggcagcttgtccaggaggcactgcagtgggaagctggggaggcctcatctgacagcatcgagctgagccccatcagtaagtatgatgagtacggcttcctgacggtgcccgactatgaggtggaagacctgaagctgctggccaagatccaggcattggagtcacgatcccaccacctgctgggcctcgaggctgtggatcggccgctgagggagcgctgggctgccctgggcgatcttgtgccctcagccgagctcaagcagctactgcgggcaggagtaccccgtgaacaccggcctcgtgtctggaggtggctggtccacctccgtgtccagcacctgcacactccaggctgctaccaggaactgctgagccggggccaggcccgcgagcaccctgctgcccgccagattgagctggacctgaaccggaccttccccaacaacaaacacttcacctgccccacctccagcttccccgacaagctccgccgggtgctgctggccttctcctggcagaaccccaccatcggctactgccagggcctgaacaggctggcggccattgccctgctggtcctagaggaggaggagagcgccttctggtgcctggtggccattgtggagaccatcatgcccgctgattactactgcaacacgctgacggcatcccaggtggaccagcgggtgctccaggacctgctctcggagaagctgcccaggctgatggcccatctggggcagcaccacgtggatctctccctcgtcaccttcaactggttcctcgtggtctttgcggacagtctcattagcaacatcctccttcgggtctgggatgccttcctgtacgaggggacgaagtacaacgagaaggagatcttgaggctacagaatggcctggaaatctaccagtacctgcgcttcttcaccaagaccatctccaacagccggaagctgatgaacatcgccttcaatgacatgaaccccttccgcatgaaacagctgcggcagctgcgcatggtccaccgggagcggctggaggctgagctgcgggagctggagcagcttaaggcagagtacctggagaggcgggcatcccggcgcagagctgtgtccgagggctgtgccagcgaggacgaggtggagggggaagcctgacttggccacctcccctccccacagccttcctcacccttggctggcagacccactggaggtcaggcacggaccagtggcccagccctgggtgtcccatcaccatgtgaccttggacatgtcccttcccctctctggccctcagtttccccactgggacattgtgtgctgcaaagccattggttgggctacttcttcataggcacttacttacccagggatgccaccctttcgtcacctcttccacagagcactttggcatgtaaacaagcaagagcactgcctctatagggtaacctggaacattctctaggttatatcaatataaaacaatgtaaatggtggaaatc

SEQ ID NO: 427640 - DNA, 3084 bp, Homo sapiens
ctccctttgggaagctgcccgccgagtctccgagatttgtccctggtggtcccgcggacccctcgtccctccgcagtctccggctggcagcgatggagggcgctggggagaacgccccggagtccagctcctctgcccctgggtccgaagagtctgccagggatccacaggtgccgcctccggaggaagaatcgggggactgcgcccggtccctggaggcggtccccaagaaactctgtgggtatttaagtaagttcggcggcaaagggcccatccggggctggaaatcccgctggttcttctacgacgaaaggaaatgtcagctgtattactcgcggaccgctcaggatgccaatcccttggacagcatcgacctctccagtgcagtgtttgactgtaaggcggacgctgaggaggggatcttcgaaatcaagactcccagccgggttattaccctgaagggcaagaagaggcagagctggaggagttcctgtgccctgtgaaaacaccccctgggctagtgggcgtggcagctgccttgcagcccttccctgcccttcagaatatttccctcaagcacctggggactgaaatacagaacacaatgcacaacatccgtggcaacaagcaggcccagggaacaggccatgaacctccaggggaagattctccacagagtggggagcctcagagggaggagcagcccttggcctctgacgccagcaccccagggagagagccagaggattctccaaagcctgcacccaagccttctctgaccatcagtttcgctcagaaagccaagcgccagaacaacaccttcccattcttttctgaaggaatcacacggaaccgaactgcccaggagaaagtggcagccttggagcaacaggttctgatgctcaccaaggagttaaagtctcagaaggagctagtgaagatcctgcacaaggcactggaggccgcccagcaggagaagcgggcgtccagcgcatacctggcggcggctgaggacaaggaccggctggagctggtgcggcacaaagtgcggcagatcgcggagctgggccggcgggtggaggccctggagcaggagcgggagagcctggcgcacacagcgagcctgcgggagcagcaggtgcaggagctacagcagcacgtgcagctgcttatggacaagaaccacgccaagcagcaggtcatctgcaagctctctgagaaggtcacccaggacttcacgcacccccctgaccagtctcctttgcgccccgacgctgccaacagggacttcctgagccagcaggggaagatagagcacctgaaggatgacatggaagcttaccggacccagaactgcttcctcaactccgagatccaccaggtcacaaagatctggagaaaggtggctgagaaggagaaggcccttctgacgaagtgcgcctacctccaagccagaaactgccaggtggaaagcaagtacctggccggtctgagaaggctgcaggaggccctgggggacgaagccagcgagtgctcagagctgctgaggcagcttgtccaggaggcactgcagtgggaagctggggaggcctcatctgacagcatcgagctgagccccatcagtaagtatgatgagtacggcttcctgacggtgcccgactatgaggtggaagacctgaagctgctggccaagatccaggcattggagtcacgatcccaccacctgctgggcctcgaggctgtggatcggccgctgagggagcgctgggctgccctgggcgatcttgtgccctcagccgagctcaagcagctactgcgggcaggagtaccccgtgaacaccggcctcgtgtctggaggtggctggtccacctccgtgtccagcacctgcacactccaggctgctaccaggaactgctgagccggggccaggcccgcgagcaccctgctgcccgccagattgagctggacctgaaccggaccttccccaacaacaaacacttcacctgccccacctccagcttccccgacaagctccgccgggtgctgctggccttctcctggcagaaccccaccatcggctactgccagggcctgaacaggctggcggccattgccctgctggtcctagaggaggaggagagcgccttctggtgcctggtggccattgtggagaccatcatgcccgctgattactactgcaacacgctgacggcatcccaggtggaccagcgggtgctccaggacctgctctcggagaagctgcccaggctgatggcccatctggggcagcaccacgtggatctctccctcgtcaccttcaactggttcctcgtggtctttgcggacagtctcattagcaacatcctccttcgggtctgggatgccttcctgtacgaggggacgaaggtggtgtttcgctatgccttggccattttcaagtacaacgagaaggagatcttgaggctacagaatggcctggaaatctaccagtacctgcgcttcttcaccaagaccatctccaacagccggaagctgatgaacatcgccttcaatgacatgaaccccttccgcatgaaacagctgcggcagctgcgcatggtccaccgggagcggctggaggctgagctgcgggagctggagcagcttaaggcagagtacctggagaggcgggcatcccggcgcagagctgtgtccgagggctgtgccagcgaggacgaggtggagggggaagcctgacttggccacctcccctccccacagccttcctcacccttggctggcagacccactggaggtcaggcacggaccagtggcccagccctgggtgtcccatcaccatgtgaccttggacatgtcccttcccctctctggccctcagtttccccactgggacattgtgtgctgcaaagccattggttgggctacttcttcataggcacttacttacccagggatgccaccctttcgtcacctcttccacagagcactttggcatgtaaacaagcaagagcactgcctctatagggtaacctggaacattctctaggttatatcaatataaaacaatgtaaatggtggaaatc

SEQ ID NO: 427641 - DNA, 657 bp, Homo sapiens
ggggggacgaggtgaagaggaaggagagagaagatacagtgggggaaaggagtgagatgagaaagacgtaagtataaagatagaggaaggagcgagaagagaaagggagagaagagtaaagaagcacggcaaggggaagagaggaggcagaaggggagaaagacagaggagggaggaggagagcgggagcgagtaggaggaaggcagcgggaagggaggagagagagggaggatcgaacagagagggagacgggaaagaaaaggagggcggaagacgaaaaagacgggaagaggggaaaggggccacgggaggagagacctcccctccccacagccttcctcacccttggctggcagacccactggaggtcaggcacggaccagtggcccagccctgggtgtcccatcaccatgtgaccttggacatgtcccttcccctctctggccctcagtttccccactgggacattgtgtgctgcaaagccattggttgggctacttcttcataggcacttacttacccagggatgccaccctttcgtcacctcttccacagagcactttggcatgtaaacaagcaagagcactgcctctatagggtaacctggaacattctctaggttatatcaatataaaacaatgtaaatggtggaaatc

SEQ ID NO: 427642 - DNA, 3262 bp, Homo sapiens
ctccctttgggaagctgcccgccgagtctccgagatttgtccctggtggtcccgcggacccctcgtccctccgcagtctccggctggcagcgatggagggcgctggggagaacgccccggagtccagctcctctgcccctgggtccgaagagtctgccagggatccacaggtgccgcctccggaggaagaatcgggggactgcgcccggtccctggaggcggtccccaagaaactctgtgggtatttaagtaagttcggcggcaaagggcccatccggggctggaaatcccgctggttcttctacgacgaaaggaaatgtcagctgtattactcgcggaccgctcaggatgccaatcccttggacagcatcgacctctccagtgcagtgtttgactgtaaggcggacgctgaggaggggatcttcgaaatcaagactcccagccgggttattaccctgaaggccgccaccaagcaagcgatgctgtactggctgcagcagctgcagatgaagcgctgggaattccacaacagcccgccggcacctcctgccacccctgatgccgccctggctgggaatgggcccgtcctgcacctcgagctagggcaagaagaggcagagctggaggagttcctgtgccctgtgaaaacaccccctgggctagtgggcgtggcagctgccttgcagcccttccctgcccttcagaatatttccctcaagcacctggggactgaaatacagaacacaatgcacaacatccgtggcaacaagcaggcccagggaacaggccatgaacctccaggggaagattctccacagagtggggagcctcagagggaggagcagcccttggcctctgacgccagcaccccagggagagagccagaggattctccaaagcctgcacccaagccttctctgaccatcagtttcgctcagaaagccaagcgccagaacaacaccttcccattcttttctgaaggaatcacacggaaccgaactgcccaggagaaagtggcagccttggagcaacaggttctgatgctcaccaaggagttaaagtctcagaaggagctagtgaagatcctgcacaaggcactggaggccgcccagcaggagaagcgggcgtccagcgcatacctggcggcggctgaggacaaggaccggctggagctggtgcggcacaaagtgcggcagatcgcggagctgggccggcgggtggaggccctggagcaggagcgggagagcctggcgcacacagcgagcctgcgggagcagcaggtgcaggagctacagcagcacgtgcagctgcttatggacaagaaccacgccaagcagcaggtcatctgcaagctctctgagaaggtcacccaggacttcacgcacccccctgaccagtctcctttgcgccccgacgctgccaacagggacttcctgagccagcaggggaagatagagcacctgaaggatgacatggaagcttaccggacccagaactgcttcctcaactccgagatccaccaggtcacaaagatctggagaaaggtggctgagaaggagaaggcccttctgacgaagtgcgcctacctccaagccagaaactgccaggtggaaagcaagtacctggccggtctgagaaggctgcaggaggccctgggggacgaagccagcgagtgctcagagctgctgaggcagcttgtccaggaggcactgcagtgggaagctggggaggcctcatctgacagcatcgagctgagccccatcagtaagtatgatgagtacggcttcctgacggtgcccgactatgaggtggaagacctgaagctgctggccaagatccaggcattggagtcacgatcccaccacctgctgggcctcgaggctgtggatcggccgctgagggagcgctgggctgccctgggcgatcttgtgccctcagccgagctcaagcagctactgcgggcaggagtaccccgtgaacaccggcctcgtgtctggaggtggctggtccacctccgtgtccagcacctgcacactccaggctgctaccaggaactgctgagccggggccaggcccgcgagcaccctgctgcccgccagattgagctggacctgaaccggaccttccccaacaacaaacacttcacctgccccacctccagcttccccgacaagctccgccgggtgctgctggccttctcctggcagaaccccaccatcggctactgccagggcctgaacaggctggcggccattgccctgctggtcctagaggaggaggagagcgccttctggtgcctggtggccattgtggagaccatcatgcccgctgattactactgcaacacgctgacggcatcccaggtggaccagcgggtgctccaggacctgctctcggagaagctgcccaggctgatggcccatctggggcagcaccacgtggatctctccctcgtcaccttcaactggttcctcgtggtctttgcggacagtctcattagcaacatcctccttcgggtctgggatgccttcctgtacgaggggacgaaggtggtgtttcgctatgccttggccattttcaagtacaacgagaaggagatcttgaggctacagaatggcctggaaatctaccagtacctgcgcttcttcaccaagaccatctccaacagccggaagctgatgaacatcgccttcaatgacatgaaccccttccgcatgaaacagctgcggcagctgcgcatggtccaccgggagcggctggaggctgagctgcgggagctggagcagcttaaggcagagtacctggagaggcgggcatcccggcgcagagctgtgtccgagggctgtgccagcgaggacgaggtggagggggaagcctgacttggccacctcccctccccacagccttcctcacccttggctggcagacccactggaggtcaggcacggaccagtggcccagccctgggtgtcccatcaccatgtgaccttggacatgtcccttcccctctctggccctcagtttccccactgggacattgtgtgctgcaaagccattggttgggctacttcttcataggcacttacttacccagggatgccaccctttcgtcacctcttccacagagcactttggcatgtaaacaagcaagagcactgcctctatagggtaacctggaacattctctaggttatatcaatataaaacaatgtaaatggtggaaatcattcataagctttggaacttaaacagttctcagtta

SEQ ID NO: 427643 - DNA, 3118 bp, Homo sapiens
ctccctttgggaagctgcccgccgagtctccgagatttgtccctggtggtcccgcggacccctcgtccctccgcagtctccggctggcagcgatggagggcgctggggagaacgccccggagtccagctcctctgcccctgggtccgaagagtctgccagggatccacaggtgccgcctccggaggaagaatcgggggactgcgcccggtccctggaggcggtccccaagaaactctgtgggtatttaagtaagttcggcggcaaagggcccatccggggctggaaatcccgctggttcttctacgacgaaaggaaatgtcagctgtattactcgcggaccgctcaggatgccaatcccttggacagcatcgacctctccagtgcagtgtttgactgtaaggcggacgctgaggaggggatcttcgaaatcaagactcccagccgggttattaccctgaaggccgccaccaagcaagcgatgctgtactggctgcagcagctgcagatgaagcgctgggaattccacaacagcccgccggcacctcctgccacccctgatgccgccctggctgggaatgggcccgtcctgcacctcgagctagggcaagaagaggcagagctggaggagttcctgtgccctgtgaaaacaccccctgggctagtgggcgtggcagctgccttgcagcccttccctgcccttcagaatatttccctcaagcacctggggactgaaatacagaacacaatgcacaacatccgtggcaacaagcaggcccagggaacaggccatgaacctccaggggaagattctccacagagtggggagcctcagagggaggagcagcccttggcctctgacgccagcaccccaggaatcacacggaaccgaactgcccaggagaaagtggcagccttggagcaacaggttctgatgctcaccaaggagttaaagtctcagaaggagctagtgaagatcctgcacaaggcactggaggccgcccagcaggagaagcgggcgtccagcgcatacctggcggcggctgaggacaaggaccggctggagctggtgcggcacaaagtgcggcagatcgcggagctgggccggcgggtggaggccctggagcaggagcgggagagcctggcgcacacagcgagcctgcgggagcagcaggtgcaggagctacagcagcacgtgcagctgcttatggacaagaaccacgccaagcagcaggtcatctgcaagctctctgagaaggtcacccaggacttcacgcacccccctgaccagtctcctttgcgccccgacgctgccaacagggacttcctgagccagcaggggaagatagagcacctgaaggatgacatggaagcttaccggacccagaactgcttcctcaactccgagatccaccaggtcacaaagatctggagaaaggtggctgagaaggagaaggcccttctgacgaagtgcgcctacctccaagccagaaactgccaggtggaaagcaagtacctggccggtctgagaaggctgcaggaggccctgggggacgaagccagcgagtgctcagagctgctgaggcagcttgtccaggaggcactgcagtgggaagctggggaggcctcatctgacagcatcgagctgagccccatcagtaagtatgatgagtacggcttcctgacggtgcccgactatgaggtggaagacctgaagctgctggccaagatccaggcattggagtcacgatcccaccacctgctgggcctcgaggctgtggatcggccgctgagggagcgctgggctgccctgggcgatcttgtgccctcagccgagctcaagcagctactgcgggcaggagtaccccgtgaacaccggcctcgtgtctggaggtggctggtccacctccgtgtccagcacctgcacactccaggctgctaccaggaactgctgagccggggccaggcccgcgagcaccctgctgcccgccagattgagctggacctgaaccggaccttccccaacaacaaacacttcacctgccccacctccagcttccccgacaagctccgccgggtgctgctggccttctcctggcagaaccccaccatcggctactgccagggcctgaacaggctggcggccattgccctgctggtcctagaggaggaggagagcgccttctggtgcctggtggccattgtggagaccatcatgcccgctgattactactgcaacacgctgacggcatcccaggtggaccagcgggtgctccaggacctgctctcggagaagctgcccaggctgatggcccatctggggcagcaccacgtggatctctccctcgtcaccttcaactggttcctcgtggtctttgcggacagtctcattagcaacatcctccttcgggtctgggatgccttcctgtacgaggggacgaaggtggtgtttcgctatgccttggccattttcaagtacaacgagaaggagatcttgaggctacagaatggcctggaaatctaccagtacctgcgcttcttcaccaagaccatctccaacagccggaagctgatgaacatcgccttcaatgacatgaaccccttccgcatgaaacagctgcggcagctgcgcatggtccaccgggagcggctggaggctgagctgcgggagctggagcagcttaaggcagagtacctggagaggcgggcatcccggcgcagagctgtgtccgagggctgtgccagcgaggacgaggtggagggggaagcctgacttggccacctcccctccccacagccttcctcacccttggctggcagacccactggaggtcaggcacggaccagtggcccagccctgggtgtcccatcaccatgtgaccttggacatgtcccttcccctctctggccctcagtttccccactgggacattgtgtgctgcaaagccattggttgggctacttcttcataggcacttacttacccagggatgccaccctttcgtcacctcttccacagagcactttggcatgtaaacaagcaagagcactgcctctatagggtaacctggaacattctctaggttatatcaatataaaacaatgtaaatggtggaaatc

SEQ ID NO: 427644 - DNA, 2750 bp, Homo sapiens
ctccctttgggaagctgcccgccgagtctccgagatttgtccctggtggtcccgcggacccctcgtccctccgcagtctccggctggcagcgatggagggcgctggggagaacgccccggagtccagctcctctgcccctgggtccgaagagtctgccagggatccacaggtgccgcctccggaggaagaatcgggggactgcgcccggtccctggaggcggtccccaagaaactctgtgggtatttaagtaagttcggcggcaaagggcccatccggggctggaaatcccgctggttcttctacgacgaaaggaaatgtcagctgtattactcgcggaccgctcaggatgccaatcccttggacagcatcgacctctccagtgcagtgtttgactgtaaggcggacgctgaggaggggatcttcgaaatcaagactcccagccgggttattaccctgaaggccgccaccaagcaagcgatgctgtactggctgcagcagctgcagatgaagcgctgggaattccacaacagcccgccggcacctcctgccacccctgatgccgccctggctgggaatgggcccgtcctgcacctcgagctagggcaagaagaggcagagctggaggagttcctgtgccctgtgaaaacaccccctgggctagtgggcgtggcagctgccttgcagcccttccctgcccttcagaatatttccctcaagcacctggggactgaaatacagaacacaatgcacaacatccgtggcaacaagcaggcccagggaacaggccatgaacctccaggggaagattctccacagagtggggagcctcagagggaggagcagcccttggcctctgacgccagcaccccagggagagagccagaggattctccaaagcctgcacccaagccttctctgaccatcagtttcgctcagaaagccaagcgccagaacaacaccttcccattcttttctgaaggaatcacacggaaccgaactgcccaggagaaagtggcagccttggagcaacaggttctgatgctcaccaaggagttaaagtctcagaaggagctagtgaagatcctgcacaaggcactggaggccgcccagcaggagaagcgggcgtccagcgcatacctggcggcggctgaggacaaggaccggctggagctggtgcggcacaaagtgcggcagatcgcggaagctgctgaggcagcttgtccaggaggcactgcagtgggaagctggggaggcctcatctgacagcatcgagctgagccccatcagtaagtatgatgagtacggcttcctgacggtgcccgactatgaggtggaagacctgaagctgctggccaagatccaggcattggagtcacgatcccaccacctgctgggcctcgaggctgtggatcggccgctgagggagcgctgggctgccctgggcgatcttgtgccctcagccgagctcaagcagctactgcgggcaggagtaccccgtgaacaccggcctcgtgtctggaggtggctggtccacctccgtgtccagcacctgcacactccaggctgctaccaggaactgctgagccggggccaggcccgcgagcaccctgctgcccgccagattgagctggacctgaaccggaccttccccaacaacaaacacttcacctgccccacctccagcttccccgacaagctccgccgggtgctgctggccttctcctggcagaaccccaccatcggctactgccagggcctgaacaggctggcggccattgccctgctggtcctagaggaggaggagagcgccttctggtgcctggtggccattgtggagaccatcatgcccgctgattactactgcaacacgctgacggcatcccaggtggaccagcgggtgctccaggacctgctctcggagaagctgcccaggctgatggcccatctggggcagcaccacgtggatctctccctcgtcaccttcaactggttcctcgtggtctttgcggacagtctcattagcaacatcctccttcgggtctgggatgccttcctgtacgaggggacgaaggtggtgtttcgctatgccttggccattttcaagtacaacgagaaggagatcttgaggctacagaatggcctggaaatctaccagtacctgcgcttcttcaccaagaccatctccaacagccggaagctgatgaacatcgccttcaatgacatgaaccccttccgcatgaaacagctgcggcagctgcgcatggtccaccgggagcggctggaggctgagctgcgggagctggagcagcttaaggcagagtacctggagaggcgggcatcccggcgcagagctgtgtccgagggctgtgccagcgaggacgaggtggagggggaagcctgacttggccacctcccctccccacagccttcctcacccttggctggcagacccactggaggtcaggcacggaccagtggcccagccctgggtgtcccatcaccatgtgaccttggacatgtcccttcccctctctggccctcagtttccccactgggacattgtgtgctgcaaagccattggttgggctacttcttcataggcacttacttacccagggatgccaccctttcgtcacctcttccacagagcactttggcatgtaaacaagcaagagcactgcctctatagggtaacctggaacattctctaggttatatcaatataaaacaatgtaaatggtggaaatc

SEQ ID NO: 427645 - DNA, 3113 bp, Homo sapiens
ctccctttgggaagctgcccgccgagtctccgagatttgtccctggtggtcccgcggacccctcgtccctccgcagtctccggctggcagcgatggagggcgctggggagaacgccccggagtccagctcctctgcccctgggtccgaagagtctgccagggatccacaggtgccgcctccggaggaagaatcgggggactgcgcccggtccctggaggcggtccccaagaaactctgtgggtatttaagtaagttcggcggcaaagggcccatccggggctggaaatcccgctggttcttctacgacgaaaggaaatgtcagctgtattactcgcggaccgctcaggatgccaatcccttggacagcatcgacctctccagtgcagtgtttgactgtaaggcggacgctgaggaggggatcttcgaaatcaagactcccagccgggttattaccctgaaggccgccaccaagcaagcgatgctgtactggctgcagcagctgcagatgaagcgctgggaattccacaacagcccgccggcacctcctgccacccctgatgccgccctggctgggaatgggcccgtcctgcacctcgagctagggcaagaagaggcagagctggaggagttcctgtgccctgtgaaaacaccccctgggctagtgggcgtggcagctgccttgcagcccttccctgcccttcagaatatttccctcaagcacctggggactgaaatacagaacacaatgcacaacatccgtggcaacaagcaggcccagggaacaggccatgaacctccaggggaagattctccacagagtggggagcctcagagggaggagcagcccttggcctctgacgccagcaccccagggagagagccagaggattctccaaagcctgcacccaagccttctctgaccatcagtttcgctcagaaagccaagcgccagaacaacaccttcccattcttttctgaaggaatcacacggaaccgaactgcccaggagaaagtggcagccttggagcaacaggttctgatgctcaccaaggagttaaagtctcagaaggagctagtgaagatcctgcacaaggcactggaggccgcccagcaggagaagcgggcgtccagcgcatacctggcggcggctgaggacaaggaccggctggagctggtgcggcacaaagtgcggcagatcgcggagctgggccggcgggtggaggccctggagcaggagcgggagagcctggcgcacacagcgagcctgcgggagcagcaggtgcaggagctacagcagcacgtgcagctgcttatggacaagaaccacgccaagcagcaggtcatctgcaagctctctgagaaggtcacccaggacttcacgcacccccctgaccagtctcctttgcgccccgacgctgccaacagggacttcctgagccagcaggggaagatagagcacctgaaggatgacatggaagcttaccggacccagaactgcttcctcaactccgagatccaccaggtcacaaagatctggagaaaggtggctgagaaggagaaggcccttctgacgaagtgcgcctacctccaagccagaaactgccaggtggaaagcaagtacctggccggtctgagaaggctgcaggaggccctgggggacgaagccagcgagtgctcagagctgctgaggcagcttgtccaggaggcactgcagtgggaagctggggaggcctcatctgacagcatcgagctgagccccatcagtaagtatgatgagtacggcttcctgacggtgcccgactatgaggtggaagacctgaagctgctggccaagatccaggcattggagtcacgatcccaccacctgctgggcctcgaggctgtggatcggccgctgagggagcgctgggctgccctgggcgatcttgtgccctcagccgagctcaagcagctactgcgggcaggagtaccccgtgaacaccggcctcgtgtctggaggtggctggtccacctccgtgtccagcacctgcacactccaggctgctaccaggaactgctgagccggggccaggcccgcgagcaccctgctgcccgccagattgagctggacctgaaccggaccttccccaacaacaaacacttcacctgccccacctccagcttccccgacaagctccgccgggtgctgctggccttctcctggcagaaccccaccatcggctactgccagggcctgaacaggctggcggccattgccctgctggtcctagaggaggaggagagcgccttctggtgcctggtggccattgtggagaccatcatgcccgctgattactactgcaacacgctgacggcatcccaggtggaccagcgggtgctccaggacctgctctcggagaagctgcccaggctgatggcccatctggggcagcaccacgtggatctctccctcgtcaccttcaactggttcctcgtggtctttgcggacagtctcattagcaacatcctccttcgggtctgggatgccttcctgtacgaggggacgaaggtggtgtttcgctatgccttggccattttcaagtacaacgagaaggagatcttgaggctacagaatggcctggaaatctaccagtacctgcgcttcttcaccaagaccatctccaacagccggaagctgatgaacatcgccttcaatgacatgaaccccttccgcatgaaacagctgcggcagctgcgcatggtccaccgggagcggctggaggctgagctgcgggagctggagcagcttaaggcagagtacctggagaggcgggcatcccggcgcagagctgtgtccgagggctgtgccagcgaggacgaggtggagggggaagcctgacttggccacctcccctccccacagccttcctcacccttggctggcagacccactggaggtcaggcacggaccagtggcccagccctgggtgtcccatcaccatgtgaccttggacatgtcccttcccctctctggccctcagtttccccactgggacattgtgtgctgcaaagccattggttgggctacttcttcataggcactgtttggactctgggcactgtttggactctg

SEQ ID NO: 427646 - DNA, 2350 bp, Homo sapiens
ctccctttgggaagctgcccgccgagtctccgagatttgtccctggtggtcccgcggacccctcgtccctccgcagtctccggctggcagcgatggagggcgctggggagaacgccccggagtccagctcctctgcccctgggtccgaagagtctgccagggatccacaggtgccgcctccggaggaagaatcgggggactgcgcccggtccctggaggcggtccccaagaaactctgtgggtatttaagtaagttcggcggcaaagggcccatccggggctggaaatcccgctggttcttctacgacgaaaggaaatgtcagctgtattactcgcggaccgctcaggatgccaatcccttggacagcatcgacctctccagtgcagtgtttgactgtaaggcggacgctgaggaggggatcttcgaaatcaagactcccagccgggttattaccctgaaggccgccaccaagcaagcgatgctgtactggctgcagcagctgcagatgaagcgctgggaattccacaacagcccgccggcacctcctgccacccctgatgccgccctggctgggaatgggcccgtcctgcacctcgagctagggcaagaagaggcagagctggaggagttcctgtgccctgtgaaaacaccccctgggctagtgggcgtggcagctgccttgcagcccttccctgcccttcagaatatttccctcaagcacctggggactgaaatacagaacacaatgcacaacatccgtggcaacaagcaggcccagggaacaggccatgaacctccaggggaagattctccacagagtggggagcctcagagggaggagcagcccttggcctctgacgccagcaccccagggagagagccagaggattctccaaagcctgcacccaagccttctctgaccatcagtttcgctcagaaagccaagcgccagaacaacaccttcccattcttttctgaaggaatcacacggaaccgaactgcccaggagaaagtggcagccttggagcaacaggttctgatgctcaccaaggagttaaagtctcagaaggagctagtgaagatcctgcacaaggcactggaggccgcccagcaggagaagcgggcgtccagcgcatacctggcggcggctgaggacaaggaccggctggagctggtgcggcacaaagtgcggcagatcgcggagctgggccggcgggtggaggccctggagcaggagcgggagagcctggcgcacacagcgagcctgcgggagcagcaggtgcaggagctacagcagcacgtgcagctgcttatggacaagaaccacgccaagcagcaggtcatctgcaagctctctgagaaggtcacccaggacttcacgcacccccctgaccagtctcctttgcgccccgacgctgccaacagggacttcctgagccagcaggggaagatagagcacctgaaggatgacatggaagcttaccggacccagaactgcttcctcaactccgagatccaccaggtcacaaagatctggagaaaggtggctgagaaggagaaggcccttctgacgaagtgcgcctacctccaagccagaaactgccaggtggaaagcaagtacctggccggtctgagaaggctgcaggaggccctgggggacgaagccagcgagtgctcagagctgctgaggcagcttgtccaggaggcactgcagtgggaagctggggaggcctcatctgacagcatcgagctgagccccatcagtaagtatgatgagtacggcttcctgacggtgcccgactatgaggtggaagacctgaagctgctggccaagatccaggcattggagtcacgatcccaccacctgctgggcctcgaggctgtggatcggccgctgagggagcgctgggctgccctgggcgatcttgtgccctcagccgagctcaagcagctactgcgggcaggagtaccccgtgaacaccggcctcgtgtctggaggtggctggtccacctccgtgtccagcacctgcacactccaggctgctaccaggaactgctgagccggggccaggcccgcgagcaccctgctgcccgccagattgagctggacctgaaccggaccttccccaacaacaaacacttcacctgccccacctccagcttccccgacaagctccgccgggtgctgctggccttctcctggcagaaccccaccatcggctactgccagggcctgaacaggtaagccaccaaagcccagtgaaggtgtgatctttaccttttggagcgcaggtccccaaccctcagactgtggacaggcagccatctgtggcctgttaaggggccgca

SEQ ID NO: 427647 - DNA, 2201 bp, Homo sapiens
ctccctttgggaagctgcccgccgagtctccgagatttgtccctggtggtcccgcggacccctcgtccctccgcagtctccggctggcagcgatggagggcgctggggagaacgccccggagtccagctcctctgcccctgggtccgaagagtctgccagggatccacaggtgccgcctccggaggaagaatcgggggactgcgcccggtccctggaggcggtccccaagaaactctgtgggtatttaagtaagttcggcggcaaagggcccatccggggctggaaatcccgctggttcttctacgacgaaaggaaatgtcagctgtattactcgcggaccgctcaggatgccaatcccttggacagcatcgacctctccagtgcagtgtttgactgtaaggcggacgctgaggaggggatcttcgaaatcaagactcccagccgggttattaccctgaaggccgccaccaagcaagcgatgctgtactggctgcagcagctgcagatgaagcgctgggaattccacaacagcccgccggcacctcctgccacccctgatgccgccctggctgggaatgggcccgtcctgcacctcgagctagggcaagaagaggcagagctggaggagttcctgtgccctgtgaaaacaccccctgggctagtgggcgtggcagctgccttgcagcccttccctgcccttcagaatatttccctcaagcacctggggactgaaatacagaacacaatgcacaacatccgtggcaacaagcaggcccagggaacaggccatgaacctccaggggaagattctccacagagtggggagcctcagagggaggagcagcccttggcctctgacgccagcaccccagggagagagccagaggattctccaaagcctgcacccaagccttctctgaccatcagtttcgctcagaaagccaagcgccagaacaacaccttcccattcttttctgaaggaatcacacggaaccgaactgcccaggagaaagtggcagccttggagcaacaggttctgatgctcaccaaggagttaaagtctcagaaggagctagtgaagatcctgcacaaggcactggaggccgcccagcaggagaagcgggcgtccagcgcatacctggcggcggctgaggacaaggaccggctggagctggtgcggcacaaagtgcggcagatcgcggagctgggccggcgggtggaggccctggagcaggagcgggagagcctggcgcacacagcgagcctgcgggagcagcaggtgcaggagctacagcagcacgtgcagctgcttatggacaagaaccacgccaagcagcaggtcatctgcaagctctctgagaaggtcacccaggacttcacgcacccccctgaccagtctcctttgcgccccgacgctgccaacagggacttcctgagccagcaggggaagatagagcacctgaaggatgacatggaagcttaccggacccagaactgcttcctcaactccgagatccaccaggtcacaaagatctggagaaaggtggctgagaaggagaaggcccttctgacgaagtgcgcctacctccaagccagaaactgccaggtggaaagcaagtacctggccggtctgagaaggctgcaggaggccctgggggacgaagccagcgagtgctcagagctgctgaggcagcttgtccaggaggcactgcagtgggaagctggggaggcctcatctgacagcatcgagctgagccccatcagtaagtatgatgagtacggcttcctgacggtgcccgactatgaggtggaagacctgaagctgctggccaagatccaggcattggagtcacgatcccaccacctgctgggcctcgaggctgtggatcggccgctgagggagcgctgggctgccctgggcgatcttgtgccctcagccgagctcaagcagctactgcgggcaggagtaccccgtgaacaccggcctcgtgtctggaggtggctggtccacctccgtgtccagcacctgcacactccaggctgctaccaggaactgctgagccggggccaggcccgcgagcaccctgctgcccgccagattgagctggacctgaaccggaccttccccaacaacaaacacttagtctgcccacagcttcacctatagaaggatttcacgagaacaagtatacgtcctcta

SEQ ID NO: 427648 - DNA, 562 bp, Homo sapiens
ccgtttaggcattgtaggtgcatcagttaacaaaacggacaatacctccgcctcatggcatttatattccagctgcaggggtgggggttaaggaagtcaagcttgtattacttataagccacatagtgtgtggaagatgagaatgcgaaagagataggtaaaggagattgggagtgccatgcatggggaggcatcatgtagggtgcctggagtctgggagaccagtcaggatgacagggtgtggggatgagacctgagctccagcagtggtggcgggaaggacagaagggcagaaaggcagggttcagcctcatgctcctctgttcttgtctcctttcaggaacacaatgcacaacatccgtggcaacaagcaggcccagggaacaggccatgaacctccaggggaagattctccacagagtggggagcctcagagggaggagcagcccttggcctctgacgccagcaccccaggtgagcctctgtccagggctgagctgccttcagggaccagctcctcacggctggcacaagtgccttctttccttccagcgaaccagca

SEQ ID NO: 427649 - DNA, 3614 bp, Homo sapiens
cacgaggggcttccgggcccggacgccatttccagcggttgctggttctgacgggttgtagtctgccaggacaatgagttatgactaccatcagaactggggccgtgatgggggtccccgcagctccggtgggggctatggaggggggccagcagggggtcatggaggtaaccgaggctccggaggaggcggcggcggcggagggggtggtcgaggcggcaggggccggcatcccgggcacctgaaaggccgcgaaatcggcatgtggtacgcgaaaaaacaggggcagaagaacaaggaagcggagaggcaagagagagctgtagtacacatggatgaacgacgagaagaacaaattgtacagttactgaattctgttcaagcgaagaatgataaagagtcagaagcacagatatcctggtttgctcctgaggatcatggatacggtactgaagtttctactaagaacacaccatgctcagagaacaaacttgacatccaggaaaagaagttgataaatcaagaaaaaaaaatgtttagaatcaggaacagatcatatattgaccgagattctgagtatctcttgcaagaaaatgaaccagatggaactttagaccaaaaattattggaagatttacaaaagaaaaaaaatgaccttcggtatattgaaatgcagcatttcagagaaaagctgccttcgtatggaatgcaaaaggaattggtaaatttaattgataaccatcaggtaacagtaataagtggtgaaactggttgtggcaaaaccactcaagttactcagttcattttggataactacattgaaagaggaaaaggatctgcttgcagaatagtttgtactcagccaagaagaattagtgccatttcagttgcggaaagagtagctgcagaaagggcagaatcttgtggcagtggtaatagtactggatatcaaattcgtctccagagtcggttgccaaggaaacagggttctatcttatactgtacaacaggaatcatccttcagtggctccagtcagacccgtatttgtccagtgttagtcatatcgtacttgatgaaatccatgaaagaaatctgcagtcagatgttttaatgactgttgttaaagaccttctcaattttcgatctgacttgaaagtaatattgatgagtgcaacattgaatgcagaaaagttttcagaatattttggtaactgtccaatgatacatatacctggttttacctttccggttgtggaatatcttttggaagatgtaattgaaaaaataaggtatgttccagaacaaaaagaacacagatcccagtttaagaggggtttcatgcaagggcatgtaaatagacaagaaaaagaagaaaaagaagcaatatataaagaacgttggccagattatgtaagggaactgcgaagaaggtattctgcaagtactgtagatgttatagaaatgatggaggatgataaagttgatctgaatttgattgttgccctcatccgatacattgttttggaagaagaggatggtgcgatactggtctttctgccaggctgggacaatatcagcactttacatgatctcttgatgtcacaagtaatgtttaaatcagataaatttttaattatacctttacattcactgatgcctacagttaaccagacacaggtgtttaaaagaacccctcctggtgttcggaaaatagtaattgctaccaacattgcggagactagcattaccatagatgatgtcgtttatgtgatagatggaggaaaaataaaagagacgcattttgatactcagaacaatatcagtacaatgtccgctgagtgggttagtaaagctaatgccaaacagagaaaaggtcgagctggaagagttcaacctggtcattgctatcatctgtataatggtcttagagcaagtcttctagatgactatcaactgccagaaattttgagaactcctttggaagaactttgtttacaaataaagattttaaggctaggtggaattgcttattttctgagtagattaatggacccaccatcaaatgaggcagtgttactctccataagacacctgatggagctgaacgctttggataaacaagaagaattgacacctcttggagtccacttggcacgattacccgttgagccacatattggaaaaatgattctttttggagcactgttctgctgcttagacccagtactcactattgctgctagtctcagtttcaaagatccatttgtcattccactgggaaaagaaaagattgcagatgcaagaagaaaggaattggcaaaggatactagaagtgatcacttaacagttgtgaatgcgtttgagggctgggaagaggctaggcgacgtggtttcagatacgaaaaggactattgctgggaatattttctgtcttcaaacacactgcagatgctgcataacatgaaaggacagtttgctgagcatcttcttggagctggatttgtaagcagtagaaatcctaaagatccagaatctaatataaattcagataatgagaagataattaaagctgtcatctgtgctggtttatatcccaaagttgctaaaattcgactaaatttgggtaaaaaaagaaaaatggtaaaagtttacacaaaaaccgatggcctggttgctgttcatcctaaatctgttaatgtggagcaaacagactttcactacaactggcttatctatcacctaaagatgagaacaagcagtatatacttgtatgactgcacagaggtttccccatactgtctcttgttttttggaggtgacatttccatccagaaggataacgatcaggaaactattgctgtagatgagtggattgtatttcagtctccagcaagaattgcccatcttgttaaggaattaagaaaggaactagatattcttctgcaagagaagattgaaagtcctcatcctgtagactggaatgacactaaatccagagactgtgcagtactgtcagctattatagacttgatcaaaacacaggaaaaggcaactcccaggaactttccgccacgattccaggatggatattacagctgacagcttttcaggggtggtctgaaaagccagtttgacagccattcttcatcattgtttaaattttggctggatgccaaaccctgggacatgaacaattttcatgtgtaaggtagaagccttcagtaggtagtaaagacttaatgtgcatgacttgatgttatatgtagagatatatatatatatatatatataccataaaagcaatatgttctctgatcatatactctgctgtggtcatgcccactctttgggagtatattccctttatatatattgagtattgtaccacttgagaaattcctttgttctgttatacaaaattaatctttctgctcataatgattgatgataccaccagtaaaaataggatgtttaccccaaaacaagtgtcaattaagaatttgaacacaaccacattttttaaaatgaaacttctatcggaagtaaattaatttgttgtaataaagtccagtatttaataaaatgtacaatgttaaatctcaaaaaaaaaaaa

SEQ ID NO: 427650 - DNA, 3358 bp, Homo sapiens
tcgcgaacgtgttatccatgtgtactacagcagaagaacaaggaagcggagaggcaagagagagctgtagtacacatggatgaacgacgagaagaacaaattgtacagttactgaattctgttcaagcgaagaatgataaagagtcagaagcacagatatcctggtttgctcctgaggatcatggatacggtactgaagtttctactaagaacacaccatgctcagagaacaaacttgacatccaggaaaagaagttgataaatcaagaaaaaaaaatgtttagaatcaggaacagatcatatattgaccgagattctgagtatctcttgcaagaaaatgaaccagatggaactttagaccaaaaattattggaagatttacaaaagaaaaaaaatgaccttcggtatattgaaatgcagcatttcagagaaaagctgccttcgtatggaatgcaaaaggaattggtaaatttaattgataaccatcaggtaacagtaataagtggtgaaactggttgtggcaaaaccactcaagttactcagttcattttggataactacattgaaagaggaaaaggatctgcttgcagaatagtttgtactcagccaagaagaattagtgccatttcagttgcggaaagagtagctgcagaaagggcagaatcttgtggcagtggtaatagtactggatatcaaattcgtctccagagtcggttgccaaggaaacagggttctatcttatactgtacaacaggaatcatccttcagtggctccagtcagacccgtatttgtccagtgttagtcatatcgtacttgatgaaatccatgaaagaaatctgcagtcagatgttttaatgactgttgttaaagaccttctcaattttcgatctgacttgaaagtaatattgatgagtgcaacattgaatgcagaaaagttttcagaatattttggtaactgtccaatgatacatatacctggttttacctttccggttgtggaatatcttttggaagatgtaattgaaaaaataaggtatgttccagaacaaaaagaacacagatcccagtttaagaggggtttcatgcaagggcatgtaaatagacaagaaaaagaagaaaaagaagcaatatataaagaacgttggccagattatgtaagggaactgcgaagaaggtattctgcaagtactgtagatgttatagaaatgatggaggatgataaagttgatctgaatttgattgttgccctcatccgatacattgttttggaagaagaggatggtgcgatactggtctttctgccaggctgggacaatatcagcactttacatgatctcttgatgtcacaagtaatgtttaaatcagataaatttttaattatacctttacattcactgatgcctacagttaaccagacacaggtgtttaaaagaacccctcctggtgttcggaaaatagtaattgctaccaacattgcggagactagcattaccatagatgatgtcgtttatgtgatagatggaggaaaaataaaagagacgcattttgatactcagaacaatatcagtacaatgtccgctgagtgggttagtaaagctaatgccaaacagagaaaaggtcgagctggaagagttcaacctggtcattgctatcatctgtataatggtcttagagcaagtcttctagatgactatcaactgccagaaattttgagaactcctttggaagaactttgtttacaaataaagattttaaggctaggtggaattgcttattttctgagtagattaatggacccaccatcaaatgaggcagtgttactctccataagacacctgatggagctgaacgctttggataaacaagaagaattgacacctcttggagtccacttggcacgattacccgttgagccacatattggaaaaatgattctttttggagcactgttctgctgcttagacccagtactcactattgctgctagtctcagtttcaaagatccatttgtcattccactgggaaaagaaaagattgcagatgcaagaagaaaggaattggcaaaggatactagaagtgatcacttaacagttgtgaatgcgtttgagggctgggaagaggctaggcgacgtggtttcagatacgaaaaggactattgctgggaatattttctgtcttcaaacacactgcagatgctgcataacatgaaaggacagtttgctgagcatcttcttggagctggatttgtaagcagtagaaatcctaaagatccagaatctaatataaattcagataatgagaagataattaaagctgtcatctgtgctggtttatatcccaaagttgctaaaattcgactaaatttgggtaaaaaaagaaaaatggtaaaagtttacacaaaaaccgatggcctggttgctgttcatcctaaatctgttaatgtggagcaaacagactttcactacaactggcttatctatcacctaaagatgagaacaagcagtatatacttgtatgactgcacagaggtttccccatactgtctcttgttttttggaggtgacatttccatccagaaggataacgatcaggaaactattgctgtagatgagtggattgtatttcagtctccagcaagaattgcccatcttgttaaggaattaagaaaggaactagatattcttctgcaagagaagattgaaagtcctcatcctgtagactggaatgacactaaatccagagactgtgcagtactgtcagctattatagacttgatcaaaacacaggaaaaggcaactcccaggaactttccgccacgattccaggatggatattacagctgacagcttttcaggggtggtctgaaaagccagtttgacagccattcttcatcattgtttaaattttggctggatgccaaaccctgggacatgaacaattttcatgtgtaaggtagaagccttcagtaggtagtaaagacttaatgtgcatgacttgatgttatatgtagagatatatatatatatatatatataccataaaagcaatatgttctctgatcatatactctgctgtggtcatgcccactctttgggagtatattccctttatatatattgagtattgtaccacttgagaaattcctttgttctgttatacaaaattaatctttctgctcataatgattgatgataccaccagtaaaaataggatgtttaccccaaaacaagtgtcaattaagaatttgaacacaaccacattttttaaaatgaaacttctatcggaagtaaattaatttgttgtaataaagtccagtatttaataaaatgtacaatgttaaatctcaaaaaaaaaaaa

SEQ ID NO: 427651 - DNA, 3758 bp, Homo sapiens
cacgaggggcttccgggcccggacgccatttccagcggttgctggttctgacgggttgtagtctgccaggacaatgagttatgactaccatcagaactggggccgtgatgggggtccccgcagctccggtgggggctatggaggggggccagcagggggtcatggaggtaaccgaggctccggaggaggcggcggcggcggagggggtggtcgaggcggcaggggccggcatcccgggcacctgaaaggccgcgaaatcggcatgtggtacgcgaaaaaacaggggcagaagaacaaggaagcggagaggcaagagagagctgtagtacacatggatgaacgacgagaagaacaaattgtacagttactgaattctgttcaagcgaagaatgataaagagtcagaagcacagatatcctggtttgctcctgaggatcatggatacggtactgaagtttctactaagaacacaccatgctcagagaacaaacttgacatccaggaaaagaagttgataaatcaagaaaaaaaaatgtttagaatcaggaacagatcatatattgaccgagattctgagtatctcttgcaagaaaatgaaccagatggaactttagaccaaaaattattggaagatttacaaaagaaaaaaaatgaccttcggtatattgaaatgcagcatttcagagaaaagctgccttcgtatggaatgcaaaaggaattggtaaatttaattgataaccatcaggtaacagtaataagtggtgaaactggttgtggcaaaaccactcaagttactcagttcattttggataactacattgaaagaggaaaaggatctgcttgcagaatagtttgtactcagccaagaagaattagtgccatttcagttgcggaaagagtagctgcagaaagggcagaatcttgtggcagtggtaatagtactggatatcaaattcgtctccagagtcggttgccaaggaaacagggttctatcttatactgtacaacaggaatcatccttcagtggctccagtcagacccgtatttgtccagtgttagtcatatcgtacttgatgaaatccatgaaagaaatctgcagtcagatgttttaatgactgttgttaaagaccttctcaattttcgatctgacttgaaagtaatattgatgagtgcaacattgaatgcagaaaagttttcagaatattttggtaactgtccaatgatacatatacctggttttacctttccggttgtggaatatcttttggaagatgtaattgaaaaaataaggtatgttccagaacaaaaagaacacagatcccagtttaagaggggtttcatgcaagggcatgtaaatagacaagaaaaagaagaaaaagaagcaatatataaagaacgttggccagattatgtaagggaactgcgaagaaggtattctgcaagtactgtagatgttatagaaatgatggaggatgataaagttgatctgaatttgattgttgccctcatccgatacattgttttggaagaagaggatggtgcgatactggtctttctgccaggctgggacaatatcagcactttacatgatctcttgatgtcacaagtaatgtttaaatcagataaatttttaattatacctttacattcactgatgcctacagttaaccagacacaggtgtttaaaagaacccctcctggtgttcggaaaatagtaattgctaccaacattgcggagactagcattaccatagatgatgtcgtttatgtgatagatggaggaaaaataaaagagacgcattttgatactcagaacaatatcagtacaatgtccgctgagtgggttagtaaagctaatgccaaacagagaaaaggtcgagctggaagagttcaacctggtcattgctatcatctgtataatggtcttagagcaagtcttctagatgactatcaactgccagaaattttgagaactcctttggaagaactttgtttacaaataaagattttaaggctaggtggaattgcttattttctgagtagattaatggacccaccatcaaatgaggcagtgttactctccataagacacctgatggagctgaacgctttggataaacaagaagaattgacacctcttggagtccacttggcacgattacccgttgagccacatattggaaaaatgattctttttggagcactgttctgctgcttagacccagtactcactattgctgctagtctcagtttcaaagatccatttgtcattccactggtaagaaaaatggaaataaaaccgagttattttagatgtgaacaggagttgcttagatatatttttcattagcgttttattagaatgtcattctccattatagcatcagagcaatttaaattggctatgtctgctatttttaagggaaaagaaaagattgcagatgcaagaagaaaggaattggcaaaggatactagaagtgatcacttaacagttgtgaatgcgtttgagggctgggaagaggctaggcgacgtggtttcagatacgaaaaggactattgctgggaatattttctgtcttcaaacacactgcagatgctgcataacatgaaaggacagtttgctgagcatcttcttggagctggatttgtaagcagtagaaatcctaaagatccagaatctaatataaattcagataatgagaagataattaaagctgtcatctgtgctggtttatatcccaaagttgctaaaattcgactaaatttgggtaaaaaaagaaaaatggtaaaagtttacacaaaaaccgatggcctggttgctgttcatcctaaatctgttaatgtggagcaaacagactttcactacaactggcttatctatcacctaaagatgagaacaagcagtatatacttgtatgactgcacagaggtttccccatactgtctcttgttttttggaggtgacatttccatccagaaggataacgatcaggaaactattgctgtagatgagtggattgtatttcagtctccagcaagaattgcccatcttgttaaggaattaagaaaggaactagatattcttctgcaagagaagattgaaagtcctcatcctgtagactggaatgacactaaatccagagactgtgcagtactgtcagctattatagacttgatcaaaacacaggaaaaggcaactcccaggaactttccgccacgattccaggatggatattacagctgacagcttttcaggggtggtctgaaaagccagtttgacagccattcttcatcattgtttaaattttggctggatgccaaaccctgggacatgaacaattttcatgtgtaaggtagaagccttcagtaggtagtaaagacttaatgtgcatgacttgatgttatatgtagagatatatatatatatatatatataccataaaagcaatatgttctctgatcatatactctgctgtggtcatgcccactctttgggagtatattccctttatatatattgagtattgtaccacttgagaaattcctttgttctgttatacaaaattaatctttctgctcataatgattgatgataccaccagtaaaaataggatgtttaccccaaaacaagtgtcaattaagaatttgaacacaaccacattttttaaaatgaaacttctatcggaagtaaattaatttgttgtaataaagtccagtatttaataaaatgtacaatgttaaatctcaaaaaaaaaaaa

SEQ ID NO: 427652 - DNA, 3560 bp, Homo sapiens
cacgaggggcttccgggcccggacgccatttccagcggttgctggttctgacgggttgtagtctgccaggacaatgagttatgactaccatcagaactggggccgtgatgggggtccccgcagctccggtgggggctatggaggggggccagcagggggtcatggaggtaaccgaggctccggaggaggcggcggcggcggagggggtggtcgaggcggcaggggccggcatcccgggcacctgaaaggccgcgaaatcggcatgtggtacgcgaaaaaacaggggcagaagaacaaggaagcggagaggcaagagagagctgtagtacacatggatgaacgacgagaagaacaaattgtacagttactgaattctgttcaagcgaagaatgataaagagtcagaagcacagatatcctggtttgctcctgaggatcatggatacggtactgaagtttctactaagaacacaccatgctcagagaacaaacttgacatccaggaaaagaagttgataaatcaagaaaaaaaaatgtttagaatcaggaacagatcatatattgaccgagattctgagtatctcttgcaagaaaatgaaccagatggaactttagaccaaaaattattggaagatttacaaaagaaaaaaaatgaccttcggtatattgaaatgcagcatttcagagaaaagctgccttcgtatggaatgcaaaaggaattggtaaatttaattgataaccatcaggtaacagtaataagtggtgaaactggttgtggcaaaaccactcaagttactcagttcattttggataactacattgaaagaggaaaaggatctgcttgcagaatagtttgtactcagccaagaagaattagtgccatttcagttgcggaaagagtagctgcagaaagggcagaatcttgtggcagtggtaatagtactggatatcaaattcgtctccagagtcggttgccaaggaaacagggttctatcttatactgtacaacaggaatcatccttcagtggctccagtcagacccgtatttgtccagtgttagtcatatcgtacttgatgaaatccatgaaagaaatctgcagtcagatgttttaatgactgttgttaaagaccttctcaattttcgatctgacttgaaagtaatattgatgagtgcaacattgaatgcagaaaagttttcagaatattttggtaactgtccaatgatacatatacctggttttacctttccggttgtggaatatcttttggaagatgtaattgaaaaaataaggtatgttccagaacaaaaagaacacagatcccagtttaagaggggtttcatgcaagggcatgtaaatagacaagaaaaagaagaaaaagaagcaatatataaagaacgttggccagattatgtaagggaactgcgaagaaggtattctgcaagtactgtagatgttatagaaatgatggaggatgataaagttgatctgaatttgattgttgccctcatccgatacattgttttggaagaagaggatggtgcgatactggtctttctgccaggctgggacaatatcagcactttacatgatctcttgatgtcacaagtaatgtttaaatcagataaatttttaattatacctttacattcactgatgcctacagttaaccagacacaggtgtttaaaagaacccctcctggtgttcggaaaatagtaattgctaccaacattgcggagactagcattaccatagatgatgtcgtttatgtgatagatggaggaaaaataaaagagacgcattttgatactcagaacaatatcagtacaatgtccgctgagtgggttagtaaagctaatgccaaacagagtcttagagcaagtcttctagatgactatcaactgccagaaattttgagaactcctttggaagaactttgtttacaaataaagattttaaggctaggtggaattgcttattttctgagtagattaatggacccaccatcaaatgaggcagtgttactctccataagacacctgatggagctgaacgctttggataaacaagaagaattgacacctcttggagtccacttggcacgattacccgttgagccacatattggaaaaatgattctttttggagcactgttctgctgcttagacccagtactcactattgctgctagtctcagtttcaaagatccatttgtcattccactgggaaaagaaaagattgcagatgcaagaagaaaggaattggcaaaggatactagaagtgatcacttaacagttgtgaatgcgtttgagggctgggaagaggctaggcgacgtggtttcagatacgaaaaggactattgctgggaatattttctgtcttcaaacacactgcagatgctgcataacatgaaaggacagtttgctgagcatcttcttggagctggatttgtaagcagtagaaatcctaaagatccagaatctaatataaattcagataatgagaagataattaaagctgtcatctgtgctggtttatatcccaaagttgctaaaattcgactaaatttgggtaaaaaaagaaaaatggtaaaagtttacacaaaaaccgatggcctggttgctgttcatcctaaatctgttaatgtggagcaaacagactttcactacaactggcttatctatcacctaaagatgagaacaagcagtatatacttgtatgactgcacagaggtttccccatactgtctcttgttttttggaggtgacatttccatccagaaggataacgatcaggaaactattgctgtagatgagtggattgtatttcagtctccagcaagaattgcccatcttgttaaggaattaagaaaggaactagatattcttctgcaagagaagattgaaagtcctcatcctgtagactggaatgacactaaatccagagactgtgcagtactgtcagctattatagacttgatcaaaacacaggaaaaggcaactcccaggaactttccgccacgattccaggatggatattacagctgacagcttttcaggggtggtctgaaaagccagtttgacagccattcttcatcattgtttaaattttggctggatgccaaaccctgggacatgaacaattttcatgtgtaaggtagaagccttcagtaggtagtaaagacttaatgtgcatgacttgatgttatatgtagagatatatatatatatatatatataccataaaagcaatatgttctctgatcatatactctgctgtggtcatgcccactctttgggagtatattccctttatatatattgagtattgtaccacttgagaaattcctttgttctgttatacaaaattaatctttctgctcataatgattgatgataccaccagtaaaaataggatgtttaccccaaaacaagtgtcaattaagaatttgaacacaaccacattttttaaaatgaaacttctatcggaagtaaattaatttgttgtaataaagtccagtatttaataaaatgtacaatgttaaatctcaaaaaaaaaaaa

SEQ ID NO: 427653 - DNA, 3514 bp, Homo sapiens
cacgaggggcttccgggcccggacgccatttccagcggttgctggttctgacgggttgtagtctgccaggacaatgagttatgactaccatcagaactggggccgtgatgggggtccccgcagctccggtgggggctatggaggggggccagcagggggtcatggaggtaaccgaggctccggaggaggcggcggcggcggagggggtggtcgaggcggcaggggccggcatcccgggcacctgaaaggccgcgaaatcggcatgtggtacgcgaaaaaacaggggcagaagaacaaggaagcggagaggcaagagagagctgtagtacacatggatgaacgacgagaagaacaaattgtacagttactgaattctgttcaagcgaagaatgataaagagtcagaagcacagatatcctggtttgctcctgaggatcatggatacggtactgaagtttctactaagaacacaccatgctcagagaacaaacttgacatccaggaaaagaagttgataaatcaagaaaaaaaaatgtttagaatcaggaacagatcatatattgaccgagattctgagtatctcttgcaagaaaatgaaccagatggaactttagaccaaaaattattggaagatttacaaaagaaaaaaaatgaccttcggtatattgaaatgcagcatttcagagaaaagctgccttcgtatggaatgcaaaaggaattggtaaatttaattgataaccatcaggtaacagtaataagtggtgaaactggttgtggcaaaaccactcaagttactcagttcattttggataactacattgaaagaggaaaaggatctgcttgcagaatagtttgtactcagccaagaagaattagtgccatttcagttgcggaaagagtagctgcagaaagggcagaatcttgtggcagtggtaatagtactggatatcaaattcgtctccagagtcggttgccaaggaaacagggttctatcttatactgtacaacaggaatcatccttcagtggctccagtcagacccgtatttgtccagtgttagtcatatcgtacttgatgaaatccatgaaagaaatctgcagtcagatgttttaatgactgttgttaaagaccttctcaattttcgatctgacttgaaagtaatattgatgagtgcaacattgaatgcagaaaagttttcagaatattttggtaactgtccaatgatacatatacctggttttacctttccggttgtggaatatcttttggaagatgtaattgaaaaaataaggtatgttccagaacaaaaagaacacagatcccagtttaagaggggtttcatgcaagggcatgtaaatagacaagaaaaagaagaaaaagaagcaatatataaagaacgttggccagattatgtaagggaactgcgaagaaggtattctgcaagtactgtagatgttatagaaatgatggaggatgataaagttgatctgaatttgattgttgccctcatccgatacattgttttggaagaagaggatggtgcgatactggtctttctgccaggctgggacaatatcagcactttacatgatctcttgatgtcacaagtaatgtttaaatcagataaatttttaattatacctttacattcactgatgcctacagttaaccagacacaggtgtttaaaagaacccctcctggtgttcggaaaatagtaattgctaccaacattgcggagactagcattaccatagatgatgtcgtttatgtgatagatggaggaaaaataaaagagacgcattttgatactcagaacaatatcagtacaatgtccgctgagtgggttagtaaagctaatgccaaacagagaaaaggtcgagctggaagagttcaacctggtcattgctatcatctgtataatggtcttagagcaagtcttctagatgactatcaactgccagaaattttgagaactcctttggaagaactttgtttacaaataaagattttaaggctaggtggaattgcttattttctgagtagattaatggacccaccatcaaatgaggcagtgttactctccataagacacctgatggagctgaacgctttggataaacaagaagaattgacacctcttggagtccacttggcacgattacccgttgagccacatattggaaaaatgattctttttggagcactgttctgctgcttagacccagtactcactattgctgctagtctcagtttcaaagatccatttgtcattccactgggaaaagaaaagattgcagatgcaagaagaaaggaattggcaaaggatactagaagtgatcacttaacagttgtgaatgcgtttgagggctgggaagaggctaggcgacgtggtttcagatacgaaaaggactattgctgggaatattttctgtcttcaaacacactgcagataatgagaagataattaaagctgtcatctgtgctggtttatatcccaaagttgctaaaattcgactaaatttgggtaaaaaaagaaaaatggtaaaagtttacacaaaaaccgatggcctggttgctgttcatcctaaatctgttaatgtggagcaaacagactttcactacaactggcttatctatcacctaaagatgagaacaagcagtatatacttgtatgactgcacagaggtttccccatactgtctcttgttttttggaggtgacatttccatccagaaggataacgatcaggaaactattgctgtagatgagtggattgtatttcagtctccagcaagaattgcccatcttgttaaggaattaagaaaggaactagatattcttctgcaagagaagattgaaagtcctcatcctgtagactggaatgacactaaatccagagactgtgcagtactgtcagctattatagacttgatcaaaacacaggaaaaggcaactcccaggaactttccgccacgattccaggatggatattacagctgacagcttttcaggggtggtctgaaaagccagtttgacagccattcttcatcattgtttaaattttggctggatgccaaaccctgggacatgaacaattttcatgtgtaaggtagaagccttcagtaggtagtaaagacttaatgtgcatgacttgatgttatatgtagagatatatatatatatatatatataccataaaagcaatatgttctctgatcatatactctgctgtggtcatgcccactctttgggagtatattccctttatatatattgagtattgtaccacttgagaaattcctttgttctgttatacaaaattaatctttctgctcataatgattgatgataccaccagtaaaaataggatgtttaccccaaaacaagtgtcaattaagaatttgaacacaaccacattttttaaaatgaaacttctatcggaagtaaattaatttgttgtaataaagtccagtatttaataaaatgtacaatgttaaatctcaaaaaaaaaaaa

SEQ ID NO: 427654 - DNA, 1562 bp, Homo sapiens
ctttactcttacgaacacataagcgataacacaaggtaagtgggggtcgtcgaacgctttggataaacaagaagaattgacacctcttggagtccacttggcacgattacccgttgagccacatattggaaaaatgattctttttggagcactgttctgctgcttagacccagtactcactattgctgctagtctcagtttcaaagatccatttgtcattccactgggaaaagaaaagattgcagatgcaagaagaaaggaattggcaaaggatactagaagtgatcacttaacagttgtgaatgcgtttgagggctgggaagaggctaggcgacgtggtttcagatacgaaaaggactattgctgggaatattttctgtcttcaaacacactgcagatgctgcataacatgaaaggacagtttgctgagcatcttcttggagctggatttgtaagcagtagaaatcctaaagatccagaatctaatataaattcagataatgagaagataattaaagctgtcatctgtgctggtttatatcccaaagttgctaaaattcgactaaatttgggtaaaaaaagaaaaatggtaaaagtttacacaaaaaccgatggcctggttgctgttcatcctaaatctgttaatgtggagcaaacagactttcactacaactggcttatctatcacctaaagatgagaacaagcagtatatacttgtatgactgcacagaggtttccccatactgtctcttgttttttggaggtgacatttccatccagaaggataacgatcaggaaactattgctgtagatgagtggattgtatttcagtctccagcaagaattgcccatcttgttaaggaattaagaaaggaactagatattcttctgcaagagaagattgaaagtcctcatcctgtagactggaatgacactaaatccagagactgtgcagtactgtcagctattatagacttgatcaaaacacaggaaaaggcaactcccaggaactttccgccacgattccaggatggatattacagctgacagcttttcaggggtggtctgaaaagccagtttgacagccattcttcatcattgtttaaattttggctggatgccaaaccctgggacatgaacaattttcatgtgtaaggtagaagccttcagtaggtagtaaagacttaatgtgcatgacttgatgttatatgtagagatatatatatatatatatatataccataaaagcaatatgttctctgatcatatactctgctgtggtcatgcccactctttgggagtatattccctttatatatattgagtattgtaccacttgagaaattcctttgttctgttatacaaaattaatctttctgctcataatgattgatgataccaccagtaaaaataggatgtttaccccaaaacaagtgtcaattaagaatttgaacacaaccacattttttaaaatgaaacttctatcggaagtaaattaatttgttgtaataaagtccagtatttaataaaatgtacaatgttaaatctcaaaaaaaaaaaa

SEQ ID NO: 427655 - DNA, 2573 bp, Homo sapiens
  misc_feature (2367)..(2367): n is a, c, g, or t
  misc_feature (2377)..(2377): n is a, c, g, or t
  misc_feature (2379)..(2379): n is a, c, g, or t
  misc_feature (2385)..(2385): n is a, c, g, or t
cacgaggggcttccgggcccggacgccatttccagcggttgctggttctgacgggttgtagtctgccaggacaatgagttatgactaccatcagaactggggccgtgatgggggtccccgcagctccggtgggggctatggaggggggccagcagggggtcatggaggtaaccgaggctccggaggaggcggcggcggcggagggggtggtcgaggcggcaggggccggcatcccgggcacctgaaaggccgcgaaatcggcatgtggtacgcgaaaaaacaggggcagaagaacaaggaagcggagaggcaagagagagctgtagtacacatggatgaacgacgagaagaacaaattgtacagttactgaattctgttcaagcgaagaatgataaagagtcagaagcacagatatcctggtttgctcctgaggatcatggatacggtactgaagtttctactaagaacacaccatgctcagagaacaaacttgacatccaggaaaagaagttgataaatcaagaaaaaaaaatgtttagaatcaggaacagatcatatattgaccgagattctgagtatctcttgcaagaaaatgaaccagatggaactttagaccaaaaattattggaagatttacaaaagaaaaaaaatgaccttcggtatattgaaatgcagcatttcagagaaaagctgccttcgtatggaatgcaaaaggaattggtaaatttaattgataaccatcaggtaacagtaataagtggtgaaactggttgtggcaaaaccactcaagttactcagttcattttggataactacattgaaagaggaaaaggatctgcttgcagaatagtttgtactcagccaagaagaattagtgccatttcagttgcggaaagagtagctgcagaaagggcagaatcttgtggcagtggtaatagtactggatatcaaattcgtctccagagtcggttgccaaggaaacagggttctatcttatactgtacaacaggaatcatccttcagtggctccagtcagacccgtatttgtccagtgttagtcatatcgtacttgatgaaatccatgaaagaaatctgcagtcagatgttttaatgactgttgttaaagaccttctcaattttcgatctgacttgaaagtaatattgatgagtgcaacattgaatgcagaaaagttttcagaatattttggtaactgtccaatgatacatatacctggttttacctttccggttgtggaatatcttttggaagatgtaattgaaaaaataaggtatgttccagaacaaaaagaacacagatcccagtttaagaggggtttcatgcaagggcatgtaaatagacaagaaaaagaagaaaaagaagcaatatataaagaacgttggccagattatgtaagggaactgcgaagaaggtattctgcaagtactgtagatgttatagaaatgatggaggatgataaagttgatctgaatttgattgttgccctcatccgatacattgttttggaagaagaggatggtgcgatactggtctttctgccaggctgggacaatatcagcactttacatgatctcttgatgtcacaagtaatgtttaaatcagataaatttttaattatacctttacattcactgatgcctacagttaaccagacacaggtgtttaaaagaacccctcctggtgttcggaaaatagtaattgctaccaacattgcggagactagcattaccatagatgatgtcgtttatgtgatagatggaggaaaaataaaagagacgcattttgatactcagaacaatatcagtacaatgtccgctgagtgggttagtaaagctaatgccaaacagagaaaaggtcgagctggaagagttcaacctggtcattgctatcatctgtataatggtcttagagcaagtcttctagatgactatcaactgccagaaattttgagaactcctttggaagaactttgtttacaaataaagattttaaggctaggtggaattgcttattttctgagtagattaatggacccaccatcaaatgaggcagtgttactctccataagacacctgatggagctgaacgctttggataaacaagaagaattgacacctcttggagtccacttggcacgattacccgttgagccacatattggaaaaatgattctttttggagcactgttctgctgcttagacccagtactcactattgctgctagtctcagtttcaaagatccatttgtcattccactgggaaaagaaaagattgcagatgcaagaagaaaggaattggcaaaggatactagaagtgatcacttaacagttgtgaatgcgtttgaggnctgggaagangntaggcnacgtggtttaagacacggaaaggacgactgcagggcgcctactcgaggatgccgacacacacctagacactgcaaaacagaacaggacagcatgttcgagctcagagtggatggctcgtagagatacgtacaacaatgaggggaagctgaggagataccgcaatctcagcatgaatagaagcataatg

SEQ ID NO: 427656 - DNA, 320 bp, Homo sapiens
atacggtactgaagtttctactaagaacacaccatgctcagagaacaaacttgacatccaggaaaagaagttgataaatcaagaaaaaaaaatgtttagaatcaggaacagatcatatattgaccgagattctgagtatctcttgcaagaaaatgaaccagatggaactttagaccaaaaattattggaagatttacaaaagaaaaaaaatgaccttcggtatattgaaatgcaggtagtagaaagatgtcaaaaaatattttgtcatttttttcttacactttataaaaatgtatgtatggttagaggtagctgcatgg

SEQ ID NO: 427657 - DNA, 223 bp, Homo sapiens
gtagaaatcctaaagatccagaatctaatataaattcaggtacagcaggaaacacagtgtaaataagtatcttttgtctattgtatcagtattttacttttcttttcccctctaccttctcaccccccatagataatgagaagataattaaagctgtcatctgtgctggtttatatcccaaagttgctaaaattcgactaaatttgggtaaaaaaagaaaaat

SEQ ID NO: 427658 - DNA, 607 bp, Homo sapiens
cagaaactgcttgctcgtatatttattcatccattcattcaacaagcattccaggtacaatcctaggttctaaagatacagtcctaaataatatatatttttgttctcaaggagcttaattttatagtattttatgcattaccaaattattgtgggatttttgtttttacactaacaaaatacaacacgaataccctctgcccccccccgaatgaaatctttcttgtttcccagtgacagcagtactgtggtgcacctgctggaaggaaacctggtaaccttctcctcaggctcagatcccaccaccctttcatgaaacagttgctttggcctatttgataacctttccatttcatagacttaatatcacttgttttagatgagtactccgctttctgtaaaaggaaggataattttggaaatcattgaaggaatgtgctacttacatggaaaaggcgtgatacacaaggacctgaagcctgaaaatatccttgttgataatgacttccacattaaggtaaaccatcatcggtaggcttccagaaagttgggtgattttagttttaattctccaatgtaaatccattctcgtacattggagaagcta

SEQ ID NO: 427659 - DNA, 542 bp, Homo sapiens
  misc_feature (6)..(6): n is a, c, g, or t
ctcgtncaaattcggcagcggcccacgtaggccgctcagtgtccactggcattttgctaaaccgacaaggaaggctgtgtgcttagctctccccagagggagggcgagaagggtgtggtgatggtcaatctggctgtcggaacagattctggtgtcttgggctgataacagtgttgttgattctgattgtgaatcccctcaactctagcagacacatacacacccctgaaatggggctgcagagcaggctgtctcagccttgccactgtcggcatctcgggctgggtaattctgttgtggggactgtcctgttccttgtaggatgtttagtagcatccctgcccccacctactagatgccaggggcactgttctccccagccccccgccccagttgtgacaatagttctccccccgccctcgcccccccgcccccacccccccccccccccccaattgcccccccggttgaagaagcagcccctggctgttaaagttaaatgaaggccttccggcttctccctggtctagaaacaaatgtaa

SEQ ID NO: 427660 - DNA, 767 bp, Homo sapiens
ctggcatatgtgcctgtctttatgccagtcctacgctgttttgaatactgtagctttgtagtaagttttgaaatcaggaagtgtgagtcctacaaccttgttctttttaaagatcattttggctatttgggaaaaacattaattttaaaaaattactacttgtaagatctgtgtgaaatttctaccttctgaaaatatgaattcttctcgttaaaattttctgggactctatttcctgctgttcactaaagtgtgtatttatgctcttaattatagaaagagtattcaaacgaaaatgcagttgtgaagagaatgcagtctcttcaacttgattgtgtggcagtaccttcaagccggtcaaattcaggtaaattacactatggtcaaaatctattcatttatttgtttggttactcattcactccactctctaaaagactattcaggaccatatgggaaacagaagaaactataaaagtgaacacctgccttacaggaatttataataatattcgagagtcaagttacatgtatttgaaatatgaagtaacagtgtgctcaccagtcatagagtgttctgaacaaaaggcctaatatatctgatggggagaagtgacagttcagaagaaggaaggggacatatgtgagagcaaagtccctgaggagctcggagtgacttacagccagggtacaagcagagaggctggtctcaggtcaagtagggatacttttttcactgtaacaaaagggatggcagagtataggat

SEQ ID NO: 427661 - DNA, 3874 bp, Homo sapiens
atgcaaccagacatgtccttgaatgtcattaagatgaaatccagtgacttcctggagagtgcagaactggacagcggaggctttgggaaggtgtctctgtgtttccacagaacccagggactcatgatcatgaaaacagtgtacaaggggcccaactgcattgagcacaacgaggccctcttggaggaggcgaagatgatgaacagactgagacacagccgggtggtgaagctcctgggcgtcatcatagaggaagggaagtactccctggtgatggagtacatggagaagggcaacctgatgcacgtgctgaaagccgagatgagtactccgctttctgtaaaaggaaggataattttggaaatcattgaaggaatgtgctacttacatggaaaaggcgtgatacacaaggacctgaagcctgaaaatatccttgttgataatgacttccacattaagatcgcagacctcggccttgcctcctttaagatgtggagcaaactgaataatgaagagcacaatgagctgagggaagtggacggcaccgctaagaagaatggcggcaccctctactacatggcgcccgagcacctgaatgacgtcaacgcaaagcccacagagaagtcggatgtgtacagctttgctgtagtactctgggcgatatttgcaaataaggagccatatgaaaatgctatctgtgagcagcagttgataatgtgcataaaatctgggaacaggccagatgtggatgacatcactgagtactgcccaagagaaattatcagtctcatgaagctctgctgggaagcgaatccggaagctcggccgacatttcctggcattgaagaaaaatttaggcctttttatttaagtcaattagaagaaagtgtagaagaggacgtgaagagtttaaagaaagagtattcaaacgaaaatgcagttgtgaagagaatgcagtctcttcaacttgattgtgtggcagtaccttcaagccggtcaaattcagccacagaacagcctggttcactgcacagttcccagggacttgggatgggtcctgtggaggagtcctggtttgctccttccctggagcacccacaagaagagaatgagcccagcctgcagagtaaactccaagacgaagccaactaccatctttatggcagccgcatggacaggcagacgaaacagcagcccagacagaatgtggcttacaacagagaggaggaaaggagacgcagggtctcccatgacccttttgcacagcaaagaccttacgagaattttcagaatacagagggaaaaggcactgcttattccagtgcagccagtcatggtaatgcagtgcaccagccctcagggctcaccagccaacctcaagtactgtatcagaacaatggattatatagctcacatggctttggaacaagaccactggatccaggaacagcaggtcccagagtttggtacaggccaattccaagtcatatgcctagtctgcataatatcccagtgcctgagaccaactatctaggaaatacacccaccatgccattcagctccttgccaccaacagatgaatctataaaatataccatatacaatagtactggcattcagattggagcctacaattatatggagattggtgggacgagttcatcactactagacagcacaaatacgaacttcaaagaagagccagctgctaagtaccaagctatctttgataataccactagtctgacggataaacacctggacccaatcagggaaaatctgggaaagcactggaaaaactgtgcccgtaaactgggcttcacacagtctcagattgatgaaattgaccatgactatgagcgagatggactgaaagaaaaggtttaccagatgctccaaaagtgggtgatgagggaaggcataaagggagccacggtggggaagctggcccaggcgctccaccagtgttccaggatcgaccttctgagcagcttgatttacgtcagccagaactaaccctggatgggctacggcagctgaagtggacgcctcacttagtggataaccccagaaagttggctgcctcagagcattcagaattctgtcctcactgataggggttctgtgtctgcagaaattttgtttcctgtacttcatagctggagaatggggaaagaaatctgcagcaaaggggtctcactctgttgccaggctggtctcaaacttctggactcaagtgatcctcccgcctcggccttccaaagtgctgggatatcaggcactgagccactgcgcccagccaacaatccgctctgaggaaagcgtaagcaggaagacctcttaatggcatagcaccaataaaaaaatgactcctagttgtgtttggaaagggagagaagagatgtctgaggaaggtcatgttctttcagcttatggcatttcctagagttttgttgaagcaagaagaaaaactcagagaatataaaatcaacttttaaaattgtgtgctctcttcttcacgtaggctcctgttaaaaacaaagtgcagtcagattctaagccctgttcagagacttcgtggatcacagctgcagctcaccgccacatcacaggatccgttaacgttaatacccaatactctgtcagccactgtaggctctaagaaccacgtgcagtcttcagcccattaaattatcgattattttttaatgaattgaatttatattgagtcttcaaattaactgaatggatttaaaggggtaccaaggaggggggaaacatcagaatttcccaggcagttgttgcaaggaattggtactaaccgtgactacaacaaaaattcttgattgacttttaaagttatttcctggcattctggtaccttcacccagcctgagtgccctggagagggaacaggaaatgctgatctctacccctgggtgagaccagaacctcagggctgatactgttgagtggcttcctcggtttactctgtgtactgtgaaagtattttcatattttttctgtgtgccagagtgaaaaaggacagcttctgagtgtggtaattgtgcctctagcacccagcctttcaaagcccacctgaaacctgggggtggatgaaagaactagaatagaagactgaagctgggtaggccgctcagtgtccactggcattttgctaaaccgacaaggaaggctgtgtgcttagctctccccagagggagggcgagaagggtgtggtgatggtcaatctggctgtcggaacagattctggtgtcttgggctgataacagtgttgttgattctgattgtgaatcccctcaactctagcagacacatacacacccctgaaatggggctgcagagcaggctgtctcagccttgccactgtcggcatctcgggctgggtaattctgttgtggggactgtcctgttccttgtaggatgtttagtagcatccctgcccccacctactagatgccaggggcactgttctccccagccccccgccccagttgtgacaatagtctctaaacattgtcaaatggtccaaggaaaggggaaaattgccccggttgagaagagcactgctgtaaagtaatgagcctcggctctcctgtctgcacctgtccggttactacttggccaccacgcagccttggctcctacagcccaaaagggagaatggagggaggctccaggctttgctggaggggcctgggtgagttctgtttgctccttgtaccaccatccaaatggtgttatcaaatctcttagattccaaagaggttgaataattaatgttcaaaggcaagagggcaaggcattttttaacactttttaaaataaaaatttataccccaactttaggcta

SEQ ID NO: 427662 - DNA, 3335 bp, Homo sapiens
atgcaaccagacatgtccttgaatgtcattaagatgaaatccagtgacttcctggagagtgcagaactggacagcggaggctttgggaaggtgtctctgtgtttccacagaacccagggactcatgatcatgaaaacagtgtacaaggggcccaactgcattgagcacaacgaggccctcttggaggaggcgaagatgatgaacagactgagacacagccgggtggtgaagctcctgggcgtcatcatagaggaagggaagtactccctggtgatggagtacatggagaagggcaacctgatgcacgtgctgaaagccgagatgagtactccgctttctgtaaaaggaaggataattttggaaatcattgaaggaatgtgctacttacatggaaaaggcgtgatacacaaggacctgaagcctgaaaatatccttgttgataatgacttccacattaagatcgcagacctcggccttgcctcctttaagatgtggagcaaactgaataatgaagagcacaatgagctgagggaagtggacggcaccgctaagaagaatggcggcaccctctactacatggcgcccgagcacctgaatgacgtcaacgcaaagcccacagagaagtcggatgtgtacagctttgctgtagtactctgggcgatatttgcaaataaggagccatatgaaaatgctatctgtgagcagcagttgataatgtgcataaaatctgggaacaggccagatgtggatgacatcactgagtactgcccaagagaaattatcagtctcatgaagctctgctgggaagcgaatccggaagctcggccgacatttcctggcattgaagaaaaatttaggcctttttatttaagtcaattagaagaaagtgtagaagaggacgtgaagagtttaaagaaagagtattcaaacgaaaatgcagttgtgaagagaatgcagtctcttcaacttgattgtgtggcagtaccttcaagccggtcaaattcagccacagaacagcctggttcactgcacagttcccagggacttgggatgggtcctgtggaggagtcctggtttgctccttccctggagcacccacaagaagagaatgagcccagcctgcagagtaaactccaagacgaagccaactaccatctttatggcagccgcatggacaggcagacgaaacagcagcccagacagaatgtggcttacaacagagaggaggaaaggagacgcagggtctcccatgacccttttgcacagcaaagaccttacgagaattttcagaatacagagggaaaaggcactgcttattccagtgcagccagtcatggtaatgcagtgcaccagccctcagggctcaccagccaacctcaagtactgtatcagaacaatggattatatagctcacatggctttggaacaagaccactggatccaggaacagcaggtcccagagtttggtacaggccaattccaagtcatatgcctagtctgcataatatcccagtgcctgagaccaactatctaggaaatacacccaccatgccattcagctccttgccaccaacagatgaatctataaaatataccatatacaatagtactggcattcagattggagcctacaattatatggagattggtgggacgagttcatcactactagacagcacaaatacgaacttcaaagaagagccagctgctaagtaccaagctatctttgataataccactagtctgacggataaacacctggacccaatcagggaaaatctgggaaagcactggaaaaactgtgcccgtaaactgggcttcacacagtctcagattgatgaaattgaccatgactatgagcgagatggactgaaagaaaaggtttaccagatgctccaaaagtgggtgatgagggaaggcataaagggagccacggtggggaagctggcccaggcgctccaccagtgttccaggatcgaccttctgagcagcttgatttacgtcagccagaactaaccctggatgggctacggcagctgaagtggacgcctcacttagtggataaccccagaaagttggctgcctcagagcattcagaattctgtcctcactgataggggttctgtgtctgcagaaattttgtttcctgtacttcatagctggagaatggggaaagaaatctgcagcaaaggggtctcactctgttgccaggctggtctcaaacttctggactcaagtgatcctcccgcctcggccttccaaagtgctgggatatcaggcactgagccactgcgcccagccaacaatccgctctgaggaaagcgtaagcaggaagacctcttaatggcatagcaccaataaaaaaatgactcctagttgtgtttggaaagggagagaagagatgtctgaggaaggtcatgttctttcagcttatggcatttcctagagttttgttgaagcaagaagaaaaactcagagaatataaaatcaacttttaaaattgtgtgctctcttcttcacgtaggctcctgttaaaaacaaagtgcagtcagattctaagccctgttcagagacttcgtggatcacagctgcagctcaccgccacatcacaggatccgttaacgttaatacccaatactctgtcagccactgtaggctctaagaaccacgtgcagtcttcagcccattaaattatcgattattttttaatgaattgaatttatattgagtcttcaaattaactgaatggatttaaaggggtaccaaggaggggggaaacatcagaatttcccaggcagttgttgcaaggaattggtactaaccgtgactacaacaaaaattcttgattgacttttaaagttatttcctggcattctgttgtggggactgtcctgttccttgtaggatgtttagtagcatccctgcccccacctactagatgccaggggcactgttctccccagccccccgccccagttgtgacaatagtctctaaacattgtcaaatggtccaaggaaaggggaaaattgccccggttgagaagagcactgctgtaaagtaatgagcctcggctctcctgtctgcacctgtccggttactacttggccaccacgcagccttggctcctacagcccaaaagggagaatggagggaggctccaggctttgctggaggggcctgggtgagttctgtttgctccttgtaccaccatccaaatggtgttatcaaatctcttagattccaaagaggttgaataattaatgttcaaaggcaagagggcaaggcattttttaacactttttaaaataaaaatttataccccaactttaggcta

SEQ ID NO: 427663 - DNA, 3538 bp, Homo sapiens
atgcaaccagacatgtccttgaatgtcattaagatgaaatccagtgacttcctggagagtgcagaactggacagcggaggctttgggaaggtgtctctgtgtttccacagaacccagggactcatgatcatgaaaacagtgtacaaggggcccaactgcattgagcacaacgaggccctcttggaggaggcgaagatgatgaacagactgagacacagccgggtggtgaagctcctgggcgtcatcatagaggaagggaagtactccctggtgatggagtacatggagaagggcaacctgatgcacgtgctgaaagccgagatgagtactccgctttctgtaaaaggaaggataattttggaaatcattgaaggaatgtgctacttacatggaaaaggcgtgatacacaaggacctgaagcctgaaaatatccttgttgataatgacttccacattaagatcgcagacctcggccttgcctcctttaagatgtggagcaaactgaataatgaagagcacaatgagctgagggaagtggacggcaccgctaagaagaatggcggcaccctctactacatggcgcccgagcacctgaatgacgtcaacgcaaagcccacagagaagtcggatgtgtacagctttgctgtagtactctgggcgatatttgcaaataaggagccatatgaaaatgctatctgtgagcagcagttgataatgtgcataaaatctgggaacaggccagatgtggatgacatcactgagtactgcccaagagaaattatcagtctcatgaagctctgctgggaagcgaatccggaagctcggccgacatttcctggcattgaagaaaaatttaggcctttttatttaagtcaattagaagaaagtgtagaagaggacgtgaagagtttaaagaaagagtattcaaacgaaaatgcagttgtgaagagaatgcagtctcttcaacttgattgtgtggcagtaccttcaagccggtcaaattcagccacagaacagcctggttcactgcacagttcccagggacttgggatgggtcctgtggaggagtcctggtttgctccttccctggagcacccacaagaagagaatgagcccagcctgcagagtaaactccaagacgaagccaactaccatctttatggcagccgcatggacaggcagacgaaacagcagcccagacagaatgtggcttacaacagagaggaggaaaggagacgcagggtctcccatgacccttttgcacagcaaagaccttacgagaattttcagaatacagagggaaaaggcactgcttattccagtgcagccagtcatggtaatgcagtgcaccagccctcagggctcaccagccaacctcaagtactgtatcagaacaatggattatatagctcacatggctttggaacaagaccactggatccaggaacagcaggtcccagagtttggtacaggccaattccaagtcatatgcctagtctgcataatatcccagtgcctgagaccaactatctaggaaatacacccaccatgccattcagctccttgccaccaacagatgaatctataaaatataccatatacaatagtactggcattcagattggagcctacaattatatggagattggtgggacgagttcatcactactagacagcacaaatacgaacttcaaagaagagccagctgctaagtaccaagctatctttgataataccactagtctgacggataaacacctggacccaatcagggaaaatctgggaaagcactggaaaaactgtgcccgtaaactgggcttcacacagtctcagattgatgaaattgaccatgactatgagcgagatggactgaaagaaaaggtttaccagatgctccaaaagtgggtgatgagggaaggcataaagggagccacggtggggaagctggcccaggcgctccaccagtgttccaggatcgaccttctgagcagcttgatttacgtcagccagaactaaccctggatgggctacggcagctgaagtggacgcctcacttagtggataaccccagaaagttggctgcctcagagcattcagaattctgtcctcactgataggggttctgtgtctgcagaaattttgtttcctgtacttcatagctggagaatggggaaagaaatctgcagcaaaggggtctcactctgttgccaggctggtctcaaacttctggactcaagtgatcctcccgcctcggccttccaaagtgctgggatatcaggcactgagccactgcgcccagccaacaatccgctctgaggaaagcgtaagcaggaagacctcttaatggcatagcaccaataaaaaaatgactcctagttgtgtttggaaagggagagaagagatgtctgaggaaggtcatgttctttcagcttatggcatttcctagagttttgttgaagcaagaagaaaaactcagagaatataaaatcaacttttaaaattgtgtgctctcttcttcacgtaggctcctgttaaaaacaaagtgcagtcagattctaagccctgttcagagacttcgtggatcacagctgcagctcaccgccacatcacaggatccgttaacgttaatacccaatactctgtcagccactgtaggctctaagaaccacgtgcagtcttcagcccattaaattatcgattattttttaatgaattgaatttatattgagtcttcaaattaactgaatggatttaaaggggtaccaaggaggggggaaacatcagaatttcccaggcagttgttgcaaggaattggtactaaccgtgactacaacaaaaattcttgattgacttttaaagttatttcctggcattctggtaccttcacccagcctgagtgccctggagagggaacaggaaatgctgatctctacccctgggtgagaccagaacctcagggctgatactgttgagtggcttcctcggtttactctgtgtactgtgaaagtattttcatattttttctgtgtgccagagtgaaaaaggacagcttctgagtgtggtaattgtgcctctagcacccagcctttcaaagcccacctgaaacctgggggtggatgaaagaactagaatagaagactgaagctgggggcactgttctccccagccccccgccccagttgtgacaatagtctctaaacattgtcaaatggtccaaggaaaggggaaaattgccccggttgagaagagcactgctgtaaagtaatgagcctcggctctcctgtctgcacctgtccggttactacttggccaccacgcagccttggctcctacagcccaaaagggagaatggagggaggctccaggctttgctggaggggcctgggtgagttctgtttgctccttgtaccaccatccaaatggtgttatcaaatctcttagattccaaagaggttgaataattaatgttcaaaggcaagagggcaaggcattttttaacactttttaaaataaaaatttataccccaactttaggcta

SEQ ID NO: 427664 - DNA, 3914 bp, Homo sapiens
cccggctagtcccggcaggcggagccccagttagactgctcgtcaagtgtgggaaaagctccgtggcgtcacaagctactatataaaaggcggtgcccgccggggccgagtgggagtccgcggcgagcgcagcagcagggcccggtcctgcgcctcgggagtcggcgtccaggctcggagcgcgacacggagactaggtggcaggcacaacgaggccctcttggaggaggcgaagatgatgaacagactgagacacagccgggtggtgaagctcctgggcgtcatcatagaggaagggaagtactccctggtgatggagtacatggagaagggcaacctgatgcacgtgctgaaagccgagatgagtactccgctttctgtaaaaggaaggataattttggaaatcattgaaggaatgtgctacttacatggaaaaggcgtgatacacaaggacctgaagcctgaaaatatccttgttgataatgacttccacattaagatcgcagacctcggccttgcctcctttaagatgtggagcaaactgaataatgaagagcacaatgagctgagggaagtggacggcaccgctaagaagaatggcggcaccctctactacatggcgcccgagcacctgaatgacgtcaacgcaaagcccacagagaagtcggatgtgtacagctttgctgtagtactctgggcgatatttgcaaataaggagccatatgaaaatgctatctgtgagcagcagttgataatgtgcataaaatctgggaacaggccagatgtggatgacatcactgagtactgcccaagagaaattatcagtctcatgaagctctgctgggaagcgaatccggaagctcggccgacatttcctggcattgaagaaaaatttaggcctttttatttaagtcaattagaagaaagtgtagaagaggacgtgaagagtttaaagaaagagtattcaaacgaaaatgcagttgtgaagagaatgcagtctcttcaacttgattgtgtggcagtaccttcaagccggtcaaattcagccacagaacagcctggttcactgcacagttcccagggacttgggatgggtcctgtggaggagtcctggtttgctccttccctggagcacccacaagaagagaatgagcccagcctgcagagtaaactccaagacgaagccaactaccatctttatggcagccgcatggacaggcagacgaaacagcagcccagacagaatgtggcttacaacagagaggaggaaaggagacgcagggtctcccatgacccttttgcacagcaaagaccttacgagaattttcagaatacagagggaaaaggcactgcttattccagtgcagccagtcatggtaatgcagtgcaccagccctcagggctcaccagccaacctcaagtactgtatcagaacaatggattatatagctcacatggctttggaacaagaccactggatccaggaacagcaggtcccagagtttggtacaggccaattccaagtcatatgcctagtctgcataatatcccagtgcctgagaccaactatctaggaaatacacccaccatgccattcagctccttgccaccaacagatgaatctataaaatataccatatacaatagtactggcattcagattggagcctacaattatatggagattggtgggacgagttcatcactactagacagcacaaatacgaacttcaaagaagagccagctgctaagtaccaagctatctttgataataccactagtctgacggataaacacctggacccaatcagggaaaatctgggaaagcactggaaaaactgtgcccgtaaactgggcttcacacagtctcagattgatgaaattgaccatgactatgagcgagatggactgaaagaaaaggtttaccagatgctccaaaagtgggtgatgagggaaggcataaagggagccacggtggggaagctggcccaggcgctccaccagtgttccaggatcgaccttctgagcagcttgatttacgtcagccagaactaaccctggatgggctacggcagctgaagtggacgcctcacttagtggataaccccagaaagttggctgcctcagagcattcagaattctgtcctcactgataggggttctgtgtctgcagaaattttgtttcctgtacttcatagctggagaatggggaaagaaatctgcagcaaaggggtctcactctgttgccaggctggtctcaaacttctggactcaagtgatcctcccgcctcggccttccaaagtgctgggatatcaggcactgagccactgcgcccagccaacaatccgctctgaggaaagcgtaagcaggaagacctcttaatggcatagcaccaataaaaaaatgactcctagttgtgtttggaaagggagagaagagatgtctgaggaaggtcatgttctttcagcttatggcatttcctagagttttgttgaagcaagaagaaaaactcagagaatataaaatcaacttttaaaattgtgtgctctcttcttcacgtaggctcctgttaaaaacaaagtgcagtcagattctaagccctgttcagagacttcgtggatcacagctgcagctcaccgccacatcacaggatccgttaacgttaatacccaatactctgtcagccactgtaggctctaagaaccacgtgcagtcttcagcccattaaattatcgattattttttaatgaattgaatttatattgagtcttcaaattaactgaatggatttaaaggggtaccaaggaggggggaaacatcagaatttcccaggcagttgttgcaaggaattggtactaaccgtgactacaacaaaaattcttgattgacttttaaagttatttcctggcattctggtaccttcacccagcctgagtgccctggagagggaacaggaaatgctgatctctacccctgggtgagaccagaacctcagggctgatactgttgagtggcttcctcggtttactctgtgtactgtgaaagtattttcatattttttctgtgtgccagagtgaaaaaggacagcttctgagtgtggtaattgtgcctctagcacccagcctttcaaagcccacctgaaacctgggggtggatgaaagaactagaatagaagactgaagctgggtaggccgctcagtgtccactggcattttgctaaaccgacaaggaaggctgtgtgcttagctctccccagagggagggcgagaagggtgtggtgatggtcaatctggctgtcggaacagattctggtgtcttgggctgataacagtgttgttgattctgattgtgaatcccctcaactctagcagacacatacacacccctgaaatggggctgcagagcaggctgtctcagccttgccactgtcggcatctcgggctgggtaattctgttgtggggactgtcctgttccttgtaggatgtttagtagcatccctgcccccacctactagatgccaggggcactgttctccccagccccccgccccagttgtgacaatagtctctaaacattgtcaaatggtccaaggaaaggggaaaattgccccggttgagaagagcactgctgtaaagtaatgagcctcggctctcctgtctgcacctgtccggttactacttggccaccacgcagccttggctcctacagcccaaaagggagaatggagggaggctccaggctttgctggaggggcctgggtgagttctgtttgctccttgtaccaccatccaaatggtgttatcaaatctcttagattccaaagaggttgaataattaatgttcaaaggcaagagggcaaggcattttttaacactttttaaaataaaaatttataccccaactttaggcta

SEQ ID NO: 427665 - DNA, 3932 bp, Homo sapiens
cagaaactgcttgctcgtatatttattcatccattcattcaacaagcattccaggtacaatcctaggttctaaagatacagtcctaaataatatatatttttgttctcaaggagcttaattttatagtattttatgcattaccaaattattgtgggatttttgtttttacactaacaaaatacaacacgaataccctctgcccccccccgaatgaaatctttcttgtttcccagtgacagcagtactgtggtgcacctgctggaaggaaacctggtaaccttctcctcaggctcagatcccaccaccctttcatgaaacagttgctttggcctatttgataacctttccatttcatagacttaatatcacttgttttagatgagtactccgctttctgtaaaaggaaggataattttggaaatcattgaaggaatgtgctacttacatggaaaaggcgtgatacacaaggacctgaagcctgaaaatatccttgttgataatgacttccacattaagatcgcagacctcggccttgcctcctttaagatgtggagcaaactgaataatgaagagcacaatgagctgagggaagtggacggcaccgctaagaagaatggcggcaccctctactacatggcgcccgagcacctgaatgacgtcaacgcaaagcccacagagaagtcggatgtgtacagctttgctgtagtactctgggcgatatttgcaaataaggagccatatgaaaatgctatctgtgagcagcagttgataatgtgcataaaatctgggaacaggccagatgtggatgacatcactgagtactgcccaagagaaattatcagtctcatgaagctctgctgggaagcgaatccggaagctcggccgacatttcctggcattgaagaaaaatttaggcctttttatttaagtcaattagaagaaagtgtagaagaggacgtgaagagtttaaagaaagagtattcaaacgaaaatgcagttgtgaagagaatgcagtctcttcaacttgattgtgtggcagtaccttcaagccggtcaaattcagccacagaacagcctggttcactgcacagttcccagggacttgggatgggtcctgtggaggagtcctggtttgctccttccctggagcacccacaagaagagaatgagcccagcctgcagagtaaactccaagacgaagccaactaccatctttatggcagccgcatggacaggcagacgaaacagcagcccagacagaatgtggcttacaacagagaggaggaaaggagacgcagggtctcccatgacccttttgcacagcaaagaccttacgagaattttcagaatacagagggaaaaggcactgcttattccagtgcagccagtcatggtaatgcagtgcaccagccctcagggctcaccagccaacctcaagtactgtatcagaacaatggattatatagctcacatggctttggaacaagaccactggatccaggaacagcaggtcccagagtttggtacaggccaattccaagtcatatgcctagtctgcataatatcccagtgcctgagaccaactatctaggaaatacacccaccatgccattcagctccttgccaccaacagatgaatctataaaatataccatatacaatagtactggcattcagattggagcctacaattatatggagattggtgggacgagttcatcactactagacagcacaaatacgaacttcaaagaagagccagctgctaagtaccaagctatctttgataataccactagtctgacggataaacacctggacccaatcagggaaaatctgggaaagcactggaaaaactgtgcccgtaaactgggcttcacacagtctcagattgatgaaattgaccatgactatgagcgagatggactgaaagaaaaggtttaccagatgctccaaaagtgggtgatgagggaaggcataaagggagccacggtggggaagctggcccaggcgctccaccagtgttccaggatcgaccttctgagcagcttgatttacgtcagccagaactaaccctggatgggctacggcagctgaagtggacgcctcacttagtggataaccccagaaagttggctgcctcagagcattcagaattctgtcctcactgataggggttctgtgtctgcagaaattttgtttcctgtacttcatagctggagaatggggaaagaaatctgcagcaaaggggtctcactctgttgccaggctggtctcaaacttctggactcaagtgatcctcccgcctcggccttccaaagtgctgggatatcaggcactgagccactgcgcccagccaacaatccgctctgaggaaagcgtaagcaggaagacctcttaatggcatagcaccaataaaaaaatgactcctagttgtgtttggaaagggagagaagagatgtctgaggaaggtcatgttctttcagcttatggcatttcctagagttttgttgaagcaagaagaaaaactcagagaatataaaatcaacttttaaaattgtgtgctctcttcttcacgtaggctcctgttaaaaacaaagtgcagtcagattctaagccctgttcagagacttcgtggatcacagctgcagctcaccgccacatcacaggatccgttaacgttaatacccaatactctgtcagccactgtaggctctaagaaccacgtgcagtcttcagcccattaaattatcgattattttttaatgaattgaatttatattgagtcttcaaattaactgaatggatttaaaggggtaccaaggaggggggaaacatcagaatttcccaggcagttgttgcaaggaattggtactaaccgtgactacaacaaaaattcttgattgacttttaaagttatttcctggcattctggtaccttcacccagcctgagtgccctggagagggaacaggaaatgctgatctctacccctgggtgagaccagaacctcagggctgatactgttgagtggcttcctcggtttactctgtgtactgtgaaagtattttcatattttttctgtgtgccagagtgaaaaaggacagcttctgagtgtggtaattgtgcctctagcacccagcctttcaaagcccacctgaaacctgggggtggatgaaagaactagaatagaagactgaagctgggtaggccgctcagtgtccactggcattttgctaaaccgacaaggaaggctgtgtgcttagctctccccagagggagggcgagaagggtgtggtgatggtcaatctggctgtcggaacagattctggtgtcttgggctgataacagtgttgttgattctgattgtgaatcccctcaactctagcagacacatacacacccctgaaatggggctgcagagcaggctgtctcagccttgccactgtcggcatctcgggctgggtaattctgttgtggggactgtcctgttccttgtaggatgtttagtagcatccctgcccccacctactagatgccaggggcactgttctccccagccccccgccccagttgtgacaatagtctctaaacattgtcaaatggtccaaggaaaggggaaaattgccccggttgagaagagcactgctgtaaagtaatgagcctcggctctcctgtctgcacctgtccggttactacttggccaccacgcagccttggctcctacagcccaaaagggagaatggagggaggctccaggctttgctggaggggcctgggtgagttctgtttgctccttgtaccaccatccaaatggtgttatcaaatctcttagattccaaagaggttgaataattaatgttcaaaggcaagagggcaaggcattttttaacactttttaaaataaaaatttataccccaactttaggcta

SEQ ID NO: 427666 - DNA, 3187 bp, Homo sapiens
cccggctagtcccggcaggcggagccccagttagactgctcgtcaagtgtgggaaaagctccgtggcgtcacaagctactatataaaaggcggtgcccgccggggccgagtgggagtccgcggcgagcgcagcagcagggcccggtcctgcgcctcgggagtcggcgtccaggctcggagcgcgacacggagactaggtggcagggtacagctctgccggggggggaaaaagtggtaccattttgggcgttcttgagcttcagaatgcagtctcttcaacttgattgtgtggcagtaccttcaagccggtcaaattcagccacagaacagcctggttcactgcacagttcccagggacttgggatgggtcctgtggaggagtcctggtttgctccttccctggagcacccacaagaagagaatgagcccagcctgcagagtaaactccaagacgaagccaactaccatctttatggcagccgcatggacaggcagacgaaacagcagcccagacagaatgtggcttacaacagagaggaggaaaggagacgcagggtctcccatgacccttttgcacagcaaagaccttacgagaattttcagaatacagagggaaaaggcactgcttattccagtgcagccagtcatggtaatgcagtgcaccagccctcagggctcaccagccaacctcaagtactgtatcagaacaatggattatatagctcacatggctttggaacaagaccactggatccaggaacagcaggtcccagagtttggtacaggccaattccaagtcatatgcctagtctgcataatatcccagtgcctgagaccaactatctaggaaatacacccaccatgccattcagctccttgccaccaacagatgaatctataaaatataccatatacaatagtactggcattcagattggagcctacaattatatggagattggtgggacgagttcatcactactagacagcacaaatacgaacttcaaagaagagccagctgctaagtaccaagctatctttgataataccactagtctgacggataaacacctggacccaatcagggaaaatctgggaaagcactggaaaaactgtgcccgtaaactgggcttcacacagtctcagattgatgaaattgaccatgactatgagcgagatggactgaaagaaaaggtttaccagatgctccaaaagtgggtgatgagggaaggcataaagggagccacggtggggaagctggcccaggcgctccaccagtgttccaggatcgaccttctgagcagcttgatttacgtcagccagaactaaccctggatgggctacggcagctgaagtggacgcctcacttagtggataaccccagaaagttggctgcctcagagcattcagaattctgtcctcactgataggggttctgtgtctgcagaaattttgtttcctgtacttcatagctggagaatggggaaagaaatctgcagcaaaggggtctcactctgttgccaggctggtctcaaacttctggactcaagtgatcctcccgcctcggccttccaaagtgctgggatatcaggcactgagccactgcgcccagccaacaatccgctctgaggaaagcgtaagcaggaagacctcttaatggcatagcaccaataaaaaaatgactcctagttgtgtttggaaagggagagaagagatgtctgaggaaggtcatgttctttcagcttatggcatttcctagagttttgttgaagcaagaagaaaaactcagagaatataaaatcaacttttaaaattgtgtgctctcttcttcacgtaggctcctgttaaaaacaaagtgcagtcagattctaagccctgttcagagacttcgtggatcacagctgcagctcaccgccacatcacaggatccgttaacgttaatacccaatactctgtcagccactgtaggctctaagaaccacgtgcagtcttcagcccattaaattatcgattattttttaatgaattgaatttatattgagtcttcaaattaactgaatggatttaaaggggtaccaaggaggggggaaacatcagaatttcccaggcagttgttgcaaggaattggtactaaccgtgactacaacaaaaattcttgattgacttttaaagttatttcctggcattctggtaccttcacccagcctgagtgccctggagagggaacaggaaatgctgatctctacccctgggtgagaccagaacctcagggctgatactgttgagtggcttcctcggtttactctgtgtactgtgaaagtattttcatattttttctgtgtgccagagtgaaaaaggacagcttctgagtgtggtaattgtgcctctagcacccagcctttcaaagcccacctgaaacctgggggtggatgaaagaactagaatagaagactgaagctgggtaggccgctcagtgtccactggcattttgctaaaccgacaaggaaggctgtgtgcttagctctccccagagggagggcgagaagggtgtggtgatggtcaatctggctgtcggaacagattctggtgtcttgggctgataacagtgttgttgattctgattgtgaatcccctcaactctagcagacacatacacacccctgaaatggggctgcagagcaggctgtctcagccttgccactgtcggcatctcgggctgggtaattctgttgtggggactgtcctgttccttgtaggatgtttagtagcatccctgcccccacctactagatgccaggggcactgttctccccagccccccgccccagttgtgacaatagtctctaaacattgtcaaatggtccaaggaaaggggaaaattgccccggttgagaagagcactgctgtaaagtaatgagcctcggctctcctgtctgcacctgtccggttactacttggccaccacgcagccttggctcctacagcccaaaagggagaatggagggaggctccaggctttgctggaggggcctgggtgagttctgtttgctccttgtaccaccatccaaatggtgttatcaaatctcttagattccaaagaggttgaataattaatgttcaaaggcaagagggcaaggcattttttaacactttttaaaataaaaatttataccccaactttaggcta

SEQ ID NO: 427667 - DNA, 3081 bp, Homo sapiens
aattttcctagtactctcttactgccagcgaggagctcctattattatttgtaaagcttgtgggaagaggaccatctcctaaatgctttggactggtctcgtacttgttttctgtgtgttactttgagatacagattcatgacggcgctcagattttattttactttttaatgtttcatgacacccattctaatgttgatcatttcttctcagccacagaacagcctggttcactgcacagttcccagggacttgggatgggtcctgtggaggagtcctggtttgctccttccctggagcacccacaagaagagaatgagcccagcctgcagagtaaactccaagacgaagccaactaccatctttatggcagccgcatggacaggcagacgaaacagcagcccagacagaatgtggcttacaacagagaggaggaaaggagacgcagggtctcccatgacccttttgcacagcaaagaccttacgagaattttcagaatacagagggaaaaggcactgcttattccagtgcagccagtcatggtaatgcagtgcaccagccctcagggctcaccagccaacctcaagtactgtatcagaacaatggattatatagctcacatggctttggaacaagaccactggatccaggaacagcaggtcccagagtttggtacaggccaattccaagtcatatgcctagtctgcataatatcccagtgcctgagaccaactatctaggaaatacacccaccatgccattcagctccttgccaccaacagatgaatctataaaatataccatatacaatagtactggcattcagattggagcctacaattatatggagattggtgggacgagttcatcactactagacagcacaaatacgaacttcaaagaagagccagctgctaagtaccaagctatctttgataataccactagtctgacggataaacacctggacccaatcagggaaaatctgggaaagcactggaaaaactgtgcccgtaaactgggcttcacacagtctcagattgatgaaattgaccatgactatgagcgagatggactgaaagaaaaggtttaccagatgctccaaaagtgggtgatgagggaaggcataaagggagccacggtggggaagctggcccaggcgctccaccagtgttccaggatcgaccttctgagcagcttgatttacgtcagccagaactaaccctggatgggctacggcagctgaagtggacgcctcacttagtggataaccccagaaagttggctgcctcagagcattcagaattctgtcctcactgataggggttctgtgtctgcagaaattttgtttcctgtacttcatagctggagaatggggaaagaaatctgcagcaaaggggtctcactctgttgccaggctggtctcaaacttctggactcaagtgatcctcccgcctcggccttccaaagtgctgggatatcaggcactgagccactgcgcccagccaacaatccgctctgaggaaagcgtaagcaggaagacctcttaatggcatagcaccaataaaaaaatgactcctagttgtgtttggaaagggagagaagagatgtctgaggaaggtcatgttctttcagcttatggcatttcctagagttttgttgaagcaagaagaaaaactcagagaatataaaatcaacttttaaaattgtgtgctctcttcttcacgtaggctcctgttaaaaacaaagtgcagtcagattctaagccctgttcagagacttcgtggatcacagctgcagctcaccgccacatcacaggatccgttaacgttaatacccaatactctgtcagccactgtaggctctaagaaccacgtgcagtcttcagcccattaaattatcgattattttttaatgaattgaatttatattgagtcttcaaattaactgaatggatttaaaggggtaccaaggaggggggaaacatcagaatttcccaggcagttgttgcaaggaattggtactaaccgtgactacaacaaaaattcttgattgacttttaaagttatttcctggcattctggtaccttcacccagcctgagtgccctggagagggaacaggaaatgctgatctctacccctgggtgagaccagaacctcagggctgatactgttgagtggcttcctcggtttactctgtgtactgtgaaagtattttcatattttttctgtgtgccagagtgaaaaaggacagcttctgagtgtggtaattgtgcctctagcacccagcctttcaaagcccacctgaaacctgggggtggatgaaagaactagaatagaagactgaagctgggtaggccgctcagtgtccactggcattttgctaaaccgacaaggaaggctgtgtgcttagctctccccagagggagggcgagaagggtgtggtgatggtcaatctggctgtcggaacagattctggtgtcttgggctgataacagtgttgttgattctgattgtgaatcccctcaactctagcagacacatacacacccctgaaatggggctgcagagcaggctgtctcagccttgccactgtcggcatctcgggctgggtaattctgttgtggggactgtcctgttccttgtaggatgtttagtagcatccctgcccccacctactagatgccaggggcactgttctccccagccccccgccccagttgtgacaatagtctctaaacattgtcaaatggtccaaggaaaggggaaaattgccccggttgagaagagcactgctgtaaagtaatgagcctcggctctcctgtctgcacctgtccggttactacttggccaccacgcagccttggctcctacagcccaaaagggagaatggagggaggctccaggctttgctggaggggcctgggtgagttctgtttgctccttgtaccaccatccaaatggtgttatcaaatctcttagattccaaagaggttgaataattaatgttcaaaggcaagagggcaaggcattttttaacactttttaaaataaaaatttataccccaactttaggcta

SEQ ID NO: 427668 - DNA, 2373 bp, Homo sapiens
gcatatgacttggaattggcctgtaccaaactctgggacctgctgttcctggatccagtggtcttgttccaacagatgaatctataaaatataccatatacaatagtactggcattcagattggagcctacaattatatggagattggtgggacgagttcatcactactagacagcacaaatacgaacttcaaagaagagccagctgctaagtaccaagctatctttgataataccactagtctgacggataaacacctggacccaatcagggaaaatctgggaaagcactggaaaaactgtgcccgtaaactgggcttcacacagtctcagattgatgaaattgaccatgactatgagcgagatggactgaaagaaaaggtttaccagatgctccaaaagtgggtgatgagggaaggcataaagggagccacggtggggaagctggcccaggcgctccaccagtgttccaggatcgaccttctgagcagcttgatttacgtcagccagaactaaccctggatgggctacggcagctgaagtggacgcctcacttagtggataaccccagaaagttggctgcctcagagcattcagaattctgtcctcactgataggggttctgtgtctgcagaaattttgtttcctgtacttcatagctggagaatggggaaagaaatctgcagcaaaggggtctcactctgttgccaggctggtctcaaacttctggactcaagtgatcctcccgcctcggccttccaaagtgctgggatatcaggcactgagccactgcgcccagccaacaatccgctctgaggaaagcgtaagcaggaagacctcttaatggcatagcaccaataaaaaaatgactcctagttgtgtttggaaagggagagaagagatgtctgaggaaggtcatgttctttcagcttatggcatttcctagagttttgttgaagcaagaagaaaaactcagagaatataaaatcaacttttaaaattgtgtgctctcttcttcacgtaggctcctgttaaaaacaaagtgcagtcagattctaagccctgttcagagacttcgtggatcacagctgcagctcaccgccacatcacaggatccgttaacgttaatacccaatactctgtcagccactgtaggctctaagaaccacgtgcagtcttcagcccattaaattatcgattattttttaatgaattgaatttatattgagtcttcaaattaactgaatggatttaaaggggtaccaaggaggggggaaacatcagaatttcccaggcagttgttgcaaggaattggtactaaccgtgactacaacaaaaattcttgattgacttttaaagttatttcctggcattctggtaccttcacccagcctgagtgccctggagagggaacaggaaatgctgatctctacccctgggtgagaccagaacctcagggctgatactgttgagtggcttcctcggtttactctgtgtactgtgaaagtattttcatattttttctgtgtgccagagtgaaaaaggacagcttctgagtgtggtaattgtgcctctagcacccagcctttcaaagcccacctgaaacctgggggtggatgaaagaactagaatagaagactgaagctgggtaggccgctcagtgtccactggcattttgctaaaccgacaaggaaggctgtgtgcttagctctccccagagggagggcgagaagggtgtggtgatggtcaatctggctgtcggaacagattctggtgtcttgggctgataacagtgttgttgattctgattgtgaatcccctcaactctagcagacacatacacacccctgaaatggggctgcagagcaggctgtctcagccttgccactgtcggcatctcgggctgggtaattctgttgtggggactgtcctgttccttgtaggatgtttagtagcatccctgcccccacctactagatgccaggggcactgttctccccagccccccgccccagttgtgacaatagtctctaaacattgtcaaatggtccaaggaaaggggaaaattgccccggttgagaagagcactgctgtaaagtaatgagcctcggctctcctgtctgcacctgtccggttactacttggccaccacgcagccttggctcctacagcccaaaagggagaatggagggaggctccaggctttgctggaggggcctgggtgagttctgtttgctccttgtaccaccatccaaatggtgttatcaaatctcttagattccaaagaggttgaataattaatgttcaaaggcaagagggcaaggcattttttaacactttttaaaataaaaatttataccccaactttaggcta

SEQ ID NO: 427669 - DNA, 752 bp, Homo sapiens
  misc_feature (6)..(6): n is a, c, g, or t
ctcgtncaaattcggcagcggcccacgtaggccgctcagtgtccactggcattttgctaaaccgacaaggaaggctgtgtgcttagctctccccagagggagggcgagaagggtgtggtgatggtcaatctggctgtcggaacagattctggtgtcttgggctgataacagtgttgttgattctgattgtgaatcccctcaactctagcagacacatacacacccctgaaatggggctgcagagcaggctgtctcagccttgccactgtcggcatctcgggctgggtaattctgttgtggggactgtcctgttccttgtaggatgtttagtagcatccctgcccccacctactagatgccaggggcactgttctccccagccccccgccccagttgtgacaatagtctctaaacattgtcaaatggtccaaggaaaggggaaaattgccccggttgagaagagcactgctgtaaagtaatgagcctcggctctcctgtctgcacctgtccggttactacttggccaccacgcagccttggctcctacagcccaaaagggagaatggagggaggctccaggctttgctggaggggcctgggtgagttctgtttgctccttgtaccaccatccaaatggtgttatcaaatctcttagattccaaagaggttgaataattaatgttcaaaggcaagagggcaaggcattttttaacactttttaaaataaaaatttataccccaactttaggcta

SEQ ID NO: 427670 - DNA, 2252 bp, Homo sapiens
cccggctagtcccggcaggcggagccccagttagactgctcgtcaagtgtgggaaaagctccgtggcgtcacaagctactatataaaaggcggtgcccgccggggccgagtgggagtccgcggcgagcgcagcagcagggcccggtcctgcgcctcgggagtcggcgtccaggctcggagcgcgacacggagactaggtggcaggcacaacgaggccctcttggaggaggcgaagatgatgaacagactgagacacagccgggtggtgaagctcctgggcgtcatcatagaggaagggaagtactccctggtgatggagtacatggagaagggcaacctgatgcacgtgctgaaagccgagatgagtactccgctttctgtaaaaggaaggataattttggaaatcattgaaggaatgtgctacttacatggaaaaggcgtgatacacaaggacctgaagcctgaaaatatccttgttgataatgacttccacattaagatcgcagacctcggccttgcctcctttaagatgtggagcaaactgaataatgaagagcacaatgagctgagggaagtggacggcaccgctaagaagaatggcggcaccctctactacatggcgcccgagcacctgaatgacgtcaacgcaaagcccacagagaagtcggatgtgtacagctttgctgtagtactctgggcgatatttgcaaataaggagccatatgaaaatgctatctgtgagcagcagttgataatgtgcataaaatctgggaacaggccagatgtggatgacatcactgagtactgcccaagagaaattatcagtctcatgaagctctgctgggaagcgaatccggaagctcggccgacatttcctggcattgaagaaaaatttaggcctttttatttaagtcaattagaagaaagtgtagaagaggacgtgaagagtttaaagaaagagtattcaaacgaaaatgcagttgtgaagagaatgcagtctcttcaacttgattgtgtggcagtaccttcaagccggtcaaattcagccacagaacagcctggttcactgcacagttcccagggacttgggatgggtcctgtggaggagtcctggtttgctccttccctggagcacccacaagaagagaatgagcccagcctgcagagtaaactccaagacgaagccaactaccatctttatggcagccgcatggacaggcagacgaaacagcagcccagacagaatgtggcttacaacagagaggaggaaaggagacgcagggtctcccatgacccttttgcacagcaaagaccttacgagaattttcagaatacagagggaaaaggcactgcttattccagtgcagccagtcatggtaatgcagtgcaccagccctcagggctcaccagccaacctcaagtactgtatcagaacaatggattatatagctcacatggctttggaacaagaccactggatccaggaacagcaggtcccagagtttggtacaggccaattccaagtcatatgcctagtctgcataatatcccagtgcctgagaccaactatctaggaaatacacccaccatgccattcagctccttgccaccaacagatgaatctataaaatataccatatacaatagtactggcattcagattggagcctacaattatatggagattggtgggacgagttcatcactactagacagcacaaatacgaacttcaaagaagagccagctgctaagtaccaagctatctttggtaagataccctggaaggactcaacgcctagcaaccttgaactttcttacttgtgagaaggacatagtggaatcttaaaatttctctgataattcttcttgaaagttttcttatgttacttctgcaaaatatctttgtaatttccatataattcctttgtcatttatttatttttaatatggagataatcacagtatttaatttatggatttgttgtgaaaattaaatgagttgatatgtataaaaagcttagaacactgcctggcacatagtaagttctataaaaagtgttaaactttcatcatcatcatcatcagtattacttctcagacccagaagaaatagctgtgtcaggccctcatcgaaggagatcctgtaaaagatagaagactgtgccctccacagcacttctgtaataaaatcaagagggctatctcttatagggttctatggtgcagcccataatgctaatcccaaagtaca

SEQ ID NO: 427671 - DNA, 909 bp, Homo sapiens
cagaaactgcttgctcgtatatttattcatccattcattcaacaagcattccaggtacaatcctaggttctaaagatacagtcctaaataatatatatttttgttctcaaggagcttaattttatagtattttatgcattaccaaattattgtgggatttttgtttttacactaacaaaatacaacacgaataccctctgcccccccccgaatgaaatctttcttgtttcccagtgacagcagtactgtggtgcacctgctggaaggaaacctggtaaccttctcctcaggctcagatcccaccaccctttcatgaaacagttgctttggcctatttgataacctttccatttcatagacttaatatcacttgttttagatgagtactccgctttctgtaaaaggaaggataattttggaaatcattgaaggaatgtgctacttacatggaaaaggcgtgatacacaaggacctgaagcctgaaaatatccttgttgataatgacttccacattaagatcgcagacctcggccttgcctcctttaagatgtggagcaaactgaataatgaagagcacaatgagtccaaggaaaggggaaaattgccccggttgagaagagcactgctgtaaagtaatgagcctcggctctcctgtctgcacctgtccggttactacttggccaccacgcagccttggctcctacagcccaaaagggagaatggagggaggctccaggctttgctggaggggcctgggtgagttctgtttgctccttgtaccaccatccaaatggtgttatcaaatctcttagattccaaagaggttgaataattaatgttcaaaggcaagagggcaaggcattttttaacactttttaaaataaaaatttataccccaactttaggcta

SEQ ID NO: 427672 - DNA, 1002 bp, Homo sapiens
cagaaactgcttgctcgtatatttattcatccattcattcaacaagcattccaggtacaatcctaggttctaaagatacagtcctaaataatatatatttttgttctcaaggagcttaattttatagtattttatgcattaccaaattattgtgggatttttgtttttacactaacaaaatacaacacgaataccctctgcccccccccgaatgaaatctttcttgtttcccagtgacagcagtactgtggtgcacctgctggaaggaaacctggtaaccttctcctcaggctcagatcccaccaccctttcatgaaacagttgctttggcctatttgataacctttccatttcatagacttaatatcacttgttttagatgagtactccgctttctgtaaaaggaaggataattttggaaatcattgaaggaatgtgctacttacatggaaaaggcgtgatacacaaggacctgaagcctgaaaatatccttgttgataatgacttccacattaagatcgcagacctcggccttgcctcctttaagatgtggagcaaactgaataatgaagagcacaatgagctgagggaagtggacggcaccgctaagaagaatggcggcaccctctactacatggcgcccgagcacctgaatgacgtcaacgcaaagcccacagagaagtcggatgtgtacagctttgctgtagtactctgggcgatatttgcaaataaggagccatatgaaaatgctatctgtgagcagcagttgataatgtgcataaaatctgggaacaggccagatgtggatgacatcactgagtactgcccaagagaaattatcagtctcatgaagctctgctgggaagcgaatccggaagctcggccgacatttcctggcattgaagaaaaatttaggcctttttatttaagtcaattagaagaaagtgtagaagaggacgtgaagagtttaaaggtaggcaatatagcagatgctcaaaatat

SEQ ID NO: 427673 - DNA, 433 bp, Homo sapiens
ggcccctccgcacggggatccccagcgcttgggccctggctgtctgttatggctccccttggggtgtttgtttgcagctcgttagcatcaaatttgcaaattgcttggtagtttgaattttcttttcctttttttatagagacaaggtcttgctatgttgcccaggctgaactccaacacctggtctcaagtgatcctcccacctcagcctctcaagtagctgggattacaggctggatttcctgaagtcagtttctccttaaaacatctatgccttgattgggctccgtgggtcacttctgtaatctcagcacttttggcaggaggatcacttgagccttggtgctcaagaccagcctggataacacagtgaaatcccctctctacaaaaaataaaaggtgcatgtgaacagagcaagaccctgtctctgaa

SEQ ID NO: 427674 - DNA, 347 bp, Homo sapiens
gaagagatcggtacagacccaagcatgaccccagcacgtgggagtgatgtgttggaggtgtgcaccaggctcttgaggcgctggctctgccagcctcagcatagcacctttcctgcccacaggcacaacgaggccctcttggaggaggcgaagatgatgaacagactgagacacagccgggtggtgaagctcctgggcgtcatcatagaggaagggaagtactccctggtgatggagtacatggagaagggcaacctgatgcacgtgctgaaagccgaggtagagagggcccctccgcacggggatccccagcgcttgggccctggctgtctgttatggctcccctt

SEQ ID NO: 427675 - DNA, 854 bp, Homo sapiens
cagaaaggcacatgggcggggctgcgaggagcaggcggggcgggggcgccgaggagagcggcgcggcgtgcgcgggcacgaggcgtagtggtctcccctaaggctgaggcggcggcgggcgcgcggcggcggcgggcgtgcgaggctgttgtgctcccggctctcgtgtttcccctcctgagcgggtggaggaggcccaagcggtgctgggcgcgctcccccttcctttccctccggcgtcctctcccggccctctcgcgctgcactgtctctccgacgcaagactgtcccggcccggatatggctcgtggacagcagaaaattcagtctcagcagaaaaatgccaaaaagcaagctggacaaaagaagaaacaaggacatgaccaaaaggctgctgccaaagctgccttaatatatacctgcactgtctgtaggacacaaatgccagaccctaagaccttcaagcagcactttgagagcaagcatcctaagactccacttcctccagaattagctgatgttcaggcataaggttgtttacaggtgaattcatgacacctttgactcttctactgtctcagaccttaggtaacatacctgcagctgcttttctaacaaactgttgatcagcaaaaataaaggggctacagaaacactcatttttatgctgttccctcttgggcttcatgcaaagacaattctgtgtaaatgtacagttgactctgatttggaaatatgaaaatcagtccatccttgttataaaaaatttttttacaattgtaattatattgatgttcatattgtgtaaaataactcatttaataaaatagtactttgatttacgacatcacagg

SEQ ID NO: 427676 - DNA, 969 bp, Homo sapiens
cagaaaggcacatgggcggggctgcgaggagcaggcggggcgggggcgccgaggagagcggcgcggcgtgcgcgggcacgaggcgtagtggtctcccctaaggctgaggcggcggcgggcgcgcggcggcggcgggcgtgcgaggctgttgtgctcccggctctcgtgtttcccctcctgagcgggtggaggaggcccaagcggtgctgggcgcgctcccccttcctttccctccggcgtcctctcccggccctctcgcgctgcactgtctctccgacgcaagactgtcccggcccggagtctcactgtcgcccaggctgcagtgcagtggtgccatcacgcgtcactgcaacctctgcctcccggattcaagcaattctccacctcagcctcccaagtagctggaattacagatatggctcgtggacagcagaaaattcagtctcagcagaaaaatgccaaaaagcaagctggacaaaagaagaaacaaggacatgaccaaaaggctgctgccaaagctgccttaatatatacctgcactgtctgtaggacacaaatgccagaccctaagaccttcaagcagcactttgagagcaagcatcctaagactccacttcctccagaattagctgatgttcaggcataaggttgtttacaggtgaattcatgacacctttgactcttctactgtctcagaccttaggtaacatacctgcagctgcttttctaacaaactgttgatcagcaaaaataaaggggctacagaaacactcatttttatgctgttccctcttgggcttcatgcaaagacaattctgtgtaaatgtacagttgactctgatttggaaatatgaaaatcagtccatccttgttataaaaaatttttttacaattgtaattatattgatgttcatattgtgtaaaataactcatttaataaaatagtactttgatttacgacatcacagg

SEQ ID NO: 427677 - DNA, 747 bp, Homo sapiens
gaagaggaagaattctacctgagttgcgccataaagtgcctgccctctagcctctactcttccagttgcggcttattgcatcacagtaattgctgtacgaaggtcagaatcgctacctattgcccaaagcagtcgtaagaagaggtcccaatcccccactctttccgccctaatggaggtctgcagtttcgatatggctcgtggacagcagaaaattcagtctcagcagaaaaatgccaaaaagcaagctggacaaaagaagaaacaaggacatgaccaaaaggctgctgccaaagctgccttaatatatacctgcactgtctgtaggacacaaatgccagaccctaagaccttcaagcagcactttgagagcaagcatcctaagactccacttcctccagaattagctgatgttcaggcataaggttgtttacaggtgaattcatgacacctttgactcttctactgtctcagaccttaggtaacatacctgcagctgcttttctaacaaactgttgatcagcaaaaataaaggggctacagaaacactcatttttatgctgttccctcttgggcttcatgcaaagacaattctgtgtaaatgtacagttgactctgatttggaaatatgaaaatcagtccatccttgttataaaaaatttttttacaattgtaattatattgatgttcatattgtgtaaaataactcatttaataaaatagtactttgatttacgacatcacagg

SEQ ID NO: 427678 - DNA, 815 bp, Homo sapiens
gttaaaataaggtcttgggcaaattaaactctgggttttagtttccttatcaggtaaaatgatgctagtaggagctaaagattactttgaaggttctgtgggaattaaggtaacatgcttaatataataagggttcagtaaatgttacctattgtttgctgttaatcagataagcagaatacattctatgtgacctacctttctttataggtgaaatgtgggaacgttaggaatttctttaccacaaagtccctcttcatatgccagtcactaagttgtaggaatttaaaggtgtttttgggataattgtctatactgagaaggttcaggattctaaaaagtaacacatttttattttataaataaagtctagctctcttttgcacaattttttgtacacaaatgccagaccctaagaccttcaagcagcactttgagagcaagcatcctaagactccacttcctccagaattagctgatgttcaggcataaggttgtttacaggtgaattcatgacacctttgactcttctactgtctcagaccttaggtaacatacctgcagctgcttttctaacaaactgttgatcagcaaaaataaaggggctacagaaacactcatttttatgctgttccctcttgggcttcatgcaaagacaattctgtgtaaatgtacagttgactctgatttggaaatatgaaaatcagtccatccttgttataaaaaatttttttacaattgtaattatattgatgttcatattgtgtaaaataactcatttaataaaatagtactttgatttacgacatcacagg

SEQ ID NO: 427679 - DNA, 452 bp, Homo sapiens
tcagagttctgtatataaagtcgagttgacaagtttaccagatattatcttcatagtgtttcttcttagttatttgaaatgcatgtaagttgcatttgtgcaatggtaacattcattgaaaattttgcttatgttttataggtgaattcatgacacctttgactcttctactgtctcagaccttaggtaacatacctgcagctgcttttctaacaaactgttgatcagcaaaaataaaggggctacagaaacactcatttttatgctgttccctcttgggcttcatgcaaagacaattctgtgtaaatgtacagttgactctgatttggaaatatgaaaatcagtccatccttgttataaaaaatttttttacaattgtaattatattgatgttcatattgtgtaaaataactcatttaataaaatagtactttgatttacgacatcacagg

SEQ ID NO: 427680 - DNA, 1242 bp, Homo sapiens
cagaaaggcacatgggcggggctgcgaggagcaggcggggcgggggcgccgaggagagcggcgcggcgtgcgcgggcacgaggcgtagtggtctcccctaaggctgaggcggcggcgggcgcgcgaggctgttgtgctcccggctctcgtgtttcccctcctgagcgggtggaggaggcccaagcggtgctgggcgcgctcccccttcctttccctccggcgtcctctcccggccctctcgcgctgcactgtctctccgacgcaagactgtcccggcccggatatggctcgtggacagcagaaaattcagtctcagcagaaaaatgccaaaaagcaagctggacaaaagaagaaacaaggacatgaccaaaaggctgctgccaaagctgccttaatatatacctgcactgtctgtagggtaaggggaattgaattgaaagatacagctctcccgtgggcagttttggcttgaatagattaaaattttgaaaccatggcaaaatagatgctttacatgaaatagtaggtttgagagctgattattttaggtatctattttcattcaccctttaaacaaatattttttgaatggctcctgtggccaggcaaaaatctctaggtgctgggaaaacagagtgaacaaaacaaaattgctttcctcatataaaataaagatgtcttcataagggcatataatacacttcactagcacatcatataactctacactcttagagctatataatatgctagtaagtatacctctagttatataattggttttttcttcactaaatttataattaggatgtctgtaaaaccatatagagtataatcacgttgagagcttttcctagaattaatgtgttgtattagatttgaagaactgtaataataacagctacttttgagtgcttaccatatgccacacatagagccaggtgttttacatgtattcacctatttaatccacataacaaccctataagataaagtacttttattgttctcattttacagaagagtaaactgactaatggaaattaaacaatttgtgtggggtctcccagctggttagtagaagagctggaatctgaactcaggcagttcagctccagagtccaccctctggaccactactgtactgcctctcaaagaagtacttctgaaattccaaatcagagcctcttgcctgtttgtttaagctcattacccttgaagttagtgagtggcagtaccaaa

SEQ ID NO: 427681 - DNA, 865 bp, Homo sapiens
cccggggcgggccgcgggaaggggatgagttcgggcgcctgccaggccctgcaggtggccgggtcgcaggccagccgcggaagcggagcggtaaccttacccccggcgacagccgccggtcagctgccagagtgtggcgctcccggtggacgcaggggccgggtttcgggcagtctcggcctccaggaggcgcgtcttggtccagggtccgtgaggactggctagatgggggctgcgtggcctttggtggcagggaggaggagggggtctccgaggcgggagaggcgggtttgggaaggaaggtgcgccaggctgaagctggggtcggagaagtgttgggtggagacctcactgtgggtgcgttcctcctctcctctccccaaaacgatggtgttaaaagctagggtcaggatgtggagcgctgcctgggcctcttcctttccgatggttatggagaatgagcctacttcctggacccaaaatccttttcttctgttactcatttatgttggttttaaaaggagctttggggcagagcttacttgttgcctcctacgagagcgcctcattttagaactcgtttcttccactacttccctctttgcagccccctcggaaaaccacactgagagttgcattaaaaaccagcatgtaggtatttgtaagtgactttttccctccagtttgtcgcatttaatcaaggagcggttgtagctgcctacgattttgtagaaaattgtgttggcttgagagcaagatcctatagttgagctgtccggcgtgttgtcagaagttaggggcctacctcatgcatttagcttattttattccatttcctttacctggtgttaagttttctgtcttc

SEQ ID NO: 427682 - DNA, 837 bp, Homo sapiens
cagaaaggcacatgggcggggctgcgaggagcaggcggggcgggggcgccgaggagagcggcgcggcgtgcgcgggcacgaggcgtagtggtctcccctaaggctgaggcggcggcgggcgcgcgaggctgttgtgctcccggctctcgtgtttcccctcctgagcgggtggaggaggcccaagcggtgctgggcgcgctcccccttcctttccctccggcgtcctctcccggccctctcgcgctgcactgtctctccgacgcaagactgtcccggcccggatatggctcgtggacagcagaaaattcagtctcagcagaaaaatgccaaaaagcaagctggacaaaagaagaaacaaggacatgaccaaaaggctgctgccaaagctgccttaatatatacctgcactgtctgtaggacacaaatgccagaccctaagaccttcaagcagcactttgagagcaagcatcctaagactccacttcctccagaattagctgatgttcaggcataaggttgtttacaggtgaattcatgacacctttgactcttctactgtctcagaccttaggtaacatacctgcagctgcttttctaacaaactgttgatcagcaaaaataaaggggctacagaaacactcatttttatgctgttccctcttgggcttcatgcaaagacaattctgtgtaaatgtacagttgactctgatttggaaatatgaaaatcagtccatccttgttataaaaaatttttttacaattgtaattatattgatgttcatattgtgtaaaataactcatttaataaaatagtactttgatttacgacatcacagg

SEQ ID NO: 427683 - DNA, 2078 bp, Homo sapiens
tttaaaaaaaatgtgccatttggcttagaattaataattttttttaaagcaaaaatggaagcttagtcttcaaggactgataacagctggtaatatttaccattgtttggtgggaatggggttctcatattaggctagcacgctaaacattttcaattacgaaaatgtattaggctcgtgtgctaccctaatataaaaaccccatatttcctcagttgaaatagtcagctgactatcctgaaaagcattgaccctcttttatattttatctgactttcagttcatttttttaatgctagtgggaacttctccaatcagtgtatttttttagtttccttttttggggaacaggaggagctcagtaatttttatgaaatgctttgacctcatatccattaactaattatggtcctagtcagaagaagctagcacccttccctggtgaagttgatacaaatccattgtatgttcctgtcctgcaatgatttacattcagttacagtactagtcaaaactatatatatatgaattctacttaggatccaattttgatatatttaaaaagcaattgagactcatgatagactttatgagcaggtttaacttgtgtggtcgaataaaagcctttaatttaaatggaaaagtaaaagtaacttttttcagtgacttgattttttttttttgttttaatccatttgggttcacgtcagatcatcggtaacaaaaagtggtatctttcagctttgtaaaagaaccctcttaaccaagttcattccctcaaatgggaactaacgtctagagagcaaagaaacttctggaattagtggcttgctgataatctcattttataatttgttcagcaatccagcaagaccaactttttaaaaaaattaataacagtagttttatgaaaactaagtaagaaaacagtttccacctatttctgaggtctcctttagaaggagtaacagacagcttttatttctcttaaagttataaaaatcacaatcgcaagtcacaatgaatactgggaagggaaattacttttgcagagtgatcaagtaaatgatagcgggggctaaacttttttagtaaacttgtgaagattacatacagtaaagtgcataaatcttgagtgtacaattcaatgaatttttataagtaaacacacttgattcaagaacattttcaggaccccataagtccccttcatgtcctgtcttcccagtcattacccataacccccaaggtgacccctttcactatagattagctttgcctgttttgaactttaaataatgtatattccccacaactggcttctttcctttaacattgagatacaaccaagttgttacttgtaacaattttttgtttgtgtgtttgtttatttatttttgagaccagagtctcactgtcgcccaggctgcagtgcagtggtgccatcacgcgtcactgcaacctctgcctcccggattcaagcaattctccacctcagcctcccaagtagctggaattacagatatggctcgtggacagcagaaaattcagtctcagcagaaaaatgccaaaaagcaagctggacaaaagaagaaacaaggacatgaccaaaaggctgctgccaaagctgccttaatatatacctgcactgtctgtaggacacaaatgccagaccctaagaccttcaagcagcactttgagagcaagcatcctaagactccacttcctccagaattagctgatgttcaggcataaggttgtttacaggtgaattcatgacacctttgactcttctactgtctcagaccttaggtaacatacctgcagctgcttttctaacaaactgttgatcagcaaaaataaaggggctacagaaacactcatttttatgctgttccctcttgggcttcatgcaaagacaattctgtgtaaatgtacagttgactctgatttggaaatatgaaaatcagtccatccttgttataaaaaatttttttacaattgtaattatattgatgttcatattgtgtaaaataactcatttaataaaatagtactttgatttacgacatcacagg

SEQ ID NO: 427684 - DNA, 1013 bp, Homo sapiens
cagaaaggcacatgggcggggctgcgaggagcaggcggggcgggggcgccgaggagagcggcgcggcgtgcgcgggcacgaggcgtagtggtctcccctaaggctgaggcggcggcgggcgcgcggcggcggcgggcgtgcgaggctgttgtgctcccggctctcgtgtttcccctcctgagcgggtggaggaggcccaagcggtgctgggcgcgctcccccttcctttccctccggcgtcctctcccggccctctcgcgctgcactgtctctccgacgcaagactgtcccggcccggccccctcggaaaaccacactgagagttgcattaaaaaccagcatagtctcactgtcgcccaggctgcagtgcagtggtgccatcacgcgtcactgcaacctctgcctcccggattcaagcaattctccacctcagcctcccaagtagctggaattacagatatggctcgtggacagcagaaaattcagtctcagcagaaaaatgccaaaaagcaagctggacaaaagaagaaacaaggacatgaccaaaaggctgctgccaaagctgccttaatatatacctgcactgtctgtaggacacaaatgccagaccctaagaccttcaagcagcactttgagagcaagcatcctaagactccacttcctccagaattagctgatgttcaggcataaggttgtttacaggtgaattcatgacacctttgactcttctactgtctcagaccttaggtaacatacctgcagctgcttttctaacaaactgttgatcagcaaaaataaaggggctacagaaacactcatttttatgctgttccctcttgggcttcatgcaaagacaattctgtgtaaatgtacagttgactctgatttggaaatatgaaaatcagtccatccttgttataaaaaatttttttacaattgtaattatattgatgttcatattgtgtaaaataactcatttaataaaatagtactttgatttacgacatcacagg

SEQ ID NO: 427685 - DNA, 869 bp, Homo sapiens
tccagttttggaatgggcactcagaacattttgtacatgtcttggtgtacataacatttgcatttctattgggtatataccaagagtggaattgctggctcatagaataaacagctaccaactagttttccacagggttgtgtcaattgatacttttgtagcatttatatgtgggaattttaatacctataaatttttatttgccagatatttctataaaacttaaggcttcaattctaagaacgttcttatgctttgattactctgtattagagtaaataagccactctaatgcttcaccttctgtttttagatatggctcgtggacagcagaaaattcagtctcagcagaaaaatgccaaaaagcaagctggacaaaagaagaaacaaggacatgaccaaaaggctgctgccaaagctgccttaatatatacctgcactgtctgtaggacacaaatgccagaccctaagaccttcaagcagcactttgagagcaagcatcctaagactccacttcctccagaattagctgatgttcaggcataaggttgtttacaggtgaattcatgacacctttgactcttctactgtctcagaccttaggtaacatacctgcagctgcttttctaacaaactgttgatcagcaaaaataaaggggctacagaaacactcatttttatgctgttccctcttgggcttcatgcaaagacaattctgtgtaaatgtacagttgactctgatttggaaatatgaaaatcagtccatccttgttataaaaaatttttttacaattgtaattatattgatgttcatattgtgtaaaataactcatttaataaaatagtactttgatttacgacatcacagg

SEQ ID NO: 427686 - DNA, 2914 bp, Homo sapiens
cagaaaggcacatgggcggggctgcgaggagcaggcggggcgggggcgccgaggagagcggcgcggcgtgcgcgggcacgaggcgtagtggtctcccctaaggctgaggcggcggcgggcgcgcggcggcggcgggcgtgcgaggctgttgtgctcccggctctcgtgtttcccctcctgagcgggtggaggaggcccaagcggtgctgggcgcgctcccccttcctttccctccggcgtcctctcccggccctctcgcgctgcactgtctctccgacgcaagactgtcccggcccggatatggctcgtggacagcagaaaattcagtctcagcagaaaaatgccaaaaagcaagctggacaaaagaagaaacaaggacatgaccaaaaggctgctgccaaagctgccttaatatatacctgcactgtctgtaggacacaaatgccagaccctaagaccttcaagcagcactttgagagcaagcatcctaagactccacttcctccagaattagctgatgttcaggcataaggttgtttacaggtgaattcatgacacctttgactcttctactgtctcagaccttaggtaacatacctgcagctgcttttctaacaaactgttgatcagcaaaaataaaggggctacagaaacactcatttttatgctgttccctcttgggcttcatgcaaagacaattctgtgtaaatgtacagttgactctgatttggaaatatgaaaatcagtccatccttgttataaaaaatttttttacaattgtaattatattgatgttcatattgtgtaaaataactcatttaataaaatagtactttgatttacgacatcacaggataaatggttttagaaattctgttctaactttccacattatttgccttataaaaatctaatgaattcatcagctagaattgcaagtgcaattcttatatccctttctctgctcagtggcaggttcctcagttaaactagagcagactgattcattaaaattgtgcatacgattttatgggcagctgatgatctaggtgaaaaatgacttatctgctgccttagtatattgcggttatgtgtcattgtacccctctgatcatttcctgtgtttgagttggaatatttaaaattgcagtatgacctggctctaactgccagtcaggtgtaccctgtagataactgatagcttcctaaaagcggttggattgtcagtgagcccttgtgaaaggttaggttctaatgtatatgccgtaatgaaataatcattaagcctattgtttaatgcaaaatatggaacaaatgtgaactggtaaaggtcgatcttgatactatattctttgaaaattcttgaagttctttaatttgaaattgaaacattaatttttgaggtttttggaagttactatttggccatttttacaaatggattttgcattaacaggaagattggaatgacttgtggctggattaattcccagaaccctctccctcctttcttttctaagtgagttgttgattttaggagtttgctttgtgctgttacctaaaatcagagactggtgtacagtatgacttccatctgaacttgaaaagtattaaaatgggtcaatattcacattcttttagatctcaggatgggaaaatgggtttgttcagatggatatggtaaatcttacccaattaaggaaggctaattttagagttcttctaatttgcttgtgtcaactcttaacttgtaaaactgctgttaactcggtttaaatttttaaattaatataatagaaagaacactaaaatacttactggtaactgcttagagccatttatctgatcctgtggattacagaatgcattccctcttctgctgtagcttatcattgctttgttttgtagctctgcatattttgcccaccttgtcttccctgtaagtttaagacgtttccaaggaaaagcttcagggctgatagtttcttagcaattcctattcttatgcccttactttaaaatagtccttttattttgtgtattttatttcctaagtttcagatgtaatatctgttgtttcctaacatgtcgattaccagaacgttagaattttacctaatttcttgtggatattgcagaagttctggttaaatcacaacttaaaagtttttaaaagtgctttgagcatatgtatatgtttagtgacaaatcatataaaaccattcacaagttttggttttttttttttcgtttgttttagtgactaattcaggatgaaagtttttttgttcttgtatttaacccttttttataagcagctgaagacaccatatttaacactatatctcagtgatagggaaatagctgcattgatcttacatgagcataatcatccttatacttcatgaggggattattagtacaatccccattttactgtgtttgagttaaaaaccaaacatccctgtaatttaatttgaagattctttaacagattgcagcaaagttcattataaaactgttatggtgtcttcaaagacttgataaaataacactgagagagaattggtccatttgtatgctgtatttctattacttgccaaaaggaatggggttaagattaaacttgtttccattctcttcacatggatatacatccccatgtttaactgacacactgggggctcagttgtgtgctgtaatgtcttattaaagaagatattaaagaaaaaaaaaaaaaaaaaaaaaattgtgggggccgggcccggaaaagtttaaacactcgttgggccgggccaatgtaagaaagggcaaggtgccaagaaaccggccgcagaggggggtccccaaaaaaccgggacgggttgaacccaaggccgggcacggctcaggcggaccccccggcggggggtct

SEQ ID NO: 427687 - DNA, 2532 bp, Homo sapiens
  misc_feature (12)..(12): n is a, c, g, or t
  misc_feature (15)..(15): n is a, c, g, or t
  misc_feature (19)..(19): n is a, c, g, or t
  misc_feature (33)..(33): n is a, c, g, or t
  misc_feature (37)..(38): n is a, c, g, or t
aaagagacaggnagncaangtgtgcaagtgctnaatnnactgatgctgtaggcacacaaatgccagaccctaagaccttcaagcagcactttgagagcaagcatcctaagactccacttcctccagaattagctgatgttcaggcataaggttgtttacaggtgaattcatgacacctttgactcttctactgtctcagaccttaggtaacatacctgcagctgcttttctaacaaactgttgatcagcaaaaataaaggggctacagaaacactcatttttatgctgttccctcttgggcttcatgcaaagacaattctgtgtaaatgtacagttgactctgatttggaaatatgaaaatcagtccatccttgttataaaaaatttttttacaattgtaattatattgatgttcatattgtgtaaaataactcatttaataaaatagtactttgatttacgacatcacaggataaatggttttagaaattctgttctaactttccacattatttgccttataaaaatctaatgaattcatcagctagaattgcaagtgcaattcttatatccctttctctgctcagtggcaggttcctcagttaaactagagcagactgattcattaaaattgtgcatacgattttatgggcagctgatgatctaggtgaaaaatgacttatctgctgccttagtatattgcggttatgtgtcattgtacccctctgatcatttcctgtgtttgagttggaatatttaaaattgcagtatgacctggctctaactgccagtcaggtgtaccctgtagataactgatagcttcctaaaagcggttggattgtcagtgagcccttgtgaaaggttaggttctaatgtatatgccgtaatgaaataatcattaagcctattgtttaatgcaaaatatggaacaaatgtgaactggtaaaggtcgatcttgatactatattctttgaaaattcttgaagttctttaatttgaaattgaaacattaatttttgaggtttttggaagttactatttggccatttttacaaatggattttgcattaacaggaagattggaatgacttgtggctggattaattcccagaaccctctccctcctttcttttctaagtgagttgttgattttaggagtttgctttgtgctgttacctaaaatcagagactggtgtacagtatgacttccatctgaacttgaaaagtattaaaatgggtcaatattcacattcttttagatctcaggatgggaaaatgggtttgttcagatggatatggtaaatcttacccaattaaggaaggctaattttagagttcttctaatttgcttgtgtcaactcttaacttgtaaaactgctgttaactcggtttaaatttttaaattaatataatagaaagaacactaaaatacttactggtaactgcttagagccatttatctgatcctgtggattacagaatgcattccctcttctgctgtagcttatcattgctttgttttgtagctctgcatattttgcccaccttgtcttccctgtaagtttaagacgtttccaaggaaaagcttcagggctgatagtttcttagcaattcctattcttatgcccttactttaaaatagtccttttattttgtgtattttatttcctaagtttcagatgtaatatctgttgtttcctaacatgtcgattaccagaacgttagaattttacctaatttcttgtggatattgcagaagttctggttaaatcacaacttaaaagtttttaaaagtgctttgagcatatgtatatgtttagtgacaaatcatataaaaccattcacaagttttggttttttttttttcgtttgttttagtgactaattcaggatgaaagtttttttgttcttgtatttaacccttttttataagcagctgaagacaccatatttaacactatatctcagtgatagggaaatagctgcattgatcttacatgagcataatcatccttatacttcatgaggggattattagtacaatccccattttactgtgtttgagttaaaaaccaaacatccctgtaatttaatttgaagattctttaacagattgcagcaaagttcattataaaactgttatggtgtcttcaaagacttgataaaataacactgagagagaattggtccatttgtatgctgtatttctattacttgccaaaaggaatggggttaagattaaacttgtttccattctcttcacatggatatacatccccatgtttaactgacacactgggggctcagttgtgtgctgtaatgtcttattaaagaagatattaaagaaaaaaaaaaaaaaaaaaaaaattgtgggggccgggcccggaaaagtttaaacactcgttgggccgggccaatgtaagaaagggcaaggtgccaagaaaccggccgcagaggggggtccccaaaaaaccgggacgggttgaacccaaggccgggcacggctcaggcggaccccccggcggggggtct

SEQ ID NO: 427688 - DNA, 2815 bp, Homo sapiens
gttaaaataaggtcttgggcaaattaaactctgggttttagtttccttatcaggtaaaatgatgctagtaggagctaaagattactttgaaggttctgtgggaattaaggtaacatgcttaatataataagggttcagtaaatgttacctattgtttgctgttaatcagataagcagaatacattctatgtgacctacctttctttataggtgaaatgtgggaacgttaggaatttctttaccacaaagtccctcttcatatgccagtcactaagttgtaggaatttaaaggtgtttttgggataattgtctatactgagaaggttcaggattctaacacaaatgccagaccctaagaccttcaagcagcactttgagagcaagcatcctaagactccacttcctccagaattagctgatgttcaggcataaggttgtttacaggtgaattcatgacacctttgactcttctactgtctcagaccttaggtaacatacctgcagctgcttttctaacaaactgttgatcagcaaaaataaaggggctacagaaacactcatttttatgctgttccctcttgggcttcatgcaaagacaattctgtgtaaatgtacagttgactctgatttggaaatatgaaaatcagtccatccttgttataaaaaatttttttacaattgtaattatattgatgttcatattgtgtaaaataactcatttaataaaatagtactttgatttacgacatcacaggataaatggttttagaaattctgttctaactttccacattatttgccttataaaaatctaatgaattcatcagctagaattgcaagtgcaattcttatatccctttctctgctcagtggcaggttcctcagttaaactagagcagactgattcattaaaattgtgcatacgattttatgggcagctgatgatctaggtgaaaaatgacttatctgctgccttagtatattgcggttatgtgtcattgtacccctctgatcatttcctgtgtttgagttggaatatttaaaattgcagtatgacctggctctaactgccagtcaggtgtaccctgtagataactgatagcttcctaaaagcggttggattgtcagtgagcccttgtgaaaggttaggttctaatgtatatgccgtaatgaaataatcattaagcctattgtttaatgcaaaatatggaacaaatgtgaactggtaaaggtcgatcttgatactatattctttgaaaattcttgaagttctttaatttgaaattgaaacattaatttttgaggtttttggaagttactatttggccatttttacaaatggattttgcattaacaggaagattggaatgacttgtggctggattaattcccagaaccctctccctcctttcttttctaagtgagttgttgattttaggagtttgctttgtgctgttacctaaaatcagagactggtgtacagtatgacttccatctgaacttgaaaagtattaaaatgggtcaatattcacattcttttagatctcaggatgggaaaatgggtttgttcagatggatatggtaaatcttacccaattaaggaaggctaattttagagttcttctaatttgcttgtgtcaactcttaacttgtaaaactgctgttaactcggtttaaatttttaaattaatataatagaaagaacactaaaatacttactggtaactgcttagagccatttatctgatcctgtggattacagaatgcattccctcttctgctgtagcttatcattgctttgttttgtagctctgcatattttgcccaccttgtcttccctgtaagtttaagacgtttccaaggaaaagcttcagggctgatagtttcttagcaattcctattcttatgcccttactttaaaatagtccttttattttgtgtattttatttcctaagtttcagatgtaatatctgttgtttcctaacatgtcgattaccagaacgttagaattttacctaatttcttgtggatattgcagaagttctggttaaatcacaacttaaaagtttttaaaagtgctttgagcatatgtatatgtttagtgacaaatcatataaaaccattcacaagttttggttttttttttttcgtttgttttagtgactaattcaggatgaaagtttttttgttcttgtatttaacccttttttataagcagctgaagacaccatatttaacactatatctcagtgatagggaaatagctgcattgatcttacatgagcataatcatccttatacttcatgaggggattattagtacaatccccattttactgtgtttgagttaaaaaccaaacatccctgtaatttaatttgaagattctttaacagattgcagcaaagttcattataaaactgttatggtgtcttcaaagacttgataaaataacactgagagagaattggtccatttgtatgctgtatttctattacttgccaaaaggaatggggttaagattaaacttgtttccattctcttcacatggatatacatccccatgtttaactgacacactgggggctcagttgtgtgctgtaatgtcttattaaagaagatattaaagaaaaaaaaaaaaaaaaaaaaaattgtgggggccgggcccggaaaagtttaaacactcgttgggccgggccaatgtaagaaagggcaaggtgccaagaaaccggccgcagaggggggtccccaaaaaaccgggacgggttgaacccaaggccgggcacggctcaggcggaccccccggcggggggtct

SEQ ID NO: 427689 - DNA, 2789 bp, Homo sapiens
cagaaaggcacatgggcggggctgcgaggagcaggcggggcgggggcgccgaggagagcggcgcggcgtgcgcgggcacgaggcgtagtggtctcccctaaggctgaggcggcggcgggcgcgcgaggctgttgtgctcccggctctcgtgtttcccctcctgagcgggtggaggaggcccaagcggtgctgggcgcgctcccccttcctttccctccggcgtcctctcccggccctctcgcgctgcactgtctctccgacgcaagactgtcccggcccggatatggctcgtggacagcagaaaattcagtctcagcagaaaaatgccaaaaagcaagctggacaaaagaagaaacaaggacatgaccaaaaggctgctgccaaagctgccttaatatatacctgcactgtctgtagggtgaattcatgacacctttgactcttctactgtctcagaccttaggtaacatacctgcagctgcttttctaacaaactgttgatcagcaaaaataaaggggctacagaaacactcatttttatgctgttccctcttgggcttcatgcaaagacaattctgtgtaaatgtacagttgactctgatttggaaatatgaaaatcagtccatccttgttataaaaaatttttttacaattgtaattatattgatgttcatattgtgtaaaataactcatttaataaaatagtactttgatttacgacatcacaggataaatggttttagaaattctgttctaactttccacattatttgccttataaaaatctaatgaattcatcagctagaattgcaagtgcaattcttatatccctttctctgctcagtggcaggttcctcagttaaactagagcagactgattcattaaaattgtgcatacgattttatgggcagctgatgatctaggtgaaaaatgacttatctgctgccttagtatattgcggttatgtgtcattgtacccctctgatcatttcctgtgtttgagttggaatatttaaaattgcagtatgacctggctctaactgccagtcaggtgtaccctgtagataactgatagcttcctaaaagcggttggattgtcagtgagcccttgtgaaaggttaggttctaatgtatatgccgtaatgaaataatcattaagcctattgtttaatgcaaaatatggaacaaatgtgaactggtaaaggtcgatcttgatactatattctttgaaaattcttgaagttctttaatttgaaattgaaacattaatttttgaggtttttggaagttactatttggccatttttacaaatggattttgcattaacaggaagattggaatgacttgtggctggattaattcccagaaccctctccctcctttcttttctaagtgagttgttgattttaggagtttgctttgtgctgttacctaaaatcagagactggtgtacagtatgacttccatctgaacttgaaaagtattaaaatgggtcaatattcacattcttttagatctcaggatgggaaaatgggtttgttcagatggatatggtaaatcttacccaattaaggaaggctaattttagagttcttctaatttgcttgtgtcaactcttaacttgtaaaactgctgttaactcggtttaaatttttaaattaatataatagaaagaacactaaaatacttactggtaactgcttagagccatttatctgatcctgtggattacagaatgcattccctcttctgctgtagcttatcattgctttgttttgtagctctgcatattttgcccaccttgtcttccctgtaagtttaagacgtttccaaggaaaagcttcagggctgatagtttcttagcaattcctattcttatgcccttactttaaaatagtccttttattttgtgtattttatttcctaagtttcagatgtaatatctgttgtttcctaacatgtcgattaccagaacgttagaattttacctaatttcttgtggatattgcagaagttctggttaaatcacaacttaaaagtttttaaaagtgctttgagcatatgtatatgtttagtgacaaatcatataaaaccattcacaagttttggttttttttttttcgtttgttttagtgactaattcaggatgaaagtttttttgttcttgtatttaacccttttttataagcagctgaagacaccatatttaacactatatctcagtgatagggaaatagctgcattgatcttacatgagcataatcatccttatacttcatgaggggattattagtacaatccccattttactgtgtttgagttaaaaaccaaacatccctgtaatttaatttgaagattctttaacagattgcagcaaagttcattataaaactgttatggtgtcttcaaagacttgataaaataacactgagagagaattggtccatttgtatgctgtatttctattacttgccaaaaggaatggggttaagattaaacttgtttccattctcttcacatggatatacatccccatgtttaactgacacactgggggctcagttgtgtgctgtaatgtcttattaaagaagatattaaagaaaaaaaaaaaaaaaaaaaaaattgtgggggccgggcccggaaaagtttaaacactcgttgggccgggccaatgtaagaaagggcaaggtgccaagaaaccggccgcagaggggggtccccaaaaaaccgggacgggttgaacccaaggccgggcacggctcaggcggaccccccggcggggggtct

SEQ ID NO: 427690 - DNA, 727 bp, Homo sapiens
cagaaaggcacatgggcggggctgcgaggagcaggcggggcgggggcgccgaggagagcggcgcggcgtgcgcgggcacgaggcgtagtggtctcccctaaggctgaggcggcggcgggcgcgcgaggctgttgtgctcccggctctcgtgtttcccctcctgagcgggtggaggaggcccaagcggtgctgggcgcgctcccccttcctttccctccggcgtcctctcccggccctctcgcgctgcactgtctctccgacgcaagactgtcccggcccggatatggctcgtggacagcagaaaattcagtctcagcagaaaaatgccaaaaagcaagctggacaaaagaagaaacaaggacatgaccaaaaggctgctgccaaagctgccttaatatatacctgcactgtctgtaggacacaaatgccagaccctaagaccttcaagcagcactttgagagcaagcatcctaagactccacttcctccagaattagctgatgttcaggcataaggttgtttacaggtaactcacctctttttctattggtttgttaataacagggttgtatacaagaccaaaactgtcttcacttattgtgaaattaatttctgccttctgagattttattgcttcccctttttaagttaatgtgtaactgaaaagtccctttttctcagactatttcctttcaatgcctttgaaacatccaaatttttactactg

SEQ ID NO: 427691 - DNA, 2483 bp, Homo sapiens
tttaaaaaaaatgtgccatttggcttagaattaataattttttttaaagcaaaaatggaagcttagtcttcaaggactgataacagctggtaatatttaccattgtttggtgggaatggggttctcatattaggctagcacgctaaacattttcaattacgaaaatgtattaggctcgtgtgctaccctaatataaaaaccccatatttcctcagttgaaatagtcagctgactatcctgaaaagcattgaccctcttttatattttatctgactttcagttcatttttttaatgctagtgggaacttctccaatcagtgtatttttttagtttccttttttggggaacaggaggagctcagtaatttttatgaaatgctttgacctcatatccattaactaattatggtcctagtcagaagaagctagcacccttccctggtgaagttgatacaaatccattgtatgttcctgtcctgcaatgatttacattcagttacagtactagtcaaaactatatatatatgaattctacttaggatccaattttgatatatttaaaaagcaattgagactcatgatagactttatgagcaggtttaacttgtgtggtcgaataaaagcctttaatttaaatggaaaagtaaaagtaacttttttcagtgacttgattttttttttttgttttaatccatttgggttcacgtcagatcatcggtaacaaaaagtggtatctttcagctttgtaaaagaaccctcttaaccaagttcattccctcaaatgggaactaacgtctagagagcaaagaaacttctggaattagtggcttgctgataatctcattttataatttgttcagcaatccagcaagaccaactttttaaaaaaattaataacagtagttttatgaaaactaagtaagaaaacagtttccacctatttctgaggtctcctttagaaggagtaacagacagcttttatttctcttaaagttataaaaatcacaatcgcaagtcacaatgaatactgggaagggaaattacttttgcagagtgatcaagtaaatgatagcgggggctaaacttttttagtaaacttgtgaagattacatacagtaaagtgcataaatcttgagtgtacaattcaatgaatttttataagtaaacacacttgattcaagaacattttcaggaccccataagtccccttcatgtcctgtcttcccagtcattacccataacccccaaggtgacccctttcactatagattagctttgcctgttttgaactttaaataatgtatattccccacaactggcttctttcctttaacattgagatacaaccaagttgttacttgtaacaattttttgtttgtgtgtttgtttatttatttttgagaccagagtctcactgtcgcccaggctgcagtgcagtggtgccatcacgcgtcactgcaacctctgcctcccggattcaagcaattctccacctcagcctcccaagtagctggaattacagatatggctcgtggacagcagaaaattcagtctcagcagaaaaatgccaaaaagcaagctggacaaaagaagaaacaaggacatgaccaaaaggctgctgccaaagctgccttaatatatacctgcactgtctgtagggtaaggggaattgaattgaaagatacagctctcccgtgggcagttttggcttgaatagattaaaattttgaaaccatggcaaaatagatgctttacatgaaatagtaggtttgagagctgattattttaggtatctattttcattcaccctttaaacaaatattttttgaatggctcctgtggccaggcaaaaatctctaggtgctgggaaaacagagtgaacaaaacaaaattgctttcctcatataaaataaagatgtcttcataagggcatataatacacttcactagcacatcatataactctacactcttagagctatataatatgctagtaagtatacctctagttatataattggttttttcttcactaaatttataattaggatgtctgtaaaaccatatagagtataatcacgttgagagcttttcctagaattaatgtgttgtattagatttgaagaactgtaataataacagctacttttgagtgcttaccatatgccacacatagagccaggtgttttacatgtattcacctatttaatccacataacaaccctataagataaagtacttttattgttctcattttacagaagagtaaactgactaatggaaattaaacaatttgtgtggggtctcccagctggttagtagaagagctggaatctgaactcaggcagttcagctccagagtccaccctctggaccactactgtactgcctctcaaagaagtacttctgaaattccaaatcagagcctcttgcctgtttgtttaagctcattacccttgaagttagtgagtggcagtaccaaa

SEQ ID NO: 427692 - DNA, 1322 bp, Homo sapiens
cccggggcgggccgcgggaaggggatgagttcgggcgcctgccaggccctgcaggtggccgggtcgcaggccagccgcggaagcggagcggtaaccttacccccggcgacagccgccggtcagctgccagagtgtggcgctcccggtggacgcaggggccgggtttcgggcagtctcggcctccaggaggcgcgtcttggtccagggtccgtgaggactggctagatgggggctgcgtggcctttggtggcagggaggaggagggggtctccgaggcgggagaggcgggtttgggaaggaaggtgcgccaggctgaagctggggtcggagaagtgttgggtggagacctcactgtgggtgcgttcctcctctcctctccccaaaacgatggtgttaaaagctagggtcaggatgtggagcgctgcctgggcctcttcctttccgatggttatggagaatgagcctacttcctggacccaaaatccttttcttctgttactcatttatgttggttttaaaaggagctttggggcagagcttacttgttgcctcctacgagagcgcctcattttagaactcgtttcttccactacttccctctttgcagccccctcggaaaaccacactgagagttgcattaaaaaccagcatagtctcactgtcgcccaggctgcagtgcagtggtgccatcacgcgtcactgcaacctctgcctcccggattcaagcaattctccacctcagcctcccaagtagctggaattacagatatggctcgtggacagcagaaaattcagtctcagcagaaaaatgccaaaaagcaagctggacaaaagaagaaacaaggacatgaccaaaaggctgctgccaaagctgccttaatatatacctgcactgtctgtaggacacaaatgccagaccctaagaccttcaagcagcactttgagagcaagcatcctaagactccacttcctccagaattagctgatgttcaggcataaggttgtttacaggtgaattcatgacacctttgactcttctactgtctcagaccttaggtaacatacctgcagctgcttttctaacaaactgttgatcagcaaaaataaaggggctacagaaacactcatttttatgctgttccctcttgggcttcatgcaaagacaattctgtgtaaatgtacagttgactctgatttggaaatatgaaaatcagtccatccttgttataaaaaatttttttacaattgtaattatattgatgttcatattgtgtaaaataactcatttaataaaatagtactttgatttacgacatcacagg

SEQ ID NO: 427693 - DNA, 769 bp, Homo sapiens
cagaaaggcacatgggcggggctgcgaggagcaggcggggcgggggcgccgaggagagcggcgcggcgtgcgcgggcacgaggcgtagtggtctcccctaaggctgaggcggcggcgggcgcgcgaggctgttgtgctcccggctctcgtgtttcccctcctgagcgggtggaggaggcccaagcggtgctgggcgcgctcccccttcctttccctccggcgtcctctcccggccctctcgcgctgcactgtctctccgacgcaagactgtcccggcccggatatggctcgtggacagcagaaaattcagtctcagcagaaaaatgccaaaaagcaagctggacaaaagaagaaacaaggacatgaccaaaaggctgctgccaaagctgccttaatatatacctgcactgtctgtaggacacaaatgccagaccctaagaccttcaagcagcactttgagagcaagcatcctaagactccacttcctccagaattagctgatgttcaggcataaggttgtttacagctaacaaactgttgatcagcaaaaataaaggggctacagaaacactcatttttatgctgttccctcttgggcttcatgcaaagacaattctgtgtaaatgtacagttgactctgatttggaaatatgaaaatcagtccatccttgttataaaaaatttttttacaattgtaattatattgatgttcatattgtgtaaaataactcatttaataaaatagtactttgatttacgacatcacagg

SEQ ID NO: 427694 - DNA, 547 bp, Homo sapiens
  misc_feature (19)..(19): n is a, c, g, or t
acccgtgatgttatccccnacacttctccgaccccagcttcagcctggcgcaccttccttcccaaaacgatggtgttaaaagctagggtcaggatgtggagcgctgcctgggcctcttcctttccgatggttatggagaatgagcctacttcctggacccaaaatccttttcttctgttactcatttatgttggttttaaaaggagctttggggcagagcttacttgttgcctcctacgagagcgcctcattttagaactcgtttcttccactacttccctctttgcagccccctcggaaaaccacactgagagttgcattaaaaaccagcatgtaggtatttgtaagtgactttttccctccagtttgtcgcatttaatcaaggagcggttgtagctgcctacgattttgtagaaaattgtgttggcttgagagcaagatcctatagttgagctgtccggcgtgttgtcagaagttaggggcctacctcatgcatttagcttattttattccatttcctttacctggtgttaagttttctgtcttc

SEQ ID NO: 427695 - DNA, 885 bp, Homo sapiens
ccaggttctcagtgaggttcaaggagaacagtgtggctgtcaaggtcgtccagggccctgcaggtggtgacaacagcaagctacgctacaaaaaaaaggggagtcattgcttgcaggagcaccggcagcaccagtgtgtgaggggagcaggcagcggtcctagccagttccttgatcctgccagaccacccagcccccggcacagagctgctccacaggcaccatgaggatcatgctgctattcacagccatcctggccttcagcctagctcagagctttggggctgtctgtaaggagccacaggaggaggtggttcctggcgggggccgcagcaagagggatccagatctctaccagctgctccagagactcttcaaaagccactcatctctggagggattgctcaaagccctgagccaggctagcacagatcctaaggaatcaacatctcccgagaaacgtgacatgcatgacttctttgtgggacttatgggcaagaggagcgtccagccagactctcctacggatgtgaatcaagagaacgtccccagctttggcatcctcaagtatcccccgagagcagaataggtactccacttccggactcctggactgcattaggaagacctctttccctgtcccaatccccaggtgcgcacgctcctgttaccctttctcttccctgttcttgtaacattcttgtgctttgactccttctccatcttttctacctgaccctggtgtggaaactgcatagtgaatatccccaaccccaatgggcattgactgtagaataccctagagttcctgtagtgtcctacattaaaaatataatgtctctctctattcctcaacaataaaggatttttgcatatgaatgatgt

SEQ ID NO: 427696 - DNA, 824 bp, Homo sapiens
gactgagtgactgcagccttcctagatcccctccactcggtttctctctttgcaggagcaccggcagcaccagtgtgtgaggggagcaggcagcggtcctagccagttccttgatcctgccagaccacccagcccccggcacagagctgctccacaggcaccatgaggatcatgctgctattcacagccatcctggccttcagcctagctcagagctttggggctgtctgtaaggagccacaggaggaggtggttcctggcgggggccgcagcaagagggatccagatctctaccagctgctccagagactcttcaaaagccactcatctctggagggattgctcaaagccctgagccaggctagcacagatcctaaggaatcaacatctcccgagaaacgtgacatgcatgacttctttgtgggacttatgggcaagaggagcgtccagccagactctcctacggatgtgaatcaagagaacgtccccagctttggcatcctcaagtatcccccgagagcagaataggtactccacttccggactcctggactgcattaggaagacctctttccctgtcccaatccccaggtgcgcacgctcctgttaccctttctcttccctgttcttgtaacattcttgtgctttgactccttctccatcttttctacctgaccctggtgtggaaactgcatagtgaatatccccaaccccaatgggcattgactgtagaataccctagagttcctgtagtgtcctacattaaaaatataatgtctctctctattcctcaacaataaaggatttttgcatatgaatgatgt

SEQ ID NO: 427697 - DNA, 195 bp, Homo sapiens
aattgtgtatttatagggataccttcctcttctcacatattaattgtatgtcattaaaatcagttggctatgtcagtgtatattattctatttacttgctcattttcatgatttaaatgttaatatagcatctcaaaccttgctagcaaaagaggtgaataatacgtcgacgcggacgggaatttagtagtagta

SEQ ID NO: 427698 - DNA, 459 bp, Homo sapiens
aattgtgtatttatagggataccttcctcttctcacatattaattgtatgtcattaaaatcagttggctatgtcagtgtatattattcacctcttttgctagcaaggtttgagatgctatattaacatttaaatcatgaaaatgagcaagtaaatagaataatattttattaatgtatgatatgtaatacttattgtctaaatcaagtttcctatttttggtttatttattttagaagaaaaataaaattatttgggcatttttgtttatagctcattacaaactagagtgatgaatatatatatttactaaagctaattgaaagagtcatgcaactcagttgggaattaaccactcaattcaatagtaaaagccatgcttggatgtttcttttgcatgttgcctagcattttatagatatttattatttaaaaaaataaagatatgtttttaatgaag

SEQ ID NO: 427699 - DNA, 3393 bp, Homo sapiens
tgggatatgggatattgtaatgggagagcaggaaatttaaggtcggaggtatttgtttaggatacctcagtattctagagctatgggatttattttgctttgaagtccagaggtatttagctttattctaaaagcgatgaagttcctcttaattaaagacgctcctggaaaaaaaaaaaggaaaaatttaatgctgtcttttaaaaggaaacatgccaaaggccaggatttgtttgatcagattgtgtaccacttggaccttgtggaaacagattactttggcctccagttcctcgactctgcccaggttgcgcactggctggatcatgccaaacccataaaaaagcagatgaaaattggacctgcttatgctttacactttcgagttaaatactattcttcagaaccaaacaaccttcgtgaggagtttacaaggtacctgtttgttttacaactcaggcatgacattctttctggaaaattgaaatgcccttatgaaacagctgtggaattagctgctctctgtctacaagcggagcttggggagtgcgagcttccagaacacacaccagagcttgtgtctgagtttcggttcattccaaatcagacagaagcaatggaatttgatatcttccagagatggaaagagtgcaggggaaagagccctgcccaggcggaactctcctatctgaataaagcgaagtggctggaaatgtatggggtagacatgcacgttgtcaggggaagagatggctgtgaatattctcttggactgaccccgacaggcatattaatctttgaaggagctaacaaaataggcttattcttttggcctaaaattaccaaaatggattttaaaaagagcaaattgacactcgtggtggtcgaggatgatgatcagggacgtgagcaagagcacacgtttgtgttccggttagacagtgccaggacctgcaaacacctttggaagtgtgcagttgagcaccacgcattcttccgactgcggacgccaggaaacagcaaatccaatagatccgactttatcaggctgggctctcgcttcagattcagtgggcggacagaatatcaagctacacatggctccaggttacgaagaaccagcacctttgagaggaagcctagtaaacgttatccatcccggagacattcaacgttcaaagcaagcaacccagtgatagcagcccagctctgctctaaaacaaatccagaagtccataattaccagcctcaatatcatcctaatatccatcccagccagccccggtggcatcctcactctccaaatgtcaggccatcctttcaggatgacaggtcgcattggaaagcatcggccagtggagatgacagccattttgattatgtccacgaccagaaccagaagaacttaggagggatgcaaagtatgatgtatcgagataaactcatgactgcactttgagagactgaagcatctctcttccattcaccttcatagtttcattgcattccatgaaaagtgtcttggcctcagatggatggatgtgtttggacgagtgtctttaaggagtagtcctgaaaggtgtttttggtgtccatgtaaatatttgaagataaaaccactatagcttgtcataatttactgttgactgcattctcattaaaatgaaggtaaaggctcaggaatcatattgatgttctgattttaaaattggagtcaaagtctatgtttatcattttactatgttcctgatgttctttgttatttaattaatgggagcaaataaaaccagaagagcttgggaagattgctcagcatatattcctgtcgtagaagttgagattgctagggtccagtttccctagtgtggcctggacgagtcatttccccttcattgacctcattttccccatctgaaaagagagggttggactaagtgatctccaaggtcctttccaactctaaaattctgcaatttgttaacatttcattttgtttaggttgaggacatacattcaaactaattttatcacaaggaaaactgcaatacccacttccttgacagagttactcctttcagaagctaaataaagtatataacttattagatgttatatagatacagggggactttgaatttcacatcttaaagcagttgagctactttgaatttaagcagtcgtactaatcttaaattgcatagcatttgttttgatcgaatttgctgctcaagtatgggaataatttttaatgtcttaatgattggtgctgctaacttgcgtgatttcagaagacataattgtgaatacacactgtcagaattgggggattggtttttaccctagacttcactcttaaaaagcaacgtgcaatcaagatcatttatggctcaaatgaaagcatataaggttttcttgaagttgtgccaaagcattctgtagagtaggatgagatggttgttgccctagtctgttggtagaaccagaaatcaatatgttgtcttttaggttaaagcttgtaccaaaatatttatttcccccatttcaagccctgagtcaaacatttttttctcttaataatagacctgaaatgttttattagtatttctgtgaaatcagttgattcttgtgccatttttgtatatgtaattgtaattttgcccatgttaggccctctaaaaaatgtttgacatcctttgagatattttattactaaaatctgatcttttttggctactgcaaaaatctattcagcaagaaggtatcagctgcataccttgcacagtggagctgactacctataaactctccctaaggcatttgtttacaggtgtattccattttagcagacgttctgatgctcagtgtatgtgctgcatacaaataaatgtgttctgaatcttttcatcttattgatagcatttttacaaatgtgtttccaaggaataaagattattcttgctttttttttgactccatcttcattttttttaaattgattcttgttgctatgcagaagtctcatttgtgaatgaccttggtaacagaacagttggcttttggaagtctgaaggtgagcattcagttaggtgggtggagcaagatcatcctagaatgaggctgctcttggcaagagtggatcttataggcacagcagctgatgcctttcttcatctggggcaactctggtgaaggttgtcctgcctgtcacaggtgctgagtagagagaagtggtggcagtgggatttcctcagtaatagtcctgtaaaggtacgtgtttgtcctggctacttgtgctcttcctggcaggaaggcatccaaacccttatctgtgggctcctggaaattgtgtatgccatataataccctctaataaatacctctctgcttaaagta

SEQ ID NO: 427700 - DNA, 3272 bp, Homo sapiens
cacatctccgccgccggcgccgccaaggccaccctctactgccgcgtcttcctgctcgacgggaccgaagtgagcgtggacctgccgaaacatgccaaaggccaggatttgtttgatcagattgtgtaccacttggaccttgtggaaacagattactttggcctccagttcctcgactctgcccaggttgcgcactggctggatcatgccaaacccataaaaaagcagatgaaaattggacctgcttatgctttacactttcgagttaaatactattcttcagaaccaaacaaccttcgtgaggagtttacaaggtacctgtttgttttacaactcaggcatgacattctttctggaaaattgaaatgcccttatgaaacagctgtggaattagctgctctctgtctacaagcggagcttggggagtgcgagcttccagaacacacaccagagcttgtgtctgagtttcggttcattccaaatcagacagaagcaatggaatttgatatcttccagagatggaaagagtgcaggggaaagagccctgcccaggcggaactctcctatctgaataaagcgaagtggctggaaatgtatggggtagacatgcacgttgtcaggggaagagatggctgtgaatattctcttggactgaccccgacaggcatattaatctttgaaggagctaacaaaataggcttattcttttggcctaaaattaccaaaatggattttaaaaagagcaaattgacactcgtggtggtcgaggatgatgatcagggacgtgagcaagagcacacgtttgtgttccggttagacagtgccaggacctgcaaacacctttggaagtgtgcagttgagcaccacgcattcttccgactgcggacgccaggaaacagcaaatccaatagatccgactttatcaggctgggctctcgcttcagattcagtgggcggacagaatatcaagctacacatggctccaggttacgaagaaccagcacctttgagaggaagcctagtaaacgttatccatcccggagacattcaacgttcaaagcaagcaacccagtgatagcagcccagctctgctctaaaacaaatccagaagtccataattaccagcctcaatatcatcctaatatccatcccagccagccccggtggcatcctcactctccaaatgtcaggccatcctttcaggatgacaggtcgcattggaaagcatcggccagtggagatgacagccattttgattatgtccacgaccagaaccagaagaacttaggagggatgcaaagtatgatgtatcgagataaactcatgactgcactttgagagactgaagcatctctcttccattcaccttcatagtttcattgcattccatgaaaagtgtcttggcctcagatggatggatgtgtttggacgagtgtctttaaggagtagtcctgaaaggtgtttttggtgtccatgtaaatatttgaagataaaaccactatagcttgtcataatttactgttgactgcattctcattaaaatgaaggtaaaggctcaggaatcatattgatgttctgattttaaaattggagtcaaagtctatgtttatcattttactatgttcctgatgttctttgttatttaattaatgggagcaaataaaaccagaagagcttgggaagattgctcagcatatattcctgtcgtagaagttgagattgctagggtccagtttccctagtgtggcctggacgagtcatttccccttcattgacctcattttccccatctgaaaagagagggttggactaagtgatctccaaggtcctttccaactctaaaattctgcaatttgttaacatttcattttgtttaggttgaggacatacattcaaactaattttatcacaaggaaaactgcaatacccacttccttgacagagttactcctttcagaagctaaataaagtatataacttattagatgttatatagatacagggggactttgaatttcacatcttaaagcagttgagctactttgaatttaagcagtcgtactaatcttaaattgcatagcatttgttttgatcgaatttgctgctcaagtatgggaataatttttaatgtcttaatgattggtgctgctaacttgcgtgatttcagaagacataattgtgaatacacactgtcagaattgggggattggtttttaccctagacttcactcttaaaaagcaacgtgcaatcaagatcatttatggctcaaatgaaagcatataaggttttcttgaagttgtgccaaagcattctgtagagtaggatgagatggttgttgccctagtctgttggtagaaccagaaatcaatatgttgtcttttaggttaaagcttgtaccaaaatatttatttcccccatttcaagccctgagtcaaacatttttttctcttaataatagacctgaaatgttttattagtatttctgtgaaatcagttgattcttgtgccatttttgtatatgtaattgtaattttgcccatgttaggccctctaaaaaatgtttgacatcctttgagatattttattactaaaatctgatcttttttggctactgcaaaaatctattcagcaagaaggtatcagctgcataccttgcacagtggagctgactacctataaactctccctaaggcatttgtttacaggtgtattccattttagcagacgttctgatgctcagtgtatgtgctgcatacaaataaatgtgttctgaatcttttcatcttattgatagcatttttacaaatgtgtttccaaggaataaagattattcttgctttttttttgactccatcttcattttttttaaattgattcttgttgctatgcagaagtctcatttgtgaatgaccttggtaacagaacagttggcttttggaagtctgaaggtgagcattcagttaggtgggtggagcaagatcatcctagaatgaggctgctcttggcaagagtggatcttataggcacagcagctgatgcctttcttcatctggggcaactctggtgaaggttgtcctgcctgtcacaggtgctgagtagagagaagtggtggcagtgggatttcctcagtaatagtcctgtaaaggtacgtgtttgtcctggctacttgtgctcttcctggcaggaaggcatccaaacccttatctgtgggctcctggaaattgtgtatgccatataataccctctaataaatacctctctgcttaaagta

SEQ ID NO: 427701 - DNA, 3069 bp, Homo sapiens
gacgaagcaaaataacgcttcgtggacggagttgtaccagatggtgatcctgttgatagtttggacaatcagtcatggtcgatcatcaacttacgtttcctggtatacagatagataagtgcccttgtaatgacatacaggctgtaggaaatatcacgctgcgtctctagtctacacaggtcggaggcattgggtgcggtgctgagcgttccaggaaagtactcaccaggagtcttgttcgtctgagaggtttcagagttcgattccagaatttacagacatgaacgcaaccggaactgtgagtatcttccagagatggaaagagtgcaggggaaagagccctgcccaggcggaactctcctatctgaataaagcgaagtggctggaaatgtatggggtagacatgcacgttgtcaggggaagagatggctgtgaatattctcttggactgaccccgacaggcatattaatctttgaaggagctaacaaaataggcttattcttttggcctaaaattaccaaaatggattttaaaaagagcaaattgacactcgtggtggtcgaggatgatgatcagggacgtgagcaagagcacacgtttgtgttccggttagacagtgccaggacctgcaaacacctttggaagtgtgcagttgagcaccacgcattcttccgactgcggacgccaggaaacagcaaatccaatagatccgactttatcaggctgggctctcgcttcagattcagtgggcggacagaatatcaagctacacatggctccaggttacgaagaaccagcacctttgagaggaagcctagtaaacgttatccatcccggagacattcaacgttcaaagcaagcaacccagtgatagcagcccagctctgctctaaaacaaatccagaagtccataattaccagcctcaatatcatcctaatatccatcccagccagccccggtggcatcctcactctccaaatgtcaggccatcctttcaggatgacaggtcgcattggaaagcatcggccagtggagatgacagccattttgattatgtccacgaccagaaccagaagaacttaggagggatgcaaagtatgatgtatcgagataaactcatgactgcactttgagagactgaagcatctctcttccattcaccttcatagtttcattgcattccatgaaaagtgtcttggcctcagatggatggatgtgtttggacgagtgtctttaaggagtagtcctgaaaggtgtttttggtgtccatgtaaatatttgaagataaaaccactatagcttgtcataatttactgttgactgcattctcattaaaatgaaggtaaaggctcaggaatcatattgatgttctgattttaaaattggagtcaaagtctatgtttatcattttactatgttcctgatgttctttgttatttaattaatgggagcaaataaaaccagaagagcttgggaagattgctcagcatatattcctgtcgtagaagttgagattgctagggtccagtttccctagtgtggcctggacgagtcatttccccttcattgacctcattttccccatctgaaaagagagggttggactaagtgatctccaaggtcctttccaactctaaaattctgcaatttgttaacatttcattttgtttaggttgaggacatacattcaaactaattttatcacaaggaaaactgcaatacccacttccttgacagagttactcctttcagaagctaaataaagtatataacttattagatgttatatagatacagggggactttgaatttcacatcttaaagcagttgagctactttgaatttaagcagtcgtactaatcttaaattgcatagcatttgttttgatcgaatttgctgctcaagtatgggaataatttttaatgtcttaatgattggtgctgctaacttgcgtgatttcagaagacataattgtgaatacacactgtcagaattgggggattggtttttaccctagacttcactcttaaaaagcaacgtgcaatcaagatcatttatggctcaaatgaaagcatataaggttttcttgaagttgtgccaaagcattctgtagagtaggatgagatggttgttgccctagtctgttggtagaaccagaaatcaatatgttgtcttttaggttaaagcttgtaccaaaatatttatttcccccatttcaagccctgagtcaaacatttttttctcttaataatagacctgaaatgttttattagtatttctgtgaaatcagttgattcttgtgccatttttgtatatgtaattgtaattttgcccatgttaggccctctaaaaaatgtttgacatcctttgagatattttattactaaaatctgatcttttttggctactgcaaaaatctattcagcaagaaggtatcagctgcataccttgcacagtggagctgactacctataaactctccctaaggcatttgtttacaggtgtattccattttagcagacgttctgatgctcagtgtatgtgctgcatacaaataaatgtgttctgaatcttttcatcttattgatagcatttttacaaatgtgtttccaaggaataaagattattcttgctttttttttgactccatcttcattttttttaaattgattcttgttgctatgcagaagtctcatttgtgaatgaccttggtaacagaacagttggcttttggaagtctgaaggtgagcattcagttaggtgggtggagcaagatcatcctagaatgaggctgctcttggcaagagtggatcttataggcacagcagctgatgcctttcttcatctggggcaactctggtgaaggttgtcctgcctgtcacaggtgctgagtagagagaagtggtggcagtgggatttcctcagtaatagtcctgtaaaggtacgtgtttgtcctggctacttgtgctcttcctggcaggaaggcatccaaacccttatctgtgggctcctggaaattgtgtatgccatataataccctctaataaatacctctctgcttaaagta

SEQ ID NO: 427702 - DNA, 2841 bp, Homo sapiens
cacatctccgccgccggcgccgccaaggccaccctctactgccgcgtcttcctgctcgacgggaccgaagtgagcgtggacctgccgaaacatgccaaaggccaggatttgtttgatcagattgtgtaccacttggaccttgtggaaacagattactttggcctccagttcctcgactctgcccaggttgcgcactggctggatcatgccaaacccataaaaaagcagatgaaaattggacctgcttatgctttacactttcgagttaaatactattcttcagaaccaaacaaccttcgtgaggagtttacaaggtacctgtttgttttacaactcaggcatgacattctttctggaaaattgaaatgcccttatgaaacagctgtggaattagctgctctctgtctacaagcggagcttggggagtgcgagcttccagaacacacaccagagcttgtgtctgagtttcggttcattccaaatcagacagaagcaatggaatttgatatcttccagagatggaaagagtgcaggggaaagagccctgcccaggcggaactctcctatctgaataaagcgaagtggctggaaatgtatggggtagacatgcacgttgtcaggggaagagatggctgtgaatattctcttggactgaccccgacaggcatattaatctttgaaggagctaacaaaataggcttattcttttggcctaaaattaccaaaatggattttaaaaagagcaaattgacactcgtggtggtcgaggatgatgatcagggacgtgagcaagagcacacgtttgtgttccggttagacagtgccaggacctgcaaacacctttggaagtgtgcagttgagcaccacgcattcttccgactgcggacgccaggaaacagcaaatccaatagatccgactttatcaggctgggctctcgcttcagattcagtgggcggacagaatatcaagctacacatggctccaggttacgaagaaccagcacctttgagaggaagcctagtaaacgttatccatcccggagacattcaacgttcaaagcaagcaacccagtgatagcagcccagctctgctctaaaacaaatccagaagtccataattaccagcctcaatatcatcctaatatccatcccagccagccccggtggcatcctcactctccaaatgtcaggccatcctttcaggatgacaggtcgcattggaaagcatcggccagtggagatgacagccattttgattatgtccacgaccagaaccagaagaacttaggagggatgcaaagtatgatgtatcgagataaactcatgactgcactttgagagactgaagcatctctcttccattcaccttcatagtttcattgcattccatgaaaagtgtcttggcctcagatggatggatgtgtttggacgagtgtctttaaggagtagtcctgaaaggtgtttttggtgtccatgtaaatatttgaagataaaaccactatagcttgtcataatttactgttgactgcattctcattaaaatgaaggtaaaggctcaggaatcatattgatgttctgattttaaaattggagtcaaagtctatgtttatcattttactatgttcctgatgttctttgttatttaattaatgggagcaaataaaaccagaagagcttgggaagattgctcagcatatattcctgtcgtagaagttgagattgctagggtccagtttccctagtgtggcctggacgagtcatttccccttcattgacctcattttccccatctgaaaagagagggttggactaagtgatctccaaggtcctttccaactctaaaattctgcaatttgttaacatttcattttgtttaggttgaggacatacattcaaactaattttatcacaaggaaaactgcaatacccacttccttgacagagttactcctttcagaagctaaataaagtatataacttattagatgttatatagatacagggggactttgaatttcacatcttaaagcagttgagctactttgaatttaagcagtcgtactaatcttaaattgcatagcatttgttttgatcgaatttgctgctcaagtatgggaataatttttaatgtcttaatgattggtgctgctaacttgcgtgatttcagaagacataattgtgaatacacactgtcagaattgggggattggtttttaccctagacttcactcttaaaaagcaacgtgcaatcaagatcatttatggctcaaatgaaagcatataaggttttcttgaagttgtgccaaagcattctgtagagtaggatgagatggttgttgccctagtctgttggtagaaccagaaatcaatatgttgtcttttaggttaaagcttgtaccaaaatatttatttcccccatttcaagccctgagtcaaacatttttttctcttaataatagacctgaaatgttttattagtatttctgtgaaatcagttgattcttgtgccatttttgtatatgtaattgtaattttgcccatgttaggccctctaaaaaatgtttgacatcctttgagatattttattactaaaatctgatcttttttggctactgcaaaaatctattcagcaagaaggtatcagctgcataccttgcacagtggagctgactacctataaactctccctaaggcatttgtttacaggtgtattccattttagcagacgttctgatgctcagtgtatgtgctgcatacaaataaatgtgttctgaatcttttcatcttattgatagcatttttacaaatgtgtttccaaggaataaagattattcttgcttt

SEQ ID NO: 427703 - DNA, 3352 bp, Homo sapiens
cacatctccgccgccggcgccgccaaggccaccctctactgccgcgtcttcctgctcgacgggaccgaagtgagcgtggacctgccgaaacatgccaaaggccaggatttgtttgatcagattgtgtaccacttggaccttgtggaaacagattactttggcctccagttcctcgactctgcccaggttgcgcactggctggatcatgccaaacccataaaaaagcagatgaaaattggacctgcttatgctttacactttcgagttaaatactattcttcagaaccaaacaaccttcgtgaggagtttacaaggtacctgtttgttttacaactcaggcatgacattctttctggaaaattgaaatgcccttatgaaacagctgtggaattagctgctctctgtctacaagcggagcttggggagtgcgagcttccagaacacacaccagagcttgtgtctgagtttcggttcattccaaatcagacagaagcaatggaatttgatatcttccagagatggaaagagtgcaggggaaagagccctgcccaggcggaactctcctatctgaataaagcgaagtggctggaaatgtatggggtagacatgcacgttgtcaggggaagagatggctgtgaatattctcttggactgaccccgacaggcatattaatctttgaaggagctaacaaaataggcttattcttttggcctaaaattaccaaaatggattttaaaaagagcaaattgacactcgtggtggtcgaggatgatgatcagggacgtgagcaagagcacacgtttgtgttccggttagacagtgccaggacctgcaaacacctttggaagtgtgcagttgagcaccacgcattcttccgactgcggacgccaggaaacagcaaatccaatagatccgactttatcaggctgggctctcgcttcagattcaggtagggagccatttctgcaacacggatcacgtcttctgaaggagggcaactgtgatttctttcttgtatgcgaatagagtagtggatttgagtccagaaacttaggttgtgtgtcccatccccacgtttcttaagtgggcggacagaatatcaagctacacatggctccaggttacgaagaaccagcacctttgagaggaagcctagtaaacgttatccatcccggagacattcaacgttcaaagcaagcaacccagtgatatgcagcccagctctggtcttccagacaggcccggtggcatactcactcttcaaatgtcgccatcctttcaggatgacaggtcgcattggaaagcatcggccagtggagatgacagccattttgattatgtccacgaccagaaccagaagaacttaggagggatgcaaagtatgatgtatcgagataaactcatgactgcactttgagagactgaagcatctctcttccattcaccttcatagtttcattgcattccatgaaaagtgtcttggcctcagatggatggatgtgtttggacgagtgtctttaaggagtagtcctgaaaggtgtttttggtgtccatgtaaatatttgaagataaaaccactatagcttgtcataatttactgttgactgcattctcattaaaatgaaggtaaaggctcaggaatcatattgatgttctgattttaaaattggagtcaaagtctatgtttatcattttactatgttcctgatgttctttgttatttaattaatgggagcaaataaaaccagaagagcttgggaagattgctcagcatatattcctgtcgtagaagttgagattgctagggtccagtttccctagtgtggcctggacgagtcatttccccttcattgacctcattttccccatctgaaaagagagggttggactaagtgatctccaaggtcctttccaactctaaaattctgcaatttgttaacatttcattttgtttaggttgaggacatacattcaaactaattttatcacaaggaaaactgcaatacccacttccttgacagagttactcctttcagaagctaaataaagtatataacttattagatgttatatagatacagggggactttgaatttcacatcttaaagcagttgagctactttgaatttaagcagtcgtactaatcttaaattgcatagcatttgttttgatcgaatttgctgctcaagtatgggaataatttttaatgtcttaatgattggtgctgctaacttgcgtgatttcagaagacataattgtgaatacacactgtcagaattgggggattggtttttaccctagacttcactcttaaaaagcaacgtgcaatcaagatcatttatggctcaaatgaaagcatataaggttttcttgaagttgtgccaaagcattctgtagagtaggatgagatggttgttgccctagtctgttggtagaaccagaaatcaatatgttgtcttttaggttaaagcttgtaccaaaatatttatttcccccatttcaagccctgagtcaaacatttttttctcttaataatagacctgaaatgttttattagtatttctgtgaaatcagttgattcttgtgccatttttgtatatgtaattgtaattttgcccatgttaggccctctaaaaaatgtttgacatcctttgagatattttattactaaaatctgatcttttttggctactgcaaaaatctattcagcaagaaggtatcagctgcataccttgcacagtggagctgactacctataaactctccctaaggcatttgtttacaggtgtattccattttagcagacgttctgatgctcagtgtatgtgctgcatacaaataaatgtgttctgaatcttttcatcttattgatagcatttttacaaatgtgtttccaaggaataaagattattcttgctttttttttgactccatcttcattttttttaaattgattcttgttgctatgcagaagtctcatttgtgaatgaccttggtaacagaacagttggcttttggaagtctgaaggtgagcattcagttaggtgggtggagcaagatcatcctagaatgaggctgctcttggcaagagtggatcttataggcacagcagctgatgcctttcttcatctggggcaactctggtgaaggttgtcctgcctgtcacaggtgctgagtagagagaagtggtggcagtgggatttcctcagtaatagtcctgtaaaggtacgtgtttgtcctggctacttgtgctcttcctggcaggaaggcatccaaacccttatctgtgggctcctggaaattgtgtatgccatataataccctctaataaatacctctctgcttaaagta

SEQ ID NO: 427704 - DNA, 1810 bp, Homo sapiens
cacatctccgccgccggcgccgccaaggccaccctctactgccgcgtcttcctgctcgacgggaccgaagtgagcgtggacctgccgaaacatgccaaaggccaggatttgtttgatcagattgtgtaccacttggaccttgtggaaacagattactttggcctccagttcctcgactctgcccaggttgcgcactggctggatcatgccaaacccataaaaaagcagatgaaaattggacctgcttatgctttacactttcgagttaaatactattcttcagaaccaaacaaccttcgtgaggagtttacaaggtacctgtttgttttacaactcaggcatgacattctttctggaaaattgaaatgcccttatgaaacagctgtggaattagctgctctctgtctacaagcggagcttggggagtgcgagcttccagaacacacaccagagcttgtgtctgagtttcggttcattccaaatcagacagaagcaatggaatttgatatcttccagagatggaaagagtgcaggggaaagagccctgcccaggcggaactctcctatctgaataaagcgaagtggctggaaatgtatggggtagacatgcacgttgtcaggggaagagatggctgtgaatattctcttggactgaccccgacaggcatattaatctttgaaggagctaacaaaataggcttattcttttggcctaaaattaccaaaatggattttaaaaagagcaaattgacactcgtggtggtcgaggatgatgatcagggacgtgagcaagagcacacgtttgtgttccggttagacagtgccaggacctgcaaacacctttggaagtgtgcagttgagcaccacgcattcttccgactgcggacgccaggaaacagcaaatccaatagatccgactttatcaggctgggctctcgcttcagattcagtgggcggacagaatatcaagctacacatggctccaggttacgaagaaccagcacctttgagaggaagcctagtaaacgttatccatcccggagacattcaacgttcaaagcaagcaacccagtgatagcagcccagctctgctctaaaacaaatccagaagtccataattaccagcctcaatatcatcctaatatccatcccagccagccccggtggcatcctcactctccaaatgtcaggccatcctttcaggatgacaggtcgcattggaaagcatcggccagtggagatgacagccattttgattatgtccacgaccagaaccagaagaacttaggagggatgcaaagtatgatgtatcgagataaactcatgactgcactttgagagactgaagcatctctcttccattcaccttcatagtttcattgcattccatgaaaagtgtcttggcctcagatggatggatgtgtttggacgagtgtctttaaggagtagtcctgaaaggtgtttttggtgtccatgtaaatatttgaagataaaaccactatagcttgtcataatttactgttgactgcattctcattaaaatgaaggtaaaggctcaggaatcatattgatgttctgattttaaaattggagtcaaagtctatgtttatcattttactatgttcctgatgttctttgttatttaattaatgggagcaaataaaaccagaagagcttgggaagattgctcagcatatattcctgtcgtagaagttgagattgctagggtccagtttccctagtgtggcctggtcgtggagtatccccttaacacaggtattttacaccgcaataagaatagcgagtcgtg

SEQ ID NO: 427705 - DNA, 361 bp, Homo sapiens
ccaggcggaactctcctatctgaataaagcgaagtggctggaaatgtatggggtagacatgcacgttgtcagggtaagaactgtgtgcgtttaagtaatttggttttgctgttactgaaaaatgtatgaacattatgcaaacaaaataacttgtggtgaggaaactgtttttgcattttgcattctgctgtgtgacgacctgttagaaccctctaccgattgtcacttcgtttgtttgtagggaagagatggctgtgaatattctcttggactgaccccgacaggcatattaatctttgaaggagctaacaaaataggcttattcttttggtaatttagttttgtctaatattaaaaatgt

SEQ ID NO: 427706 - DNA, 271 bp, Homo sapiens
gaagtccagaggtatttagctttattctaaaagcgatgaagttcctcttaattaaagacgctcctggaaaaaaaaaaaggaaaaatttaatgctgtcttttaaaagggaaaggattgtatgtactataatagaattactgtaacatgtcgtttattaactcgcttcagggaatgagctcttccacataggtaagttttccagatagttacagttgcatccatttactgacaagaactgttttatttcagctatttcatttatttcttgaag

SEQ ID NO: 427707 - DNA, 3194 bp, Homo sapiens
cctctgcactcccagcctcctggccccttctgtacatgatttccttgtggccactccatgcatttttcttggctcaagacttagtgggcctccatgggacttggtacctctacttgttcccttctggaatctgtaactttgtgttccccaccattctttcctttatgaaccgatggtgcaacagcatgactacctgaaattcttagtcacccccagctgctttagtggagggaaaatgcccacagcacaggaaatagtcctgcccttcgagagaggccaggggatgggagcgtgtccagagaagggcgatgggttgatgaagggtggccacagcgcccgggaggaaggggccagaacgctctctgttctgttccatgaggaggattatgctggtgtgtgtagtccactggttcagagttgtccagaaatagctcagtgtaaggaacaattttccaaagatcaaaagagctgtctcaagatagcagtgcgttcccagcccctacaggtgtatacagcacaaagggagggaccccctggtgtggctgtcacagagggaagtggacgtcctgtggtttgaccccaccagatggctttagagatctgggccccagggtctgtgattctttttcccctccctcttttctctcccttatttcactgacttttttccagccagagttctagcatcttctttgtcaagcttttaatgattttccctgccacatctatccttttaaaaacaaaatggagtgtaagcggctaagctgtacctcattcccagggctctgtccatgcaggccctcacggcgtccccgaggcccctcagtccagacccatgcttatattgcatccctgatcaccgtgtgctgttttcccttttacccacttctctgtatctgcctttctctgtctctagacagggaacttcttgagagcagagactgtgtctctttgtccctgcctcccagagcgcccagccctgggaacctgctgagtggatggttgctgagtgaatcagagggaggggtagtttactctccctgaggaaaggagaagtagccaccatgcagttctgcctgggttggagttggaaaggctctgtgatggtagaagtctcgcatggccattatctgtcattgcatggtgaaagcgataaagtcctctaagatgtcataactttctgtttttcctttatagcaagcaacccagtgatagcagcccagctctggtgagtgtccttgagctctagagcacagctctcctctctaaggatcgtatttatttgcaatgttgactttttccttactacagtgaaatcaggaagtgtgtcatctggtaatttttttcccctttttctgctgcctggctattccatgctcatggctttcaataagtacacaatataatgttccaagacagtttggtttttttggcaaacacagctgctttgtttgagtagctgtgtgctttgtttatgataacagtgggtgggaaaggtagaggcctgtgcgcagcacactgtgctcatggcgtggcaggcagtgctgggagaggaaggccttgctcgcgagcaaaagctggacgagagcagatgctagatttgctcagtgacgtgcaggttttacatcatagaagacattaaacacctttactgaaattcctgcaggaaaatgaacttatcacaagagtgaaaattgccagcacaggattcagcaaacattttctgtaaagggccacatagtccatgtttgagactttgcaggctctgctgtgtctttcacagctactcacctctgctgttgtagctagagagccgctgtggaaaatatgtaaatgagcgaacgtgactgcattccaataaaactttacttataaatatcagtggaccagatttggcccaaggggtatagtttttgcaggcctcttccctggcacaggtgtccagggtcttgcctgtatagtagaatgatctggtgagcataattatctgaaacatcctccgcagccacaccccaggcgcattgaatcagtctctcagggtgggacccatatagcttgtttttaaagctgcccaggtgagtctgcccggcatataccgctcttgctctctctgaaacaactgcctgtcttatgtgagttttggcttgttgagtagacaagctgtcatgtgagagaaccacagacttgcattgtttggacctttggtctgaactgcagccgctggtaggtaggccaggttcattaggctctcagtcatcccaggcgcaggtctcaaggcggctgagagggtggtctttgagatgggcacagcttgactgtgccatgcactatcagtcaggacagttggcaaaacgtggcacggggtggagcgggttgcagataccccggtgagcgaggagagccctggctgaggcatcaggaaccctccctccaggtaccagctgtgttctaacccagctctggagacttaggccttcctacttctgggcctccgttttctgttttgcaaatcaggaggttgggctagatcagtgtttttccaaactgttttaccctctgattttcaccctctagaagaaacctgatgtcaaagcccaaaatacagaacagacaaatgtggaggtcctccggatgaagccgagtggggagggagaggccagttcctgcctgctcttctgccactcctcccaccccgtagctccagggcaccttcaaggaacccagggttctagagaacacagctggtccctcatattacacagctggaaactcaacctcgcatctctgattccaaatcctactttcagcgtcattctgccttttgtctctgggttttgttctcagcatctgatgaaggggctcaggggtcctgttgaactgctctgtgtcgccccctgccccggagggtgggaggaggttgcagtattctggatgggttagttgtaggtccctagattcaccccatttttaggatccttctggcagatagtatgccaaatggtatctgtacctttcttagcttgtcggggtgtcttgcttttaattctctggggcttgtaagttacagccccaatttctttactttgctctctaaggtagtgattgttttgcttgtttctccctaataaaattacattttcctcccagcatctagtggagattatatattgggaaccaaaacaaactaaaaaaaa

SEQ ID NO: 427708 - DNA, 3218 bp, Homo sapiens
cacatctccgccgccggcgccgccaaggccaccctctactgccgcgtcttcctgctcgacgggaccgaagtgagcgtggacctgccgaaacatgccaaaggccaggatttgtttgatcagattgtgtaccacttggaccttgtggaaacagattactttggcctccagttcctcgactctgcccaggttgcgcactggctggatcatgccaaacccataaaaaagcagatgaaaattggacctgcttatgctttacactttcgagttaaatactattcttcagaaccaaacaaccttcgtgaggagtttacaaggtacctgtttgttttacaactcaggcatgacattctttctggaaaattgaaatgcccttatgaaacagctgtggaattagctgctctctgtctacaagcggagcttggggagtgcgagcttccagaacacacaccagagcttgtgtctgagtttcggttcattccaaatcagacagaagcaatggaatttgatatcttccagagatggaaagagtgcaggggaaagagccctgcccaggcggaactctcctatctgaataaagcgaagtggctggaaatgtatggggtagacatgcacgttgtcaggggaagagatggctgtgaatattctcttggactgaccccgacaggcatattaatctttgaaggagctaacaaaataggcttattcttttggcctaaaattaccaaaatggattttaaaaagagcaaattgacactcgtggtggtcgaggatgatgatcagggacgtgagcaagagcacacgtttgtgttccggttagacagtgccaggacctgcaaacacctttggaagtgtgcagttgagcaccacgcattcttccgactgcggacgccaggaaacagcaaatccaatagatccgactttatcaggctgggctctcgcttcagattcagtgggcggacagaatatcaagctacacatggctccaggttacgaagaaccagcacctttgagaggaagcctagtaaacgttatccatcccggagacattcaacgttcaaagcaagcaacccagtgatagcagcccagctctgccatcccagccagccccggtggcatcctcactctccaaatgtcaggccatcctttcaggatgacaggtcgcattggaaagcatcggccagtggagatgacagccattttgattatgtccacgaccagaaccagaagaacttaggagggatgcaaagtatgatgtatcgagataaactcatgactgcactttgagagactgaagcatctctcttccattcaccttcatagtttcattgcattccatgaaaagtgtcttggcctcagatggatggatgtgtttggacgagtgtctttaaggagtagtcctgaaaggtgtttttggtgtccatgtaaatatttgaagataaaaccactatagcttgtcataatttactgttgactgcattctcattaaaatgaaggtaaaggctcaggaatcatattgatgttctgattttaaaattggagtcaaagtctatgtttatcattttactatgttcctgatgttctttgttatttaattaatgggagcaaataaaaccagaagagcttgggaagattgctcagcatatattcctgtcgtagaagttgagattgctagggtccagtttccctagtgtggcctggacgagtcatttccccttcattgacctcattttccccatctgaaaagagagggttggactaagtgatctccaaggtcctttccaactctaaaattctgcaatttgttaacatttcattttgtttaggttgaggacatacattcaaactaattttatcacaaggaaaactgcaatacccacttccttgacagagttactcctttcagaagctaaataaagtatataacttattagatgttatatagatacagggggactttgaatttcacatcttaaagcagttgagctactttgaatttaagcagtcgtactaatcttaaattgcatagcatttgttttgatcgaatttgctgctcaagtatgggaataatttttaatgtcttaatgattggtgctgctaacttgcgtgatttcagaagacataattgtgaatacacactgtcagaattgggggattggtttttaccctagacttcactcttaaaaagcaacgtgcaatcaagatcatttatggctcaaatgaaagcatataaggttttcttgaagttgtgccaaagcattctgtagagtaggatgagatggttgttgccctagtctgttggtagaaccagaaatcaatatgttgtcttttaggttaaagcttgtaccaaaatatttatttcccccatttcaagccctgagtcaaacatttttttctcttaataatagacctgaaatgttttattagtatttctgtgaaatcagttgattcttgtgccatttttgtatatgtaattgtaattttgcccatgttaggccctctaaaaaatgtttgacatcctttgagatattttattactaaaatctgatcttttttggctactgcaaaaatctattcagcaagaaggtatcagctgcataccttgcacagtggagctgactacctataaactctccctaaggcatttgtttacaggtgtattccattttagcagacgttctgatgctcagtgtatgtgctgcatacaaataaatgtgttctgaatcttttcatcttattgatagcatttttacaaatgtgtttccaaggaataaagattattcttgctttttttttgactccatcttcattttttttaaattgattcttgttgctatgcagaagtctcatttgtgaatgaccttggtaacagaacagttggcttttggaagtctgaaggtgagcattcagttaggtgggtggagcaagatcatcctagaatgaggctgctcttggcaagagtggatcttataggcacagcagctgatgcctttcttcatctggggcaactctggtgaaggttgtcctgcctgtcacaggtgctgagtagagagaagtggtggcagtgggatttcctcagtaatagtcctgtaaaggtacgtgtttgtcctggctacttgtgctcttcctggcaggaaggcatccaaacccttatctgtgggctcctggaaattgtgtatgccatataataccctctaataaatacctctctgcttaaagta

SEQ ID NO: 427709 - DNA, 3217 bp, Homo sapiens
cacatctccgccgccggcgccgccaaggccaccctctactgccgcgtcttcctgctcgacgggaccgaagtgagcgtggacctgccgaaacatgccaaaggccaggatttgtttgatcagattgtgtaccacttggaccttgtggaaacagattactttggcctccagttcctcgactctgcccaggttgcgcactggctggatcatgccaaacccataaaaaagcagatgaaaattggacctgcttatgctttacactttcgagttaaatactattcttcagaaccaaacaaccttcgtgaggagtttacaaggtacctgtttgttttacaactcaggcatgacattctttctggaaaattgaaatgcccttatgaaacagctgtggaattagctgctctctgtctacaagcggagcttggggagtgcgagcttccagaacacacaccagagcttgtgtctgagtttcggttcattccaaatcagacagaagcaatggaatttgatatcttccagagatggaaagagtgcaggggaaagagccctgcccaggcggaactctcctatctgaataaagcgaagtggctggaaatgtatggggtagacatgcacgttgtcaggggaagagatggctgtgaatattctcttggactgaccccgacaggcatattaatctttgaaggagctaacaaaataggcttattcttttggcctaaaattaccaaaatggattttaaaaagagcaaattgacactcgtggtggtcgaggatgatgatcagggacgtgagcaagagcacacgtttgtgttccggttagacagtgccaggacctgcaaacacctttggaagtgtgcagttgagcaccacgcattcttccgactgcggacgccaggaaacagcaaatccaatagatccgactttatcaggctgggctctcgcttcagattcagtgggcggacagaatatcaagctacacatggctccaggttacgaagaaccagcacctttgagaggaagcctagtaaacgttatccatcccggagacattcaacgttcaaagcaagcaacccagtgatagcagcccagctctgctctaaaacaaatccagaagtccataattaccagcctcaatatcatcctaatatccatcccagccagccccggtggcatcctcactctccaaatgtcaggccatcctttcaggatgacaggtcgcattggaaagcatcggccagtggagatgacagccattttgattatgtccacgaccagaaccagaagaacttaggagggatgcaaagtatgatgtatcgagataaactcatgactgcactttgagagactgaagcatctctcttccattcaccttcatagtttcattgcattccatgaaaagtgtcttggcctcagatggatggatgtgtttggacgagtgtctttaaggagtagtcctgaaaggtgtttttggtgtccatgtaaatatttgaagataaaaccactatagcttgtcataatttactgttgactgcattctcattaaaatgaaggtaaaggctcaggaatcatattgatgttctgattttaaaattggagtcaaagtctatgtttatcattttactatgttcctgatgttctttgttatttaattaatgggagcaaataaaaccagaagagcttgggaagattgctcagcatatattcctgtcgtagaagttgagattgctagggtccagtttccctagtgtggcctggacgagtcatttccccttcattgacctcattttccccatctgaaaagagagggttggactaagtgatctccaaggtcctttccaactctaaaattctgcaatttgttaacatttcattttgtttaggttgaggacatacattcaaactaattttatcacaaggaaaactgcaatacccacttccttgacagagttactcctttcagaagctaaataaagtatataacttattagatgttatatagatacagggggactttgaatttcacatcttaaagcagttgagctactttgaatttaagcagtcgtactaatcttaaattgcatagcatttgttttgatcgaatttgctgctcaagtatgggaataatttttaatgtcttaatgattggtgctgctaacttgcgtgatttcagaagacataattgtgaatacacactgtcagaattgggggattggtttttaccctagacttcactcttaaaaagcaacgtgcaatcaagatcatttatggctcaaatgaaagcatataaggttttcttgaagttgtgccaaagcattctgtagagtaggatgagatggttgttgccctagtctgttggtagaaccagaaatcaatatgttgtcttttaggttaaagcttgtaccaatagacctgaaatgttttattagtatttctgtgaaatcagttgattcttgtgccatttttgtatatgtaattgtaattttgcccatgttaggccctctaaaaaatgtttgacatcctttgagatattttattactaaaatctgatcttttttggctactgcaaaaatctattcagcaagaaggtatcagctgcataccttgcacagtggagctgactacctataaactctccctaaggcatttgtttacaggtgtattccattttagcagacgttctgatgctcagtgtatgtgctgcatacaaataaatgtgttctgaatcttttcatcttattgatagcatttttacaaatgtgtttccaaggaataaagattattcttgctttttttttgactccatcttcattttttttaaattgattcttgttgctatgcagaagtctcatttgtgaatgaccttggtaacagaacagttggcttttggaagtctgaaggtgagcattcagttaggtgggtggagcaagatcatcctagaatgaggctgctcttggcaagagtggatcttataggcacagcagctgatgcctttcttcatctggggcaactctggtgaaggttgtcctgcctgtcacaggtgctgagtagagagaagtggtggcagtgggatttcctcagtaatagtcctgtaaaggtacgtgtttgtcctggctacttgtgctcttcctggcaggaaggcatccaaacccttatctgtgggctcctggaaattgtgtatgccatataataccctctaataaatacctctctgcttaaagta

SEQ ID NO: 427710 - DNA, 642 bp, Homo sapiens
cacatctccgccgccggcgccgccaaggccaccctctactgccgcgtcttcctgctcgacgggaccgaagtgagcgtggacctgccgaaacatgccaaaggccaggatttgtttgatcagattgtgtaccacttggaccttgtggaaacagattactttggcctccagttcctcgactctgcccaggttgcgcactggctggatcatgccaaacccataaaaaagcagatgaaaattggacctgcttatgctttacactttcgagttaaatactattcttcagaaccaaacaaccttcgtgaggagtttacaaggtacctgtttgttttacaactcaggcatgacattctttctggaaaattgaaatgcccttatgaaacagctgtggaattagctgctctctgtctacaagcggagcttggggagtgcgagcttccagaacacacaccagagcttgtgtctgagtttcggttcattccaaatcagacagaagcaatggaatttgatatcttccagagatggaaagagtgcaggggaaagagccctgcccaggcggaactctcctatctgaataaagcgaagtggctggaaatgtatggggtagacatgcacgttgtcagggtaagaactgtgtgcgtttaa

SEQ ID NO: 427711 - DNA, 3947 bp, Homo sapiens
ggcccgctccagccgccgcgcatcctcggcccgcgccccgagacccgcgcccagctagccccggccccgctcggcgccccaggcagctcggctgcgctcgccgcgggacggcgcggccatgaggctgcggggatgcggaccccgggccgcccctgcctccagcgcaggggccagcgacgctcggctgctggcgcccccggggcggaaccccttcgtgcacgagctgcgcctcagcgccctgcagaaggcccaggtggccctcatgacactgacgctcttcccggtccggctcctggttgccgctgccatgatgctgctggcctggcccctcgcacttgtcgcatccctgggctctgcggagaaggaacccgagcagcccccggccctgtggaggaaggttgtggacttcctgctgaaggccatcatgcgcaccatgtggttcgccggcggcttccaccgggtggccgtgaaggggcggcaggcgctgcccaccgaggcggccatcctcacgctcgcgcctcactcgtcctacttcgacgccatccctgtgaccatgacgatgtcctccatcgtgatgaaggcagagagcagagacatcccgatctggggaactctgatccagtatatacggcctgtgttcgtgtcccggtcagaccaggattctcgcaggaaaacagtagaagaaatcaagagacgggcgcagtccaacggaaagtggccacagataatgatttttccagaaggaacttgtacaaacaggacctgcctaattaccttcaaacctggtgcattcatccctggagcgcccgtccagcctgtggttttacgatatccaaataaactggacaccatcacatggacgtggcaaggacctggagcgctggaaatcctgtggctcacgctgtgtcagtttcacaaccaagtggaaatcgagttccttcctgtgtacagcccttctgaggaggagaagaggaaccccgcgctgtatgccagcaacgtgcggcgagtcatggccgaggccttgggtgtctccgtgactgactacacgttcgaggactgccagctggccctggcggaaggacagctccgtctccccgctgacacttgccttttagaatttgccaggctcgtgcggggcctcgggctaaaaccagaaaagcttgaaaaagatctggacagatactcagaaagagccaggatgaagggaggagagaagataggtattgcggagtttgccgcctccctggaagtccccgtttctgacttgctggaagacatgttttcactgttcgacgagagcggcagcggcgaggtggacctgcgagagtgtgtggttgccctgtctgtcgtctgccggccggcccggaccctggacaccatccagctggctttcaagacgtacggagcgcaagaggacggcagcgtcggcgaaggtgacctgtcctgcatcctcaagacggccctgggggtggcagagctcaccgtgaccgacctattccgagccattgaccaagaggagaaggggaagatcacattcgctgacttccacaggtttgcagaaatgtaccctgccttcgcagaggaatacctgtacccggatcagacacatttcgaaagctgtgcagagacctcacctgcgccaatcccaaacggcttctgtgccgatttcagcccggaaaactcagacgctgggcggaagcctgttcgcaagaagctggattaggacccagggttgcggagagacgcggcccctcccgcgtggacatcaccgccatgagcctctttgcgagtgacctctgggctccgctcctcactcctgctgtacaggcactgtcttcagcccgagttccaggggcctcgggggctgtttgtatcttgttcctttgtgaagtgtgttgcagaaccgacgcttactgtgcgagaatcggagggcgcgcacgcggatcccccgcctggcctggaccccgtggggtcaggttccctgccgggcggggggcaccggtgccgccccgtgttctcccacggggccctggtttcgagtctctgtcacagcctcttccggcggcagcgtgcaccgggcgggcctccgtgcacactcagcacacgcctgccacacagcgtgcgcttgcgtgtcactctggcacgaaacctgtctgcctctgtggatccacagcctggcagagccgagccgtcacctgatttttcagtgtttctacctgtgtgctggagctcatgagtattttataaactccatttaggtacttcaggaaacatgcagcattttttaaaaaatgaaaattgtttttctacttcatttttccttttagagtcaaaggatatttatttataggcctttttttttttaatatagaatctgaggctgtttgggctttgacttaaatttccatcaggcctctctccagcaggtaatccctctccttccgctgggtcccctggggaggtgtgaactcaagggcctagccccaaaacactttttctgcttttcttaatccttttccagtcccctctttttttataaacgttggcagtttgatgtttctgtttcggcataacgtaatccatttcactgtagcctaaactccagtccgaggttggatattgttcaaatgagcagggcccgagctggaagcgcaaggcagccgccgccgtgccgctcctcccttgccctcaggccaggtccctgctggaagcggctgcatcttcctgtcagccctggtttccatggtgactggcgtgacgcagccacctgagtatggctgaccttcctgcagagagaggagccgcagtcttttgcttgtggaaggagacgctgggctgtgcggtgcggagggtgatgaggatgtctggtgacagccgtgcggacaccactcctctctgcagcactgcctcccagcgccagggtcgcgggcacatcccactgagagcgggggtcctgccccatcttagagtcaaaggcagaggggcttccaggccctggatggggtattttggtgtcacctgaagtccctctgacatcaccttgtttcatcattttttatgacagaattagaaacccatccttcaagcacaataatcatcacagacttgagtttgcttcctaaagcaaaggctccgggtttgtttggaaaatttttttgatttctgaaatgaattgatttttatatttggggcatctctatagaaagtgaccaccaaggccagtaagtacgggaaaaaatgtttactaacttcctcagagattcgtgatacgcgtttctccactgacagacatttaaaaacaaccttcagctccgtttcaatcaatcacctcgacttgttttttagcatggacactgccagcaggacagacagggatggagtaaaccgaagtcaatttcagggctcttggcgtgttggacacagaagaaatcctagtgcagcctttggtagctaacagtcactgattttataattggagaatgcgtaaagattcatttttcaaggagaagagcctgcaaatggccaatgaaggaggtaaataaactaagatattccgagggaagggacccaggccacctcccttccgcaggtctgcagatgaagggttttttgaatgaaatgccactgtgcattttcagaaaaaaaaatctctgataaacagactttgaatggatgtttgttcctcctgattctcttttctcttcgtggcgacttagagttggcggatattcggaactgtgaatgtacatagcgttgagttaaaccccttgtgtgtgagacaggacgcagcgggcccctggtggcctgggggccagacccgtgggcaggtggggcatgggccctggcctgcggggacctgctggggtgtgagggcagagggagggttgccatgaaggaacttgggattttcaatggaataaataaaacataaagtctatacttgggaa

SEQ ID NO: 427712 - DNA, 4081 bp, Homo sapiens
ggcccgctccagccgccgcgcatcctcggcccgcgccccgagacccgcgcccagctagccccggccccgctcggcgccccaggcagctcggctgcgctcgccgcgggacggcgcggccatgaggctgcggggatgcggaccccgggccgcccctgcctccagcgcaggggccagcgacgctcggctgctggcgcccccggggcggaaccccttcgtgcacgagctgcgcctcagcgccctgcagaaggcccagtttccacagagtgaaatagcctgtctttcaagccaagaaagccttcttccccaaagaaagaaatgggtccagtagtggctgacacactcaagaacccgcagaaacccagctaagttcccagttgagataaaccagtggccctcatgacactgacgctcttcccggtccggctcctggttgccgctgccatgatgctgctggcctggcccctcgcacttgtcgcatccctgggctctgcggagaaggaacccgagcagcccccggccctgtggaggaaggttgtggacttcctgctgaaggccatcatgcgcaccatgtggttcgccggcggcttccaccgggtggccgtgaaggggcggcaggcgctgcccaccgaggcggccatcctcacgctcgcgcctcactcgtcctacttcgacgccatccctgtgaccatgacgatgtcctccatcgtgatgaaggcagagagcagagacatcccgatctggggaactctgatccagtatatacggcctgtgttcgtgtcccggtcagaccaggattctcgcaggaaaacagtagaagaaatcaagagacgggcgcagtccaacggaaagtggccacagataatgatttttccagaaggaacttgtacaaacaggacctgcctaattaccttcaaacctggtgcattcatccctggagcgcccgtccagcctgtggttttacgatatccaaataaactggacaccatcacatggacgtggcaaggacctggagcgctggaaatcctgtggctcacgctgtgtcagtttcacaaccaagtggaaatcgagttccttcctgtgtacagcccttctgaggaggagaagaggaaccccgcgctgtatgccagcaacgtgcggcgagtcatggccgaggccttgggtgtctccgtgactgactacacgttcgaggactgccagctggccctggcggaaggacagctccgtctccccgctgacacttgccttttagaatttgccaggctcgtgcggggcctcgggctaaaaccagaaaagcttgaaaaagatctggacagatactcagaaagagccaggatgaagggaggagagaagataggtattgcggagtttgccgcctccctggaagtccccgtttctgacttgctggaagacatgttttcactgttcgacgagagcggcagcggcgaggtggacctgcgagagtgtgtggttgccctgtctgtcgtctgccggccggcccggaccctggacaccatccagctggctttcaagacgtacggagcgcaagaggacggcagcgtcggcgaaggtgacctgtcctgcatcctcaagacggccctgggggtggcagagctcaccgtgaccgacctattccgagccattgaccaagaggagaaggggaagatcacattcgctgacttccacaggtttgcagaaatgtaccctgccttcgcagaggaatacctgtacccggatcagacacatttcgaaagctgtgcagagacctcacctgcgccaatcccaaacggcttctgtgccgatttcagcccggaaaactcagacgctgggcggaagcctgttcgcaagaagctggattaggacccagggttgcggagagacgcggcccctcccgcgtggacatcaccgccatgagcctctttgcgagtgacctctgggctccgctcctcactcctgctgtacaggcactgtcttcagcccgagttccaggggcctcgggggctgtttgtatcttgttcctttgtgaagtgtgttgcagaaccgacgcttactgtgcgagaatcggagggcgcgcacgcggatcccccgcctggcctggaccccgtggggtcaggttccctgccgggcggggggcaccggtgccgccccgtgttctcccacggggccctggtttcgagtctctgtcacagcctcttccggcggcagcgtgcaccgggcgggcctccgtgcacactcagcacacgcctgccacacagcgtgcgcttgcgtgtcactctggcacgaaacctgtctgcctctgtggatccacagcctggcagagccgagccgtcacctgatttttcagtgtttctacctgtgtgctggagctcatgagtattttataaactccatttaggtacttcaggaaacatgcagcattttttaaaaaatgaaaattgtttttctacttcatttttccttttagagtcaaaggatatttatttataggcctttttttttttaatatagaatctgaggctgtttgggctttgacttaaatttccatcaggcctctctccagcaggtaatccctctccttccgctgggtcccctggggaggtgtgaactcaagggcctagccccaaaacactttttctgcttttcttaatccttttccagtcccctctttttttataaacgttggcagtttgatgtttctgtttcggcataacgtaatccatttcactgtagcctaaactccagtccgaggttggatattgttcaaatgagcagggcccgagctggaagcgcaaggcagccgccgccgtgccgctcctcccttgccctcaggccaggtccctgctggaagcggctgcatcttcctgtcagccctggtttccatggtgactggcgtgacgcagccacctgagtatggctgaccttcctgcagagagaggagccgcagtcttttgcttgtggaaggagacgctgggctgtgcggtgcggagggtgatgaggatgtctggtgacagccgtgcggacaccactcctctctgcagcactgcctcccagcgccagggtcgcgggcacatcccactgagagcgggggtcctgccccatcttagagtcaaaggcagaggggcttccaggccctggatggggtattttggtgtcacctgaagtccctctgacatcaccttgtttcatcattttttatgacagaattagaaacccatccttcaagcacaataatcatcacagacttgagtttgcttcctaaagcaaaggctccgggtttgtttggaaaatttttttgatttctgaaatgaattgatttttatatttggggcatctctatagaaagtgaccaccaaggccagtaagtacgggaaaaaatgtttactaacttcctcagagattcgtgatacgcgtttctccactgacagacatttaaaaacaaccttcagctccgtttcaatcaatcacctcgacttgttttttagcatggacactgccagcaggacagacagggatggagtaaaccgaagtcaatttcagggctcttggcgtgttggacacagaagaaatcctagtgcagcctttggtagctaacagtcactgattttataattggagaatgcgtaaagattcatttttcaaggagaagagcctgcaaatggccaatgaaggaggtaaataaactaagatattccgagggaagggacccaggccacctcccttccgcaggtctgcagatgaagggttttttgaatgaaatgccactgtgcattttcagaaaaaaaaatctctgataaacagactttgaatggatgtttgttcctcctgattctcttttctcttcgtggcgacttagagttggcggatattcggaactgtgaatgtacatagcgttgagttaaaccccttgtgtgtgagacaggacgcagcgggcccctggtggcctgggggccagacccgtgggcaggtggggcatgggccctggcctgcggggacctgctggggtgtgagggcagagggagggttgccatgaaggaacttgggattttcaatggaataaataaaacataaagtctatacttgggaa

SEQ ID NO: 427713 - DNA, 4160 bp, Homo sapiens
ggcccgctccagccgccgcgcatcctcggcccgcgccccgagacccgcgcccagctagccccggccccgctcggcgccccaggcagctcggctgcgctcgccgcgggacggcgcggccatgaggctgcggggatgcggaccccgggccgcccctgcctccagcgcaggggccagcgacgctcggctgctggcgcccccggggcggaaccccttcgtgcacgagctgcgcctcagcgccctgcagaaggcccaggtggccctcatgacactgacgctcttcccggtccggctcctggttgccgctgccatgatgctgctggcctggcccctcgcacttgtcgcatccctgggctctgcggagaaggaacccgagcagcccccggccctgtggaggaaggttgtggacttcctgctgaaggccatcatgcgcaccatgtggttcgccggcggcttccaccgggtggccgtgaaggggcggcaggcgctgcccaccgaggcggccatcctcacgctcgcgcctcactcgtcctacttcgacgccatccctgtgaccatgacgatgtcctccatcgtgatgaaggcagagagcagagacatcccgatctggggaactctgatccagtatatacggcctgtgttcgtgtcccggtcagaccaggattctcgcaggaaaacagtagaagaaatcaagagacgggcgcagtccaacggaaagtggccacagataatgatttttccagaaggaacttgtacaaacaggacctgcctaattaccttcaaacctggtgcattcatccctggagcgcccgtccagcctgtggttttacgatatccaaataaactggacaccatcacatggacgtggcaaggacctggagcgctggaaatcctgtggctcacgctgtgtcagtttcacaaccaagtggaaatcgagttccttcctgtgtacagcccttctgaggaggagaagaggaaccccgcgctgtatgccagcaacgtgcggcgagtcatggccgaggccttgggtgtctccgtgactgactacacgttcgaggactgccagctggccctggcggaaggacagctccgtctccccgctgacacttgccttttagaatttgccaggctcgtgcggggcctcgggctaaaaccagaaaagcttgaaaaagatctggacagatactcagaaagagccaggatgaagggaggagagaagataggtattgcggagtttgccgcctccctggaagtccccgtttctgacttgctggaagacatgttttcactgttcgacgagagcggcagcggcgaggtggacctgcgagagtgtgtggttgccctgtctgtcgtctgccggccggcccggaccctggacaccatccagctggctttcaagacgtacggagcgcaagaggacggcagcgtcggcgaaggtgacctgtcctgcatcctcaagacggccctgggggtggcagagctcaccgtgaccgacctattccgagccattgaccaagaggagaaggggaagatcacattcgctgacttccacaggtttgcagaaatgtaccctgccttcgcagaggaatacctgtacccggatcagacacatttcgaaagctgtgcagagacctcacctgcgccaatcccaaacggcttctgtgccgatttcagcccggaaaactcagacgctgggcggaagcctgttcgcaagaagctggattaggacccagggttgcggagagacgcggcccctcccgcgtggacatcaccgccatgagcctctttgcgagtgacctctgggctccgctcctcactcctgctgtacaggcactgtcttcagcccgagttccaggggcctcgggggctgtttgtatcttgttcctttgtgaagtgtgttgcagaaccgacgcttactgtgcgagaatcggagggcgcgcacgcggatcccccgcctggcctggaccccgtggggtcaggttccctgccgggcggggggcaccggtgccgccccgtgttctcccacggggccctggtttcgagtctctgtcacagcctcttccggcggcagcgtgcaccgggcgggcctccgtgcacactcagcacacgcctgccacacagcgtgcgcttgcgtgtcactctggcacgaaacctgtctgcctctgtggatccacagcctggcagagccgagccgtcacctgatttttcagtgtttctacctgtgtgctggagctcatgagtattttataaactccatttaggtacttcaggaaacatgcagcattttttaaaaaatgaaaattgtttttctacttcatttttccttttagagtcaaaggatatttatttataggcctttttttttttaatatagaatctgaggctgtttgggctttgacttaaatttccatcaggcctctctccagcaggtaatccctctccttccgctgggtcccctggggaggtgtgaactcaagggcctagccccaaaacactttttctgcttttcttaatccttttccagtcccctctttttttataaacgttggcagtttgatgtttctgtttcggcataacgtaatccatttcactgtagcctaaactccagtccgaggttggatattgttcaaatgagcagggcccgagctggaagcgcaaggcagccgccgccgtgccgctcctcccttgccctcaggccaggtccctgctggaagcggctgcatcttcctgtcagccctggtttccatggtgactggcgtgacgcagccacctgagtatggctgaccttcctgcagagagaggagccgcagtcttttgcttgtggaaggagacgctgggctgtgcggtgcggagggtgatgaggatgtctggtgacagccgtgcggacaccactcctctctgcagcactgcctcccagcgccagggtcgcgggcacatcccactgagagcgggggtcctgccccatcttagagtcaaaggcagaggggcttccaggccctggatggggtattttggtgtcacctgaagtccctctgacatcaccttgtttcatcattttttatgacagaattagaaacccatccttcaagcacaataatcatcacagacttgagtttgcttcctaaagcaaaggctccgggtttgtttggaaaatttttttgatttctgaaatgaattgatttttatatttggggcatctctatagaaagtgaccaccaaggccagtaagtacgggaaaaaatgtttactaacttcctcagagattcgtgatacgcgtttctccactgacagacatttaaaaacaaccttcagctccgtttcaatcaatcacctcgacttgttttttagcatggacactgccagcaggacagacagggatggagtaaaccgaagtcaatttcagggctcttggcgtgttggacacagaagaaatcctagtgcagcctttggtagctaacagtcactgattttataattggagaatgcgtaaagattcatttttcaaggagaagagcctgcaaatggccaatgaaggaggtaaataaactaagatattccgagggaagggacccaggccacctcccttccgcaggtctgcagatgaagggttttttgaatgaaatgccactgtgcattttcagaaaaaaaaatctctgataaacagactttgaatggatgtttgttcctcctgattctcttttctcttcgtggcgacttagagttggcggatattcggaactgtgaatgtacatagcgttgagttaaaccccttgtgtgtgagacaggacgcagcgggcccctggtggcctgggggccagacccgtgggcaggtggggcatgggccctggcctgcggggacctgctggggtgtgagggcagagggagggttgccatgaaggaacttgggattttcaatggaataaataaaacataaagtctatacttgggaaaaaaaaaaaacaacaacacaaaaaacaacaaaaaaacacaacactaaaaaaaaaaaaaaaagagaacaaaagaggagaggaccacaacaaacacacgcacccaagcacgcagggcgcacaaaagcaaaagaaaacaaaaggagagcgagagaagccaacaactaacagaggaggaacgagaaacaccaaaaggcgaggccgggacagaggaca

SEQ ID NO: 427714 - DNA, 3893 bp, Homo sapiens
ggcccgctccagccgccgcgcatcctcggcccgcgccccgagacccgcgcccagctagccccggccccgctcggcgccccaggcagctcggctgcgctcgccgcgggacggcgcggccatgaggctgcggggatgcggaccccgggccgcccctgcctccagcgcaggggccagcgacgctcggctgctggcgcccccggggcggaaccccttcgtgcacgagctgcgcctcagcgccctgcagaaggcccaggtggccctcatgacactgacgctcttcccggtccggctcctggttgccgctgccatgatgctgctggcctggcccctcgcacttgtcgcatccctgggctctgcggagaaggaacccgagcagcccccggccctgtggaggaaggttgtggacttcctgctgaaggccatcatgcgcaccatgtggttcgccggcggcttccaccgggtggccgtgaaggggcggcaggcgctgcccaccgaggcggccatcctcacgctcgcgcctcactcgtcctacttcgacgccatccctgtgaccatgacgatgtcctccatcgtgatgaaggcagagagcagagacatcccgatctggggaactctgatccagtatatacggcctgtgttcgtgtcccggtcagaccaggattctcgcaggaaaacagtagaagaaatcaagagacgggcgcagtccaacggaaagtggccacagataatgatttttccagaaggaacttgtacaaacaggacctgcctaattaccttcaaacctggtgcattcatccctggagcgcccgtccagcctgtggttttacgatatccaaataaactggacaccatcacatggacgtggcaaggacctggagcgctggaaatcctgtggctcacgctgtgtcagtttcacaaccaagtggaaatcgagttccttcctgtgtacagcccttctgaggaggagaagaggaaccccgcgctgtatgccagcaacgtgcggcgagtcatggccgaggccttgggtgtctccgtgactgactacacgttcgaggactgccagctggccctggcggaaggacagctccgtctccccgctgacacttgccttttagaatttgccaggctcgtgcggggcctcgggctaaaaccagaaaagcttgaaaaagatctggacagatactcagaaagagccaggatgaagggaggagagaagataggtattgcggagtttgccgcctccctggaagtccccgtttctgacttgctggaagacatgttttcactgttcgacgagagcggcagcggcgaggtggacctgcgagagtgtgtggttgccctgtctgtcgtctgccggccggcccggaccctggacaccatccagctggctttcaagacgtacggagcgcaagaggacggcagcgtcggcgaaggtgacctgtcctgcatcctcaagacggccctgggggtggcagagctcaccgtgaccgacctattccgagccattgaccaagaggagaaggggaagatcacattcgctgacttccacaggtttgcagaaatgtaccctgccttcgcagaggaatacctgtacccggatcagacacatttcgaaagctgtgcagagacctcacctgcgccaatcccaaacggcttctgtgccgatttcagcccggaaaactcagacgctgggcggaagcctgttcgcaagaagctggattaggacccagggttgcggagagacgcggcccctcccgcgtggacatcaccgccatgagcctctttgcgagtgacctctgggctccgctcctcactcctgctgtacaggcactgtcttcagcccgagttccaggggcctcgggggctgtttgtatcttgttcctttgtgaagtgtgttgcagaaccgacgcttactgtgcgagaatcggagggcgcgcacgcggatcccccgcctggcctggaccccgtggggtcaggttccctgccgggcggggggcaccggtgccgccccgtgttctcccacggggccctggtttcgagtctctgtcacagcctcttccggcggcagcgtgcaccgggcgggcctccgtgcacactcagcacacgcctgccacacagcgtgcgcttgcgtgtcactctggcacgaaacctgtctgcctctgtggatccacagcctggcagagccgagccgtcacctgatttttcagtgtttctacctgtgtgctggagctcatgagtattttataaactccatttaggtacttcaggaaacatgcagcattttttaaaaaatgaaaattgtttttctacttcatttttccttttagagtcaaaggatatttatttataggcctttttttttttaatatagaatctgaggctgtttgggctttgacttaaatttccatcaggcctctctccagcaggtaatccctctccttccgctgggtcccctggggaggtgtgaactcaagggcctagccccaagttggcagtttgatgtttctgtttcggcataacgtaatccatttcactgtagcctaaactccagtccgaggttggatattgttcaaatgagcagggcccgagctggaagcgcaaggcagccgccgccgtgccgctcctcccttgccctcaggccaggtccctgctggaagcggctgcatcttcctgtcagccctggtttccatggtgactggcgtgacgcagccacctgagtatggctgaccttcctgcagagagaggagccgcagtcttttgcttgtggaaggagacgctgggctgtgcggtgcggagggtgatgaggatgtctggtgacagccgtgcggacaccactcctctctgcagcactgcctcccagcgccagggtcgcgggcacatcccactgagagcgggggtcctgccccatcttagagtcaaaggcagaggggcttccaggccctggatggggtattttggtgtcacctgaagtccctctgacatcaccttgtttcatcattttttatgacagaattagaaacccatccttcaagcacaataatcatcacagacttgagtttgcttcctaaagcaaaggctccgggtttgtttggaaaatttttttgatttctgaaatgaattgatttttatatttggggcatctctatagaaagtgaccaccaaggccagtaagtacgggaaaaaatgtttactaacttcctcagagattcgtgatacgcgtttctccactgacagacatttaaaaacaaccttcagctccgtttcaatcaatcacctcgacttgttttttagcatggacactgccagcaggacagacagggatggagtaaaccgaagtcaatttcagggctcttggcgtgttggacacagaagaaatcctagtgcagcctttggtagctaacagtcactgattttataattggagaatgcgtaaagattcatttttcaaggagaagagcctgcaaatggccaatgaaggaggtaaataaactaagatattccgagggaagggacccaggccacctcccttccgcaggtctgcagatgaagggttttttgaatgaaatgccactgtgcattttcagaaaaaaaaatctctgataaacagactttgaatggatgtttgttcctcctgattctcttttctcttcgtggcgacttagagttggcggatattcggaactgtgaatgtacatagcgttgagttaaaccccttgtgtgtgagacaggacgcagcgggcccctggtggcctgggggccagacccgtgggcaggtggggcatgggccctggcctgcggggacctgctggggtgtgagggcagagggagggttgccatgaaggaacttgggattttcaatggaataaataaaacataaagtctatacttgggaa

SEQ ID NO: 427715 - DNA, 4252 bp, Homo sapiens
ggcccgctccagccgccgcgcatcctcggcccgcgccccgagacccgcgcccagctagccccggccccgctcggcgccccaggcagctcggctgcgctcgccgcgggacggcgcggccatgaggctgcggggatgcggaccccgggccgcccctgcctccagcgcaggggccagcgacgctcggctgctggcgcccccggggcggaaccccttcgtgcacgagctgcgcctcagcgccctgcagaaggcccaggtggccctcatgacactgacgctcttcccggtccggctcctggttgccgctgccatgatgctgctggcctggcccctcgcacttgtcgcatccctgggctctgcggagaaggaacccgagcagcccccggccctgtggaggaaggttgtggacttcctgctgaaggccatcatgcgcaccatgtggttcgccggcggcttccaccgggtggccgtgaaggggcggcaggcgctgcccaccgaggcggccatcctcacgctcgcgcctcactcgtcctacttcgacgccatccctgtgaccatgacgatgtcctccatcgtgatgaaggcagagagcagagacatcccgatctggggaactctgatccagtatatacggcctgtgttcgtgtcccggtcagaccaggattctcgcaggaaaacagtagaagaaatcaagagacgggcgcagtccaacggaaagtggccacagataatgatttttccagaaggaacttgtacaaacaggacctgcctaattaccttcaaacctggtgcattcatccctggagcgcccgtccagcctgtggttttacgatatccaaataaactggacaccatcacatggacgtggcaaggacctggagcgctggaaatcctgtggctcacgctgtgtcagtttcacaaccaagtggaaatcgagttccttcctgtgtacagcccttctgaggaggagaagaggaaccccgcgctgtatgccagcaacgtgcggcgagtcatggccgaggccttgggtgtctccgtgactgactacacgttcgaggactgccagctggccctggcggaaggacagctccgtctccccgctgacacttgccttttagaatttgccaggctcgtgcggggcctcgggctaaaaccagaaaagcttgaaaaagatctggacagatactcagaaagagccaggatgaagggaggagagaagataggtattgcggagtttgccgcctccctggaagtccccgtttctgacttgctggaagacatgttttcactgttcgacgagagcggcagcggcgaggtggacctgcgagagtgtgtggttgccctgtctgtcgtctgccggccggcccggaccctggacaccatccagctggctttcaagacgtacggagcgcaagaggacggcagcgtcggcgaaggtgacctgtcctgcatcctcaagacggccctgggggtggcagagctcaccgtgaccgacctattccgagccattgaccaagaggagaaggggaagatcacattcgctgacttccacaggtttgcagaaatgtaccctgccttcgcagaggaatacctgtacccggatcagacacatttcgaaagctgtgcagagacctcacctgcgccaatcccaaacggcttctgtgccgatttcagcccggaaaactcagacgctgggcggaagcctgttcgcaagaagctggattaggacccagggttgcggagagacgcggcccctcccgcgtggacatcaccgccatgagcctctttgcgagtgacctctgggctccgctcctcactcctgctgtacaggcactgtcttcagcccgagttccaggggcctcgggggctgtttgtatcttgttcctttgtgaagtgtgttgcagaaccgacgcttactgtgcgagaatcggagggcgcgcacgcggatcccccgcctggcctggaccccgtggggtcaggttccctgccgggcggggggcaccggtgccgccccgtgttctcccacggggccctggtttcgagtctctgtcacagcctcttccggcggcagcgtgcaccgggcgggcctccgtgcacactcagcacacgcctgccacacagcgtgcgcttgcgtgtcactctggcacgaaacctgtctgcctctgtggatccacagcctggcagagccgagccgtcacctgatttttcagtgtttctacctgtgtgctggagctcatgagtattttataaactccatttaggtacttcaggaaacatgcagcattttttaaaaaatgaaaattgtttttctacttcatttttccttttagagtcaaaggatatttatttataggcctttttttttttaatatagaatctgaggctgtttgggctttgacttaaatttccatcaggcctctctccagcaggtaatccctctccttccgctgggtcccctggggaggtgtgaactcaagggcctagccccaaaacactttttctgcttttcttaatccttttccagtcccctctttttttataaacgttggcagtttgatgtttctgtttcggcataacgtaatccatttcactgtagcctaaactccagtccgaggttggatattgttcaaatgagcagggcccgagctggaagcgcaaggcagccgccgccgtgccgctcctcccttgccctcaggccaggtccctgctggaagcggctgcatcttcctgtcagccctggtttccatggtgactggcgtgacgcagccacctgagtatggctgaccttcctgcagagagaggagccgcagtcttttgcttgtggaaggagacgctgggctgtgcggtgcggagggtgatgaggatgtctggtgacagccgtgcggacaccactcctctctgcagcactgcctcccagcgccagggtcgcgggcacatcccactgagagcgggggtcctgccccatcttagagtcaaaggcagaggggcttccaggccctggatggggtattttggtgtcacctgaagtccctctgacatcaccttgtttcatcattttttatgacagaattagaaacccatccttcaagcacaataatcatcacagacttgagtttgcttcctaaagcaaaggctccgggtttgtttggaaaatttttttgatttctgaaatgaattgatttttatatttggggcatctctatagaaagtgaccaccaaggccagtaagtacgggaaaaaatgtttactaacttcctcagagattcgtgatacgcgtttctccactgacagacatttaaaaacaaccttcagctccgtttcaatcaatcacctcgacttgttttttagcatggacactgccagcaggacagacagggatggagtaaaccgaagtcaatttcagggctcttggcgtgttggacacagaagaaatcctagtgcagcctttggtagctaacagtcactgattttataattggagaatgcgtaaagattcatttttcaaggagaagagcctgcaaatggccaatgaaggaggtaaataaactaagatattccgagggaagggacccaggccacctcccttccgcaggtctgcagatgaagggttttttgaatgaaatgccactgtgcattttcagaaaaaaaaatctctgataaacagactttgaatggatgtttgttcctcctgattctcttttctcttcgtggcgacttagagttggcggatattcggaactgtgaatgtacatagcgttgagttaaaccccttgtgtgtgagacaggacgcagcgggcccctggtggcctgggggccagacccgtgggcaggtggggcatgggccctggcctgcggggacctgctggggtgtgagggcagagggagggttgccatgaaggaacttgggattttcaatggaataaataaaacataaagtctatacttgggaaaaaaaccaccacacaacgagggcggcgcccttattatttgtgtctaacaagaatgtttgttgtcaaaccattaaggggaaaattattcctggaaattacgtggaattgataggtcttcgagtgggcatcaaacaaggaattaccaatttaggggataaaatacaatgtggaagaaggtcttaagaaaagaagaccagttgtgaaaacacggtatacatgaatctgaaggaggaacaaggttgagaaaaaagtgtgttggatgtaaggtgaggccaacaagatataagaggagaacatgcattcag

SEQ ID NO: 427716 - DNA, 3672 bp, Homo sapiens
ggcccgctccagccgccgcgcatcctcggcccgcgccccgagacccgcgcccagctagccccggccccgctcggcgccccaggcagctcggctgcgctcgccgcgggacggcgcggccatgaggctgcggggatgcggaccccgggccgcccctgcctccagcgcaggggccagcgacgctcggctgctggcgcccccggggcggaaccccttcgtgcacgagctgcgcctcagcgccctgcagaaggcccaggtggccctcatgacactgacgctcttcccggtccggctcctggttgccgctgccatgatgctgctggcctggcccctcgcacttgtcgcatccctgggctctgcggagaaggaacccgagcagcccccggccctgtggaggaaggttgtggacttcctgctgaaggccatcatgcgcaccatgtggttcgccggcggcttccaccgggtggccgtgaaggggcggcaggcgctgcccaccgaggcggccatcctcacgctcgcgcctcactcgtcctacttcgacgccatccctgtgaccatgacgatgtcctccatcgtgatgaaggcagagagcagagacatcccgatctggggaactctgatccagtatatacggcctgtgttcgtgtcccggtcagaccaggattctcgcaggaaaacagtagaagaaatcaagagacgggcgcagtccaacggaaagtggccacagataatgatttttccagaaggaacttgtacaaacaggacctgcctaattaccttcaaacctggtgcattcatccctggagcgcccgtccagcctgtggttttacgatatccaaataaactggacaccatcacatggacgtggcaaggacctggagcgctggaaatcctgtggctcacgctgtgtcagtttcacaaccaagtggaaatcgagttccttcctgtgtacagcccttctgaggaggagaagaggaaccccgcgctgtatgccagcaacgtgcggcgagtcatggccgaggccttgggtgtctccgtgactgactacacgttcgaggactgccagctggccctggcggaaggacagctccgtctccccgctgacacttgccttttagaatttgccaggctcgtgcggggcctcgggctaaaaccagaaaagcttgaaaaagatctggacagatactcagaaagagccaggatgaagggaggagagaagataggtattgcggagtttgccgcctccctggaagtccccgtttctgacttgctggaagacatgttttcactgttcgacgagagcggcagcggcgaggtggacctgcgagagtgtgtggttgccctgtctgtcgtctgccggccggcccggaccctggacaccatccagctggctttcaagacgtacggagcgcaagaggacggcagcgtcggcgaaggtgacctgtcctgcatcctcaagacggccctgggggtggcagagctcaccgtgaccgacctattccgagccattgaccaagaggagaaggggaagatcacattcgctgacttccacaggtttgcagaaatgtaccctgccttcgcagaggaatacctgtacccggatcagacacatttcgaaagctgtgcagagacctcacctgcgccaatcccaaacggcttctgtgccgatttcagcccggaaaactcagacgctgggcggaagcctgttcgcaagaagctggattaggacccagggttgcggagagacgcggcccctcccgcgtggacatcaccgccatgagcctctttgcgagtgacctctgggctccgctcctcactcctgctgtacaggcactgtcttcagcccgagttccaggggcctcgggggctgtttgtatcttgttcctttgtgaagtgtgttgcagaaccgacgcttactgtgcgagaatcggagggcgcgcacgcggatcccccgcctggcctggaccccgtggggtcaggttccctgccgggcggggggcaccggtgccgccccgtgttctcccacggggccctggtttcgagtctctgtcacagcctcttccggcggcagcgtgcaccgggcgggcctccgtgcacactcagcacacgcctgccacacagcgtgcgcttgcgtgtcactctggcacgaaacctgtctgcctctgtggatccacagcctggcagagccgagccgtcacctgatttttcagtgtttctacctgtgtgctggagctcatgagtattttataaactccatttaggtacttcaggaaacatgcagcattttttaaaaaatgaaaattgtttttctacttcatttttccttttagagtcaaaggatatttatttataggcctttttttttttaatatagaatctgaggctgtttgggctttgacttaaatttccatcaggcctctctccagcaggtaatccctctccttccgctgggtcccctggggaggtgtgaactcaagggcctagccccaaaacactttttctgcttttcttaatccttttccagtcccctctttttttataaacgttggcagtttgatgtttctgtttcggcataacgtaatccatttcactgtagcctaaactccagtccgaggttggatattgttcaaatgagcagggcccgagctggaagcgcaaggcagccgccgccgtgccgctcctcccttgccctcaggccaggtccctgctggaagcggctgcatcttcctgtcagccctggtttccatggtgactggcgtgacgcagccacctgagtatggctgaccttcctgcagagagaggagccgcagtcttttgcttgtggaaggagacgctgggctgtgcggtgcggagggtgatgaggatgtctggtgacagccgtgcggacaccactcctctctgcagcactgcctcccagcgccagggtcgcgggcacatcccactgagagcgggggtcctgccccatcttagagtcaaaggcagaggggcttccaggccctggatggggtattttggtgtcacctgaagtccctctgacatcaccttgtttcatcattttttatgacagaattagaaacccatccttcaagcacaataatcatcacagacttgagtttgcttcctaaagcaaaggctccgggtttgtttggaaaatttttttgatttctgaaatgaattgatttttatatttggggcatctctatagaaagtgaccaccaaggccagtaagtacgggaaaaaatgtttactaacttcctcagagattcgtgatacgcgtttctccactgacagacatttaaaaacaaccttcagctccgtttcaatcaatcacctcgacttgttttttagcatggacactgccagcaggacagacagggatggagtaaaccgaagtcaatttcagggctcttggcgtgttggacacagaagaaatcctagtgcagcctttggtagctaacagtcactgattttataattggagaatgcgtaaagattcatttttcaaggagaagagcctgcaaatggccaatgaaggaggtaaataaactaagatattccgagggaagggacccaggccacctcccttccgcaggtctgcagatgaagggttttttgaatgaaatgccactgtgcattttcagaaaaaaaaatctctgataaacagactttgaatgg

SEQ ID NO: 427717 - DNA, 3903 bp, Homo sapiens
ggcccgctccagccgccgcgcatcctcggcccgcgccccgagacccgcgcccagctagccccggccccgctcggcgccccaggcagctcggctgcgctcgccgcgggacggcgcggccatgaggctgcggggatgcggaccccgggccgcccctgcctccagcgcaggggccagcgacgctcggctgctggcgcccccggggcggaaccccttcgtgcacgagctgcgcctcagcgccctgcagaaggcccaggtggccctcatgacactgacgctcttcccggtccggctcctggttgccgctgccatgatgctgctggcctggcccctcgcacttgtcgcatccctgggctctgcggagaaggaacccgagcagcccccggccctgtggaggaaggttgtggacttcctgctgaaggccatcatgcgcaccatgtggttcgccggcggcttccaccgggtggccgtgaaggggcggcaggcgctgcccaccgaggcggccatcctcacgctcgcgcctcactcgtcctacttcgacgccatccctgtgaccatgacgatgtcctccatcgtgatgaaggcagagagcagagacatcccgatctggggaactctgatccagtatatacggcctgtgttcgtgtcccggtcagaccaggattctcgcaggaaaacagtagaagaaatcaagagacgggcgcagtccaacggaaagtggccacagataatgatttttccagaaggaacttgtacaaacaggacctgcctaattaccttcaaacctggtgcattcatccctggagcgcccgtccagcctgtggttttacgatatccaaataaactggacaccatcacatggacgtggcaaggacctggagcgctggaaatcctgtggctcacgctgtgtcagtttcacaaccaagtggaaatcgagttccttcctgtgtacagcccttctgaggaggagaagaggaaccccgcgctgtatgccagcaacgtgcggcgagtcatggccgaggccttgggtgtctccgtgactgactacacgttcgaggactgccagctggccctggcggaaggacagctccgtctccccgctgacacttgccttttagaatttgccaggctcgtgcggggcctcgggctaaaaccagaaaagcttgaaaaagatctggacagatactcagaaagagccaggatgaagggaggagagaagataggtattgcggagtttgccgcctccctggaagtccccgtttctgacttgctggaagacatgttttcactgttcgacgagagcggcagcggcgaggtggacctgcgagagtgtgtggttgccctgtctgtcgtctgccggccggcccggaccctggacaccatccagctggctttcaagacgtacggagcgcaagaggacggcagcgtcggcgaaggtgacctgtcctgcatcctcaagacggccctgggggtggcagagctcaccgtgaccgacctattccgagccattgaccaagaggagaaggggaagatcacattcgctgacttccacaggtttgcagaaatgtaccctgccttcgcagaggaatacctgtacccggatcagacacatttcgaaagctgtgcagagacctcacctgcgccaatcccaaacggcttctgtgccgatttcagcccggaaaactcagacgctgggcggaagcctgttcgcaagaagctggattaggacccagggttgcggagagacgcggcccctcccgcgtggacatcaccgccatgagcctctttgcgagtgacctctgggctccgctcctcactcctgctgtacaggcactgtcttcagcccgagttccaggggcctcgggggctgtttgtatcttgttcctttgtgaagtgtgttgcagaaccgacgcttactgtgcgagaatcggagggcgcgcacgcggatcccccgcctggcctggaccccgtggggtcaggttccctgccgggcggggggcaccggtgccgccccgtgttctcccacggggccctggtttcgagtctctgtcacagcctcttccggcggcagcgtgcaccgggcgggcctccgtgcacactcagcacacgcctgccacacagcgtgcgcttgcgtgtcactctggcacgaaacctgtctgcctctgtggatccacagcctggcagagccgagccgtcacctgatttttcagtgtttctacctgtgtgctggagctcatgagtattttataaactccatttaggtacttcaggaaacatgcagcattttttaaaaaatgaaaattgtttttctacttcatttttccttttagagtcaaaggatatttatttataggcctttttttttttaatatagaatctgaggctgtttgggctttgacttaaatttccatcaggcctctctccagcaggtaatccctctccttccgctgggtcccctggggaggtgtgaactcaagggcctagccccaaaacactttttctgcttttcttaatccttttccagtcccctctttttttataaacgttggcagtttgatgtttctgtttcggcataacgtaatccatttcactgtagcctaaactccagtccgaggttggatattgttcaaatgagcagggcccgagctggaagcgcaaggcagccgccgccgtgccgctcctcccttgccctcaggccaggtccctgctggaagcggctgcatcttcctgtcagccctggtttccatggtgactggcgtgacgcagccacctgagtatggctgaccttcctgcagagagaggagccgcagtcttttgcttgtggaaggagacgctgggctgtgcggtgcggagggtgatgaggatgtctggtgacagccgtgcggacaccactcctctctgcagcactgcctcccagcgccagggtcgcgggcacatcccactgagagcgggggtcctgccccatcttagagtcaaaggcagaggggcttccaggccctggatggggtattttggtgtcacctgaagtccctctgacatcaccttgtttcatcattttttatgacagaattagaaacccatccttcaagcacaataatcatcacagacttgagtttgcttcctaaagcaaaggctccgggtttgtttggaaaatttttttgatttctgaaatgaattgatttttatatttggggcatctctatagaaagtgaccaccaaggccagtaagtacgggaaaaaatgtttactaacttcctcagagattcgtgatacgcgtttctccactgacagacatttaaaaacaaccttcagctccgtttcaatcaatcacctcgacttgttttttagcatggacactgccagcaggacagacagggatggagtaaaccgaagtcaatttcagggctcttggcgtgttggacacagaagaaatcctagtgcagcctttggtagctaacagtcactgattttataattggagaatgcgtaaagattcatttttcaaggagaagagcctgcaaatggccaatgaaggaggtaaataaactaagatattccgagggaagggacccaggccacctcccttccgcaggtctgcagatgaagggttttttgaatgaaatgccactgtgcattttcagaaaaaaaaatctctgataaacagactttgaatggatgtttgttcctcctgattctcttttctcttcgtggcgacttagagttggcggatattcggaactgtgaatgtacatagcgttgagttaaaccccttgtgtgtgagacaggacgcagcgggcccctggtggcgcggggacctgctggggtgtgagggcagagggagggttgccatgaaggaacttgggattttcaatggaataaataaaacataaagtctatacttgggaa

SEQ ID NO: 427718 - DNA, 4132 bp, Homo sapiens
ggcccgctccagccgccgcgcatcctcggcccgcgccccgagacccgcgcccagctagccccggccccgctcggcgccccaggcagctcggctgcgctcgccgcgggacggcgcggccatgaggctgcggggatgcggaccccgggccgcccctgcctccagcgcaggggccagcgacgctcggctgctggcgcccccggggcggaaccccttcgtgcacgagctgcgcctcagcgccctgcagaaggcccaggtggccctcatgacactgacgctcttcccggtccggctcctggttgccgctgccatgatgctgctggcctggcccctcgcacttgtcgcatccctgggctctgcggagaaggaacccgagcagcccccggccctgtggaggaaggttgtggacttcctgctgaaggccatcatgcgcaccatgtggttcgccggcggcttccaccgggtggccgtgaaggggcggcaggcgctgcccaccgaggcggccatcctcacgctcgcgcctcactcgtcctacttcgacgccatccctgtgaccatgacgatgtcctccatcgtgatgaaggcagagagcagagacatcccgatctggggaactctgatccagtatatacggcctgtgttcgtgtcccggtcagaccaggattctcgcaggaaaacagtagaagaaatcaagagacgggcgcagtccaacggaaagtggccacagataatgatttttccagaaggaacttgtacaaacaggacctgcctaattaccttcaaacctggtgcattcatccctggagcgcccgtccagcctgtggttttacgatatccaaataaactggacaccatcacatggacgtggcaaggacctggagcgctggaaatcctgtggctcacgctgtgtcagtttcacaaccaagtggaaatcgagttccttcctgtgtacagcccttctgaggaggagaagaggaaccccgcgctgtatgccagcaacgtgcggcgagtcatggccgaggccttgggtgtctccgtgactgactacacgttcgaggactgccagctggccctggcggaaggacagctccgtctccccgctgacacttgccttttagaatttgccaggctcgtgcggggcctcgggctaaaaccagaaaagcttgaaaaagatctggacagatactcagaaagagccaggatgaagggaggagagaagataggtattgcggagtttgccgcctccctggaagtccccgtttctgacttgctggaagacatgttttcactgttcgacgagagcggcagcggcgaggtggacctgcgagagtgtgtggttgccctgtctgtcgtctgccggccggcccggaccctggacaccatccagctggctttcaagacgtacggagcgcaagaggacggcagcgtcggcgaaggtgacctgtcctgcatcctcaagacggccctgggggtggcagagctcaccgtgaccgacctattccgagccattgaccaagaggagaaggggaagatcacattcgctgacttccacaggtttgcagaaatgtaccctgccttcgcagaggaatacctgtacccggatcagacacatttcgaaagctgtgcagagacctcacctgcgccaatcccaaacggcttctgtgccgatttcagcccggaaaactcagacgctgggcggaagcctgttcgcaagaagctggattaggacccagggttgcggagagacgcggcccctcccgcgtggacatcaccgccatgagcctctttgcgagtgacctctgggctccgctcctcactcctgctgtacaggcactgtcttcagcccgagttccaggggcctcgggggctgtttgtatcttgttcctttgtgaagtgtgttgcagaaccgacgcttactgtgcgagaatcggagggcgcgcacgcggatcccccgcctggcctggaccccgtggggtcaggttccctgccgggcggggggcaccggtgccgccccgtgttctcccacggggccctggtttcgagtctctgtcacagcctcttccggcggcagcgtgcaccgggcgggcctccgtgcacactcagcacacgcctgccacacagcgtgcgcttgcgtgtcactctggcacgaaacctgtctgcctctgtggatccacagcctggcagagccgagccgtcacctgatttttcagtgtttctacctgtgtgctggagctcatgagtattttataaactccatttaggtacttcaggaaacatgcagcattttttaaaaaatgaaaattgtttttctacttcatttttccttttagagtcaaaggatatttatttataggcctttttttttttaatatagaatctgaggctgtttgggctttgacttaaatttccatcaggcctctctccagcaggtaatccctctccttccgctgggtcccctggggaggtgtgaactcaagggcctagccccaaaacactttttctgcttttcttaatccttttccagtcccctctttttttataaacgttggcagtttgatgtttctgtttcggcataacgtaatccatttcactgtagcctaaactccagtccgaggttggatattgttcaaatgagcagggcccgagctggaagcgcaaggcagccgccgccgtgccgctcctcccttgccctcaggccaggtccctgctggaagcggctgcatcttcctgtcagccctggtttccatggtgactggcgtgacgcagccacctgagtatggctgaccttcctgcagagagaggagccgcagtcttttgcttgtggaaggagacgctgggctgtgcggtgcggagggtgatgaggatgtctggtgacagccgtgcggacaccactcctctctgcagcactgcctcccagcgccagggtcgcgggcacatcccactgagagcgggggtcctgccccatcttagagtcaaaggcagaggggcttccaggccctggatggggtattttggtgtcacctgaagtccctctgacatcaccttgtttcatcattttttatgacagaattagaaacccatccttcaagcacaataatcatcacagacttgagtttgcttcctaaagcaaaggctccgggtttgtttggaaaatttttttgatttctgaaatgaattgatttttatatttggggcatctctatagaaagtgaccaccaaggccagtaagtacgggaaaaaatgtttactaacttcctcagagattcgtgatacgcgtttctccactgacagacatttaaaaacaaccttcagctccgtttcaatcaatcacctcgacttgttttttagcatggacactgccagcaggacagacagggatggagtaaaccgaagtcaatttcagggctcttggcgtgttggacacagaagaaatcctagtgcagcctttggtagctaacagtcactgattttataattggagaatgcgtaaagattcatttttcaaggagaagagcctgcaaatggccaatgaaggaggtaaataaactaagatattccgagggaagggacccaggccacctcccttccgcaggtctgcagatgaagggttttttgaatgaaatgccactgtgcattttcagaaaaaaaaatctctgataaacagactttgaatggatgtttgttcctcctgattctcttttctcttcgtggcgacttagagttggcggatattcggaactgtgaatgtacatagcgttgagttaaacccctagccccaaaacactttttctgcttttcttaatccttttccagtcccctctttttttataaacgttggcagtttgatgtttctgtttcggcataacgtaatccatttcactgtagcctaaactccagtccgaggttggatattgttcaaatgagcagggcccgagctggaagcgcaaggcagccgccgccgtgccgctcctcccttgccctcaggccaggtccctgctggaagcggctgcatcttcctgtcagccctggtttccacgcggggacctgctggggtgtgagggcagagggagggttgccatgaaggaacttgggattttcaatggaataaataaaacataaagtctatacttgggaa

SEQ ID NO: 427719 - DNA, 3875 bp, Homo sapiens
ggcccgctccagccgccgcgcatcctcggcccgcgccccgagacccgcgcccagctagccccggccccgctcggcgccccaggcagctcggctgcgctcgccgcgggacggcgcggccatgaggctgcggggatgcggaccccgggccgcccctgcctccagcgcaggggccagcgacgctcggctgctggcgcccccggggcggaaccccttcgtgcacgagctgcgcctcagcgccctgcagaaggcccaggtggccctcatgacactgacgctcttcccggtccggctcctggttgccgctgccatgatgctgctggcctggcccctcgcacttgtcgcatccctgggctctgcggagaaggaacccgagcagcccccggccctgtggaggaaggttgtggacttcctgctgaaggccatcatgcgcaccatgtggttcgccggcggcttccaccgggtggccgtgaaggggcggcaggcgctgcccaccgaggcggccatcctcacgctcgcgcctcactcgtcctacttcgacgccatccctgtgaccatgacgatgtcctccatcgtgatgaaggcagagagcagagacatcccgatctggggaactctgatccagtatatacggcctgtgttcgtgtcccggtcagaccaggattctcgcaggaaaacagtagaagaaatcaagagacgggcgcagtccaacggaaagtggccacagataatgatttttccagaaggaacttgtacaaacaggacctgcctaattaccttcaaacctggtgcattcatccctggagcgcccgtccagcctgtggttttacgatatccaaataaactggacaccatcacatggacgtggcaaggacctggagcgctggaaatcctgtggctcacgctgtgtcagtttcacaaccaagtggaaatcgagttccttcctgtgtacagcccttctgaggaggagaagaggaaccccgcgctgtatgccagcaacgtgcggcgagtcatggccgaggccttgggtgtctccgtgactgactacacgttcgaggactgccagctggccctggcggaaggacagctccgtctccccgctgacacttgccttttagaatttgccaggctcgtgcggggcctcgggctaaaaccagaaaagcttgaaaaagatctggacagatactcagaaagagccaggatgaagggaggagagaagataggtattgcggagtttgccgcctccctggaagtccccgtttctgacttgctggaagacatgttttcactgttcgacgagagcggcagcggcgaggtggacctgcgagagtgtgtggttgccctgtctgtcgtctgccggccggcccggaccctggacaccatccagctggctttcaagacgtacggagcgcaagaggacggcagcgtcggcgaaggtgacctgtcctgcatcctcaagacggccctgggggtggcagagctcaccgtgaccgacctattccgagccattgaccaagaggagaaggggaagatcacattcgctgacttccacaggtttgcagaaatgtaccctgccttcgcagaggaatacctgtacccggatcagacacatttcgaaagctgtgcagagacctcacctgcgccaatcccaaacggcttctgtgccgatttcagcccggaaaactcagacgctgggcggaagcctgttcgcaagaagctggattaggacccagggttgcggagagacgcggcccctcccgcgtggacatcaccgccatgagcctctttgcgagtgacctctgggctccgctcctcactcctgctgtacaggcactgtcttcagcccgagttccaggggcctcgggggctgtttgtatcttgttcctttgtgaagtgtgttgcagaaccgacgcttactgtgcgagaatcggagggcgcgcacgcggatcccccgcctggcctggaccccgtggggtcaggttccctgccgggcggggggcaccggtgccgccccgtgttctcccacggggccctggtttcgagtctctgtcacagcctcttccggcggcagcgtgcaccgggcgggcctccgtgcacactcagcacacgcctgccacacagcgtgcgcttgcgtgtcactctggcacgaaacctgtctgcctctgtggatccacagcctggcagagccgagccgtcacctgatttttcagtgtttctacctgtgtgctggagctcatgagtattttataaactccatttaggtacttcaggaaacatgcagcattttttaaaaaatgaaaattgtttttctacttcatttttccttttagagtcaaaggatatttatttataggcctttttttttttaatatagaatctgaggctgtttgggctttgacttaaatttccatcaggcctctctccagcaggtaatccctctccttccgctgggtcccctggggaggtgtgaactcaagggcctagccccaaaacactttttctgcttttcttaatccttttccagtcccctctttttttataaacgttggcagtttgatgtttctgtttcggcataacgtaatccatttcactgtagcctaaactccagtccgaggttggatattgttcaaatgagcagggcccgagctggaagcgcaaggcagccgccgccgtgccgctcctcccttgccctcaggccaggtccctgctggaagcggctgcatcttcctgtcagccctggtttccatggtgactggcgtgacgcagccacctgagtatggctgaccttcctgcagagagaggagccgcagtcttttgcttgtggaaggagacgctgggctgtgcggtgcggagggtgatgaggatgtctggtgacagccgtgcggacaccactcctctctgcagcactgcctcccagcgccagggtcgcgggcacatcccactgagagcgggggtcctgccccatcttagagtcaaaggcagaggggcttccaggccctggatggggtattttggtgtcacctgaagtccctctgacatcaccttgtttcatcattttttatgacagaattagaaacccatccttcaagcacaataatcatcacagacttgagtttgcttcctaaagcaaaggctccgggtttgtttggaaaatttttttgatttctgaaatgaattgatttttatatttggggcatctctatagaaagtgaccaccaaggccagtaagtacgggaaaaaatgtttactaacttcctcagagattcgtgatacgcgtttctccactgacagacatttaaaaacaaccttcagctccgtttcaatcaatcacctcgacttgttttttagcatggacactgccagcaggacagacagggatggagtaaaccgaagtcaatttcagggctcttggcgtgttggacacagaagaaatcctagtgcagcctttggtagctaacagtcactgattttataattggagaatgcgtaaagattcatttttcaaggagaagagcctgcaaatggccaatgaagggttttttgaatgaaatgccactgtgcattttcagaaaaaaaaatctctgataaacagactttgaatggatgtttgttcctcctgattctcttttctcttcgtggcgacttagagttggcggatattcggaactgtgaatgtacatagcgttgagttaaaccccttgtgtgtgagacaggacgcagcgggcccctggtggcctgggggccagacccgtgggcaggtggggcatgggccctggcctgcggggacctgctggggtgtgagggcagagggagggttgccatgaaggaacttgggattttcaatggaataaataaaacataaagtctatacttgggaa

SEQ ID NO: 427720 - DNA, 3584 bp, Homo sapiens
ggcccgctccagccgccgcgcatcctcggcccgcgccccgagacccgcgcccagctagccccggccccgctcggcgccccaggcagctcggctgcgctcgccgcgggacggcgcggccatgaggctgcggggatgcggaccccgggccgcccctgcctccagcgcaggggccagcgacgctcggctgctggcgcccccggggcggaaccccttcgtgcacgagctgcgcctcagcgccctgcagaaggcccaggtggccctcatgacactgacgctcttcccggtccggctcctggttgccgctgccatgatgctgctggcctggcccctcgcacttgtcgcatccctgggctctgcggagaaggaacccgagcagcccccggccctgtggaggaaggttgtggacttcctgctgaaggccatcatgcgcaccatgtggttcgccggcggcttccaccgggtggccgtgaaggggcggcaggcgctgcccaccgaggcggccatcctcacgctcgcgcctcactcgtcctacttcgacgccatccctgtgaccatgacgatgtcctccatcgtgatgaaggcagagagcagagacatcccgatctggggaactctgatccagtatatacggcctgtgttcgtgtcccggtcagaccaggattctcgcaggaaaacagtagaagaaatcaagagacgggcgcagtccaacggaaagtggccacagataatgatttttccagaaggaacttgtacaaacaggacctgcctaattaccttcaaacctggtgcattcatccctggagcgcccgtccagcctgtggttttacgatatccaaataaactggacaccatcacatggacgtggcaaggacctggagcgctggaaatcctgtggctcacgctgtgtcagtttcacaaccaagtggaaatcgagttccttcctgtgtacagcccttctgaggaggagaagaggaaccccgcgctgtatgccagcaacgtgcggcgagtcatggccgaggccttgggtgtctccgtgactgactacacgttcgaggactgccagctggccctggcggaaggacagctccgtctccccgctgacacttgccttttagaatttgccaggctcgtgcggggcctcgggctaaaaccagaaaagcttgaaaaagatctggacagatactcagaaagagccaggatgaagggaggagagaagataggtattgcggagtttgccgcctccctggaagtccccgtttctgacttgctggaagacatgttttcactgttcgacgagagcggcagcggcgaggtggacctgcgagagtgtgtggttgccctgtctgtcgtctgccggccggcccggaccctggacaccatccagctggctttcaagacgtacggagcgcaagaggacggcagcgtcggcgaaggtgacctgtcctgcatcctcaagacggccctgggggtggcagagctcaccgtgaccgacctattccgagccattgaccaagaggagaaggggaagatcacattcgctgacttccacaggtttgcagaaatgtaccctgccttcgcagaggaatacctgtacccggatcagacacatttcgaaagctgtgcagagacctcacctgcgccaatcccaaacggcttctgtgccgatttcagcccggaaaactcagacgctgggcggaagcctgttcgcaagaagctggattaggacccagggttgcggagagacgcggcccctcccgcgtggacatcaccgccatgagcctctttgcgagtgacctctgggctccgctcctcactcctgctgtacaggcactgtcttcagcccgagttccaggggcctcgggggctgtttgtatcttgttcctttgtgaagtgtgttgcagaaccgacgcttactgtgcgagaatcggagggcgcgcacgcggatcccccgcctggcctggaccccgtggggtcaggttccctgccgggcggggggcaccggtgccgccccgtgttctcccacggggccctggtttcgagtctctgtcacagcctcttccggcggcagcgtgcaccgggcgggcctccgtgcacactcagcacacgcctgccacacagcgtgcgcttgcgtgtcactctggcacgaaacctgtctgcctctgtggatccacagcctggcagagccgagccgtcacctgatttttcagtgtttctacctgtgtgctggagctcatgagtattttataaactccatttaggtacttcaggaaacatgcagcattttttaaaaaatgaaaattgtttttctacttcatttttccttttagagtcaaaggatatttatttataggcctttttttttttaatatagaatctgaggctgtttgggctttgacttaaatttccatcaggcctctctccagcaggtaatccctctccttccgctgggtcccctggggaggtgtgaactcaagggcctagccccaaaacactttttctgcttttcttaatccttttccagtcccctctttttttataaacgttggcagtttgatgtttctgtttcggcataacgtaatccatttcactgtagcctaaactccagtccgaggttggatattgttcaaatgagcagggcccgagctggaagcgcaaggcagccgccgccgtgccgctcctcccttgccctcaggccaggtccctgctggaagcggctgcatcttcctgtcagccctggtttccatggtgactggcgtgacgcagccacctgagtatggctgaccttcctgcagagagaggagccgcagtcttttgcttgtggaaggagacgctgggctgtgcggtgcggagggtgatgaggatgtctggtgacagccgtgcggacaccactcctctctgcagcactgcctcccagcgccagggtcgcgggcacatcccactgagagcgggggtcctgccccatcttagagtcaaaggcagaggggcttccaggccctggatggggtattttggtgtcacctgaagtccctctgacatcaccttgtttcatcattttttatgacagaattagaaacccatccttcaagcacaataatcatcacagacttgagtttgcttcctaaagcaaaggctccgggtttgtttggaaaatttttttgatttctgaaatgaattgatttttatatttggggcatctctatagaaagtgaccaccaaggccagtaagtacgggaaaaaatgtttactaacttcctcagagattcgtgatacgcgtttctccactgacagacatttaaaaacaaccttcagctccgtttcaatcaatcacctcgacttgttttttagcatggacactgccagcaggacagacagggatggagtaaaccgaagtcaatttcagggctcttggcgtgttggacacagaagaaatcctagtgcagcctttggtagctaacagtcactgattttataattggagaatgcgtaaagattcatttcagggaaagctgggatggcatgaggggtatacagaattcgggagggcccggcccccctcgcggttggaggaggggttgacaagcccc

SEQ ID NO: 427721 - DNA, 3409 bp, Homo sapiens
ggcccgctccagccgccgcgcatcctcggcccgcgccccgagacccgcgcccagctagccccggccccgctcggcgccccaggcagctcggctgcgctcgccgcgggacggcgcggccatgaggctgcggggatgcggaccccgggccgcccctgcctccagcgcaggggccagcgacgctcggctgctggcgcccccggggcggaaccccttcgtgcacgagctgcgcctcagcgccctgcagaaggcccaggtggccctcatgacactgacgctcttcccggtccggctcctggttgccgctgccatgatgctgctggcctggcccctcgcacttgtcgcatccctgggctctgcggagaaggaacccgagcagcccccggccctgtggaggaaggttgtggacttcctgctgaaggccatcatgcgcaccatgtggttcgccggcggcttccaccgggtggccgtgaaggggcggcaggcgctgcccaccgaggcggccatcctcacgctcgcgcctcactcgtcctacttcgacgccatccctgtgaccatgacgatgtcctccatcgtgatgaaggcagagagcagagacatcccgatctggggaactctgatccagtatatacggcctgtgttcgtgtcccggtcagaccaggattctcgcaggaaaacagtagaagaaatcaagagacgggcgcagtccaacggaaagtggccacagataatgatttttccagaaggaacttgtacaaacaggacctgcctaattaccttcaaacctggtgcattcatccctggagcgcccgtccagcctgtggttttacgatatccaaataaactggacaccatcacatggacgtggcaaggacctggagcgctggaaatcctgtggctcacgctgtgtcagtttcacaaccaagtggaaatcgagttccttcctgtgtacagcccttctgaggaggagaagaggaaccccgcgctgtatgccagcaacgtgcggcgagtcatggccgaggccttgggtgtctccgtgactgactacacgttcgaggactgccagctggccctggcggaaggacagctccgtctccccgctgacacttgccttttagaatttgccaggctcgtgcggggcctcgggctaaaaccagaaaagcttgaaaaagatctggacagatactcagaaagagccaggatgaagggaggagagaagataggtattgcggagtttgccgcctccctggaagtccccgtttctgacttgctggaagacatgttttcactgttcgacgagagcggcagcggcgaggtggacctgcgagagtgtgtggttgccctgtctgtcgtctgccggccggcccggaccctggacaccatccagctggctttcaagacgtacggagcgcaagaggacggcagcgtcggcgaaggtgacctgtcctgcatcctcaagacggccctgggggtggcagagctcaccgtgaccgacctattccgagccattgaccaagaggagaaggggaagatcacattcgctgacttccacaggtttgcagaaatgtaccctgccttcgcagaggaatacctgtacccggatcagacacatttcgaaagctgtgcagagacctcacctgcgccaatcccaaacggcttctgtgccgatttcagcccggaaaactcagacgctgggcggaagcctgttcgcaagaagctggattaggacccagggttgcggagagacgcggcccctcccgcgtggacatcaccgccatgagcctctttgcgagtgacctctgggctccgctcctcactcctgctgtacaggcactgtcttcagcccgagttccaggggcctcgggggctgtttgtatcttgttcctttgtgaagtgtgttgcagaaccgacgcttactgtgcgagaatcggagggcgcgcacgcggatcccccgcctggcctggaccccgtggggtcaggttccctgccgggcggggggcaccggtgccgccccgtgttctcccacggggccctggtttcgagtctctgtcacagcctcttccggcggcagcgtgcaccgggcgggcctccgtgcacactcagcacacgcctgccacacagcgtgcgcttgcgtgtcactctggcacgaaacctgtctgcctctgtggatccacagcctggcagagccgagccgtcacctgatttttcagtgtttctacctgtgtgctggagctcatgagtattttataaactccatttaggtacttcaggaaacatgcagcattttttaaaaaatgaaaattgtttttctacttcatttttccttttagagtcaaaggatatttatttataggcctttttttttttaatatagaatctgaggctgtttgggctttgacttaaatttccatcaggcctctctccagcaggtaatccctctccttccgctgggtcccctggggaggtgtgaactcaagggcctagccccaaaacactttttctgcttttcttaatccttttccagtcccctctttttttataaacgttggcagtttgatgtttctgtttcggcataacgtaatccatttcactgtagcctaaactccagtccgaggttggatattgttcaaatgagcagggcccgagctggaagcgcaaggcagccgccgccgtgccgctcctcccttgccctcaggccaggtccctgctggaagcggctgcatcttcctgtcagccctggtttccatggtgactggcgtgacgcagccacctgagtatggctgaccttcctgcagagagaggagccgcagtcttttgcttgtggaaggagacgctgggctgtgcggtgcggagggtgatgaggatgtctggtgacagccgtgcggacaccactcctctctgcagcactgcctcccagcgccagggtcgcgggcacatcccactgagagcgggggtcctgccccatcttagagtcaaaggcagaggggcttccaggccctggatggggtattttggtgtcacctgaagtccctctgacatcaccttgtttcatcattttttatgacagaattagaaacccatccttcaagcacaataatcatcacagacttgagtttgcttcctaaagcaaaggctccgggtttgtttggaaaatttttttgatttctgaaatgaattgatttttatatttggggcatctctatagaaagtgaccaccaaggccagtaagtacgggaaaaaatgtttactaacttcctcagagattcgtgatacgcgtttctccactgacagacatttaaaaacaaccttcagtccgttccatcactcctcgcctggttttagctgggctggccgcggacgccggggggggaccggccctcggcctgggtgggccagaactgggcctgggcag

SEQ ID NO: 427722 - DNA, 798 bp, Homo sapiens
ggcccgctccagccgccgcgcatcctcggcccgcgccccgagacccgcgcccagctagccccggccccgctcggcgccccaggcagctcggctgcgctcgccgcgggacggcgcggccatgaggctgcggggatgcggaccccgggccgcccctgcctccagcgcaggggccagcgacgctcggctgctggcgcccccggggcggaaccccttcgtgcacgagctgcgcctcagcgccctgcagaaggcccaggtggccctcatgacactgacgctcttcccggtccggctcctggttgccgctgccatgatgctgctggcctggcccctcgcacttgtcgcatccctgggctctgcggagaaggaacccgagcagcccccggccctgtggaggaaggttgtggacttcctgctgaaggccatcatgcgcaccatgtggttcgccggcggcttccaccgggtggccgtgaaggggcggcaggcgctgcccaccgaggcggccatcctcacgctcgcgcctcactcgtcctacttcgacgccatccctgtgaccatgacgatgtcctccatcgtgatgaaggcagagagcagagacatcccgatctggggaactctgatccagtatatacggcctgtgttcgtgtcccggtcagaccaggattctcgcaggaaaacagtagaagaaatcaagagacgggcgcagtccaacggaaagtggccacagataatgatttttccagaaggaacttgtacaaacagatgcgccttcgtgcgcttcggggatcctctagtacaggc

SEQ ID NO: 427723 - DNA, 717 bp, Homo sapiens
tcaaaagtgttcagaaacaaatatacagcctttaagtggaaatagagctatctggtactatttttaaaaaattctaaccatcaagaaacaaaagttcaggattttcttctcttatggaacttttatttgaaaggaaagtatagaaaagttggtctcactttccagtggacaaattcaccatatcgtcctgatctgtaccatatgaatgttaagaatatagattaagttatctttttccttgattaaggacaccagtcaattatatggatttcccaggactggtatatgtctgatagtcactggcatggctgtatctgttgttaaatgtggagagacttctgtattgggtagtccatagctgctaattggagccccaggtaatccctgactgacctggttcattccgctgtacccccttgatctggcaactaaagggttaacagctggaggcttctgggatccagcttgagctggtggttaagtacactgaacatcagccctggacctctgcagtgccacttattgttcctaaaattctagattaaggcaaaccctttttggttgtcaagaacatagtgctgtctccaaggaacagcttagtcggtcccaccagaagcatctgttgggagcaggttgggcaccaacccttgcaggactttgggatttgggacaatgtagatttgtgtgagtgcacattaagtctcattgcaaaataga

SEQ ID NO: 427724 - DNA, 800 bp, Homo sapiens
gtggagacagtcagagaagggggctcccggggccctccccagggaactggccctgggcccagaccagatggaggaccccgaaaagaacagggcagttttcaggtttggttggtggcctccagtctcttgtcctcaacgagggttttggcagctccctctcagtggcctctccgctctgcaccgaaggggatgggtccgacccagcctggcatcatcacagcctcgagtggcgtccagcctgccccgctccaccagtggctgctggagaagaacccgagcctggctgtgagccgtgagctttgaggcggtgggatgtgtcagcagaatgtctcctgcccccgagagcgaccccgaggccactgagaagagcagcgcggcctggccggcccgaacgcctgcgtctcagtagctgggagccacgggcccacgcccgcccaccggccgcagtgatgttctagccacagaggagccaagacctcaggtttccagagacttgggatttgcacggcagcagagtcaccgtggagaggccagggtatcacaaacttatggattttgacaagaaaggagggaaaggggagacggaggagggccggagaatgtccaaggccggcgggggccggagcagccacggcatccggagctcggggaccagctcgggggtcctgatggtgggccccaacttccgcgtcggcaagaagatcggctgcggcaacttcggggagctccgcctaggttggtttcagcgttgctggggcaaggctgagggtaaacatgagcgactccaaggccagggagcc

SEQ ID NO: 427725 - DNA, 428 bp, Homo sapiens
ggcagcagggagcatgtacgttggagcctgtctgggaggggaaggagctcagccacttccattagttgttacattgcttgcatgtgagtcacgactgtggaaactccgagatggaccagacagtctgtgtttagggaacttttcaggtttggttggtggcctccagtctcttgtcctcaacgagggttttggcagctccctctcagtggcctgtgagtgtccccactcccttgtctgggaaagggctggagctctggggctcacagagagggtgggtgtgatgtctttttcctgacgtggcatcggggtgtcttacctgcccggacacctgcctgcgcagggtagcacagaccctacaggctgcggctgagcccccagcacccacctgccatcgacagacgcccgccatcgggtcctctaagcagcca

SEQ ID NO: 427726 - DNA, 2941 bp, Homo sapiens
tggggcgcgtatggctgccgccccccgctggcagacgctggcggcgtaaggcgcgcgggccccggagcgggcgcggcggagcgcggcgagcccggcgcctcccgtcccgaacatgcggaggccggcccaggcggcgcgggagccggagcgggggcccaagcgggcaccggagccggagcgcgagggggcgcggggcccggagcgggggtccgcgctgcgctgctgaggccgggccggccgcccagacgctgcccgcgggcccggccacggcggagccaagctgtgagccgtgagctttgaggcggtgggatgtgtcagcagaatgtctcctgcccccgagagcgaccccgaggccactgagaagagcagcgcggcctggccggcccgaacgcctgcgtctcagtagctgggagccacgggcccacgcccgcccaccggccgcagtgatgttctagccacagaggagccaagacctcaggtttccagagacttgggatttgcacggcagcagagtcaccgtggagaggccagggtatcacaaacttatggattttgacaagaaaggagggaaaggggagacggaggagggccggagaatgtccaaggccggcgggggccggagcagccacggcatccggagctcggggaccagctcgggggtcctgatggtgggccccaacttccgcgtcggcaagaagatcggctgcggcaacttcggggagctccgcctaggaaagaatctctatacaaatgaatacgtggctatcaaattggagccgatcaagtcccgggccccgcagctgcacctggagtaccggttctacaagcagctcagcgccacagagggcgtccctcaggtctactacttcggtccgtgcgggaagtacaacgccatggtgctggagctgctggggcccagcctggaggacctgttcgacctgtgcgaccggaccttcacgctcaagacggtgctgatgatcgccatccagctgatcacgcgcatggagtatgtgcacaccaagagcctaatctaccgggacgtgaagcccgagaacttcctggtgggccgcccggggaccaagcggcagcatgccatccacatcatcgacttcgggctggccaaggagtacatcgaccccgagaccaagaagcacatcccgtaccgcgagcacaagagcctgacgggcacggcgcgctacatgagcatcaacacgcacctgggcaaggagcagagccgccgcgacgacctggaggcgctgggccacatgttcatgtacttcctgcgcggcagcctcccctggcaggggctcaaggccgacacgctcaaggagcggtaccagaagatcggggacaccaaacgcgccacgcccatcgaggtgctctgcgagaacttcccagaggagatggccacgtacctgcgctatgtgcggcgcctggacttcttcgagaagcccgactatgactacctgcggaagctcttcaccgacctcttcgaccgcagtggcttcgtgttcgactatgagtacgactgggccgggaagcccctgccgacccccatcggcaccgtccacaccgacctgccctcccagcctcagctccgggacaaaacccagccgcacagcaaaaaccaggcgttgaactccaccaacggggagctgaatgcggacgaccccacggccggccactccaacgccccgatcacagcgcctgcagaggtggaggtggccgatgaaaccaaatgctgctgtttcttcaagaggagaaagagaaaatcgctgcagcgacacaagtgaccctgggcgcgtgcagccccctgaatcttctccgtgcagccccttggggcgcgaccttgtgcgaggccctcggggcccacccacagcggcccagggccagaccctggctggaagccagaacgcagactgcaggggccgcgcctggctcaggcggccccacccccgggacgtggggtcacttccttcatgtaagactttggccgaaatttctacacctgtgtctagtcctcccctccaagagcattaactatttaaaacaaggaaaagaggaaaaaaaaaacagaggcccgccctaccccactcctgcccctccgtttctttgctgaagtgagtagtgtgatcctggaggccccccggcctggccccgccccgccagccgcccccgttagcgtcataaagtccagcttgtctccctcgatccaaaggccgttttctcgaggggagggcaggcccggcctggaggggtgctgtggagctgtcttgcccaggccctcctgggagggggacaggcattgttgccaggggtgaggccgtgccccaggcctccccgaaaccaaaggggaaggcaggggtggggccgtggctgaagccggctccccaaccaaaatgctgcaccaaagctcgggcgccgcgggcacggctgctgcagtctcttcccagcctggccctggcaaggggcgggtgggcgctgccaggcgggtgcttctcgacgcacttgctcccggaggctgcgccccggcgcctggaacccgaggtgggaggaccggttggtgtcaccctgctcggccctcagccctgccgcgtggggcgcgtgggcacggagcttcctgcctctctgctccgacacccggcaagcagccggagacaaaacgccttaaagcccccggcccagccctgcaggtatattgcaggggcctgggggcggccctggactggcgggcggttccccagtggggtgccctggaggctgccgggcagagtggagcagcttggggccgtgcccagggcggtggctgtgagtctagtttttgctttaccaagtgtacagaaatggcatttacgtttctctgatgctcccttgaagccatagaatttaggggcttttttaaaaaaataaaagaaaaatgaaaccaaaaacaaacgaacag

SEQ ID NO: 427727 - DNA, 3947 bp, Homo sapiens
tggggcgcgtatggctgccgccccccgctggcagacgctggcggcgtaaggcgcgcgggccccggagcgggcgcggcggagcgcggcgagcccggcgcctcccgtcccgaacatgcggaggccggcccaggcggcgcgggagccggagcgggggcccaagcgggcaccggagccggagcgcgagggggcgcggggcccggagcgggggtccgcgctgcgctgctgaggccgggccggccgcccagacgctgcccgcgggcccggccacggcggagccaagctgtgagccgtgagctttgaggcggtgggatgtgtcagcagaatgtctcctgcccccgagagcgaccccgaggccactgagaagagcagcgcggcctggccggcccgaacgcctgcgtctcagtagctgggagccacgggcccacgcccgcccaccggccgcagtgatgttctagccacagaggagccaagacctcaggtttccagagacttgggatttgcacggcagcagagtcaccgtggagaggccagggtatcacaaacttatggattttgacaagaaaggagggaaaggggagacggaggagggccggagaatgtccaaggccggcgggggccggagcagccacggcatccggagctcggggaccagctcgggggtcctgatggtgggccccaacttccgcgtcggcaagaagatcggctgcggcaacttcggggagctccgcctagtgcagagtagaagagccgggaaggaccccatcaccatcagatgcatcagagcttcaaaggcccgcccatcaagacgctgccaagagcatgaggccagccaggctggggaggacgttggcgagcatccgcctgcccgtcagggagccacagctggatgatacatcgacagacagcagagggacggtgtagcacacaggcgagggcttgtcctcctcagcctgggggagcgcagctcagtgcttggtggtcagcacgtgactgacactttgccggagaaggggacggctgcccgcaggaagagctacacagccgtgttcgccggaactccgctctggagagtcagaactggagacgggagggcgtgcctcaagggcagatgggcaaaccaaaccccatcctccctgtgagccgcggcacagcaccaggcgggcacacgcagcacgacacggcgaggagcccaccgcaggggcagccttttgggcggggaaggggggatgaatccactgtgaatcccacctccgaagggcagcgcaggaaggacacgcaaatgctggactgaacctgcagctgattcagggggcagtgtcctgagctctaaaacttcaaacctggggcagtgtcctgagctctaaaacttcgaaatctgaccaggcacagtggctcacgcctgtaatcccaacactttgggaggctgatgtgggcggatcacctgacgtcaggagttcgagaccagcctggacaacatggagaaagcccatctctagtaaaaatacaaaaattagccaggttgatggtgcctgcctgtaattccagctactcaggaggctgaggcaggagaatcgcttgaacccaggaggcagaggttccagtgagccgtgatcgcgccagtgcactccagcctgggcaacagaacgagactctgctccaaaaagaaaaaaactttgaaatccctctaaaaataaaatggaccggtggatggtagctgtgaggatggaccgtgtggcaggaaagaatctctatacaaatgaatacgtggctatcaaattggagccgatcaagtcccgggccccgcagctgcacctggagtaccggttctacaagcagctcagcgccacagagggcgtccctcaggtctactacttcggtccgtgcgggaagtacaacgccatggtgctggagctgctggggcccagcctggaggacctgttcgacctgtgcgaccggaccttcacgctcaagacggtgctgatgatcgccatccagctgatcacgcgcatggagtatgtgcacaccaagagcctaatctaccgggacgtgaagcccgagaacttcctggtgggccgcccggggaccaagcggcagcatgccatccacatcatcgacttcgggctggccaaggagtacatcgaccccgagaccaagaagcacatcccgtaccgcgagcacaagagcctgacgggcacggcgcgctacatgagcatcaacacgcacctgggcaaggagcagagccgccgcgacgacctggaggcgctgggccacatgttcatgtacttcctgcgcggcagcctcccctggcaggggctcaaggccgacacgctcaaggagcggtaccagaagatcggggacaccaaacgcgccacgcccatcgaggtgctctgcgagaacttcccagaggagatggccacgtacctgcgctatgtgcggcgcctggacttcttcgagaagcccgactatgactacctgcggaagctcttcaccgacctcttcgaccgcagtggcttcgtgttcgactatgagtacgactgggccgggaagcccctgccgacccccatcggcaccgtccacaccgacctgccctcccagcctcagctccgggacaaaacccagccgcacagcaaaaaccaggcgttgaactccaccaacggggagctgaatgcggacgaccccacggccggccactccaacgccccgatcacagcgcctgcagaggtggaggtggccgatgaaaccaaatgctgctgtttcttcaagaggagaaagagaaaatcgctgcagcgacacaagtgaccctgggcgcgtgcagccccctgaatcttctccgtgcagccccttggggcgcgaccttgtgcgaggccctcggggcccacccacagcggcccagggccagaccctggctggaagccagaacgcagactgcaggggccgcgcctggctcaggcggccccacccccgggacgtggggtcacttccttcatgtaagactttggccgaaatttctacacctgtgtctagtcctcccctccaagagcattaactatttaaaacaaggaaaagaggaaaaaaaaaacagaggcccgccctaccccactcctgcccctccgtttctttgctgaagtgagtagtgtgatcctggaggccccccggcctggccccgccccgccagccgcccccgttagcgtcataaagtccagcttgtctccctcgatccaaaggccgttttctcgaggggagggcaggcccggcctggaggggtgctgtggagctgtcttgcccaggccctcctgggagggggacaggcattgttgccaggggtgaggccgtgccccaggcctccccgaaaccaaaggggaaggcaggggtggggccgtggctgaagccggctccccaaccaaaatgctgcaccaaagctcgggcgccgcgggcacggctgctgcagtctcttcccagcctggccctggcaaggggcgggtgggcgctgccaggcgggtgcttctcgacgcacttgctcccggaggctgcgccccggcgcctggaacccgaggtgggaggaccggttggtgtcaccctgctcggccctcagccctgccgcgtggggcgcgtgggcacggagcttcctgcctctctgctccgacacccggcaagcagccggagacaaaacgccttaaagcccccggcccagccctgcaggtatattgcaggggcctgggggcggccctggactggcgggcggttccccagtggggtgccctggaggctgccgggcagagtggagcagcttggggccgtgcccagggcggtggctgtgagtctagtttttgctttaccaagtgtacagaaatggcatttacgtttctctgatgctcccttgaagccatagaatttaggggcttttttaaaaaaataaaagaaaaatgaaaccaaaaacaaacgaacag

SEQ ID NO: 427728 - DNA, 3037 bp, Homo sapiens
tggggcgcgtatggctgccgccccccgctggcagacgctggcggcgtaaggcgcgcgggccccggagcgggcgcggcggagcgcggcgagcccggcgcctcccgtcccgaacatgcggaggccggcccaggcggcgcgggagccggagcgggggcccaagcgggcaccggagccggagcgcgagggggcgcggggcccggagcgggggtccgcgctgcgctgctgaggccgggccggccgcccagacgctgcccgcgggcccggccacggcggagccaagctgtgagccgtgagctttgaggcggtgggatgtgtcagcagaatgtctcctgcccccgagagcgaccccgaggccactgagaagagcagcgcggcctggccggcccgaacgcctgcgtctcagtagctgggagccacgggcccacgcccgcccaccggccgcagtgatgttctagccacagaggagccaagacctcaggtttccagagacttgggatttgcacggcagcagagtcaccgtggagaggccagggtatcacaaacttatggattttgacaagaaaggagggaaaggggagacggaggagggccggagaatgtccaaggccggcgggggccggagcagccacggcatccggagctcggggaccagctcgggggtcctgatggtgggccccaacttccgcgtcggcaagaagatcggctgcggcaacttcggggagctccgcctaggaaagaatctctatacaaatgaatacgtggctatcaaattggtgagtcggcccctccaccccacccccgctgacgtgccccccagggatttcagggcagcgacccggtcccctggtgactcgctcttgtgcccccaggagccgatcaagtcccgggccccgcagctgcacctggagtaccggttctacaagcagctcagcgccacagagggcgtccctcaggtctactacttcggtccgtgcgggaagtacaacgccatggtgctggagctgctggggcccagcctggaggacctgttcgacctgtgcgaccggaccttcacgctcaagacggtgctgatgatcgccatccagctgatcacgcgcatggagtatgtgcacaccaagagcctaatctaccgggacgtgaagcccgagaacttcctggtgggccgcccggggaccaagcggcagcatgccatccacatcatcgacttcgggctggccaaggagtacatcgaccccgagaccaagaagcacatcccgtaccgcgagcacaagagcctgacgggcacggcgcgctacatgagcatcaacacgcacctgggcaaggagcagagccgccgcgacgacctggaggcgctgggccacatgttcatgtacttcctgcgcggcagcctcccctggcaggggctcaaggccgacacgctcaaggagcggtaccagaagatcggggacaccaaacgcgccacgcccatcgaggtgctctgcgagaacttcccagaggagatggccacgtacctgcgctatgtgcggcgcctggacttcttcgagaagcccgactatgactacctgcggaagctcttcaccgacctcttcgaccgcagtggcttcgtgttcgactatgagtacgactgggccgggaagcccctgccgacccccatcggcaccgtccacaccgacctgccctcccagcctcagctccgggacaaaacccagccgcacagcaaaaaccaggcgttgaactccaccaacggggagctgaatgcggacgaccccacggccggccactccaacgccccgatcacagcgcctgcagaggtggaggtggccgatgaaaccaaatgctgctgtttcttcaagaggagaaagagaaaatcgctgcagcgacacaagtgaccctgggcgcgtgcagccccctgaatcttctccgtgcagccccttggggcgcgaccttgtgcgaggccctcggggcccacccacagcggcccagggccagaccctggctggaagccagaacgcagactgcaggggccgcgcctggctcaggcggccccacccccgggacgtggggtcacttccttcatgtaagactttggccgaaatttctacacctgtgtctagtcctcccctccaagagcattaactatttaaaacaaggaaaagaggaaaaaaaaaacagaggcccgccctaccccactcctgcccctccgtttctttgctgaagtgagtagtgtgatcctggaggccccccggcctggccccgccccgccagccgcccccgttagcgtcataaagtccagcttgtctccctcgatccaaaggccgttttctcgaggggagggcaggcccggcctggaggggtgctgtggagctgtcttgcccaggccctcctgggagggggacaggcattgttgccaggggtgaggccgtgccccaggcctccccgaaaccaaaggggaaggcaggggtggggccgtggctgaagccggctccccaaccaaaatgctgcaccaaagctcgggcgccgcgggcacggctgctgcagtctcttcccagcctggccctggcaaggggcgggtgggcgctgccaggcgggtgcttctcgacgcacttgctcccggaggctgcgccccggcgcctggaacccgaggtgggaggaccggttggtgtcaccctgctcggccctcagccctgccgcgtggggcgcgtgggcacggagcttcctgcctctctgctccgacacccggcaagcagccggagacaaaacgccttaaagcccccggcccagccctgcaggtatattgcaggggcctgggggcggccctggactggcgggcggttccccagtggggtgccctggaggctgccgggcagagtggagcagcttggggccgtgcccagggcggtggctgtgagtctagtttttgctttaccaagtgtacagaaatggcatttacgtttctctgatgctcccttgaagccatagaatttaggggcttttttaaaaaaataaaagaaaaatgaaaccaaaaacaaacgaacag

SEQ ID NO: 427729 - DNA, 3121 bp, Homo sapiens
tggggcgcgtatggctgccgccccccgctggcagacgctggcggcgtaaggcgcgcgggccccggagcgggcgcggcggagcgcggcgagcccggcgcctcccgtcccgaacatgcggaggccggcccaggcggcgcgggagccggagcgggggcccaagcgggcaccggagccggagcgcgagggggcgcggggcccggagcgggggtccgcgctgcgctgctgaggccgggccggccgcccagacgctgcccgcgggcccggccacggcggagccaagctgtgagccgtgagctttgaggcggtgggatgtgtcagcagaatgtctcctgcccccgagagcgaccccgaggccactgagaagagcagcgcggcctggccggcccgaacgcctgcgtctcagtagctgggagccacgggcccacgcccgcccaccggccgcagtgatgttctagccacagaggagccaagacctcaggtttccagagacttgggatttgcacggcagcagagtcaccgtggagaggccagggtatcacaaacttatggattttgacaagaaaggagggaaaggggagacggaggagggccggagaatgtccaaggccggcgggggccggagcagccacggcatccggagctcggggaccagctcgggggtcctgatggtgggccccaacttccgcgtcggcaagaagatcggctgcggcaacttcggggagctccgcctaggaaagaatctctatacaaatgaatacgtggctatcaaattggagccgatcaagtcccgggccccgcagctgcacctggagtaccggttctacaagcagctcagcgccacagagggcgtccctcaggtctactacttcggtccgtgcgggaagtacaacgccatggtgctggagctgctggggcccagcctggaggacctgttcgacctgtgcgaccggaccttcacgctcaagacggtgctgatgatcgccatccagctgatcacgcgcatggagtatgtgcacaccaagagcctaatctaccgggacgtgaagcccgagaacttcctggtgggccgcccggggaccaagcggcagcatgccatccacatcatcgacttcgggctggccaaggagtacatcgaccccgagaccaagaagcacatcccgtaccgcgagcacaagagcctgacgggcacggcgcgctacatgagcatcaacacgcacctgggcaaggagcagagccgccgcgacgacctggaggcgctgggccacatgttcatgtacttcctgcgcggcagcctcccctggcaggggctcaaggccgacacgctcaaggagcggtaccagaagatcggggacaccaaacgcgccacgcccatcgaggtgctctgcgagaacttcccagaggagatggccacgtacctgcgctatgtgcggcgcctggacttcttcgagaagcccgactatgactacctgcggaagctcttcaccgacctcttcgaccgcagtggcttcgtgttcgactatgagtacgactgggccgggaagcccctgccgacccccatcggcaccgtccacaccgacctgccctcccagcctcagctccgggacaaaacccagccgcacagcaaaaaccaggcgttgaactccaccaacggggagctgaatgcggacgaccccacggccggccactccaacgccccgatcacagcgcctgcagaggtggaggtggccgatgaaaccaaatgctgctgtttcttcaagaggagaaagagaaaatcgctgcagcgacacaagtgaccctgggcgcgtgcagccccctgaatcttctccgtgcagccccttggggcgcgaccttgtgcgaggccctcggggcccacccacagcggcccagggccagaccctggctggaagccagaacgcagactgcaggggccgcgcctggctcaggcggccccacccccgggacgtggggtcacttccttcatgtaagactttggccgaaatttctacacctgtgtctagtcctcccctccaagagcattaactatttaaaacaaggaaaagaggaaaaaaaaaacagaggcccgccctaccccacaaaaaacaaaaaacacaaaaaaaaagaagaacaaaaaaaaaaaaacaaaaaaaaaaaaaaaaaaaacaacaccacgaacaagaaaaaaaaaaaaaacaacacggagacgacacgaaagaagaacaaaagaccacgaggcaccagacgccaacaagcgcagcaaaagatcatgacagagcagacagagcaggggcggcgtgaggcacgccacgccgcgcgccgacgaggggcgctcgccggaagcgagagcgcacgggagcgggaggcgagacgagaagcagagaaggaaagcgagagagaagagacaacaaagacagccggccgaaagaggcagaggacaccggcgaagagcagcgccaagacgacggaggggcgaagcgaaaaacaaactgagcgacaccgcgacgcaccctcagcggagggggacccgagaaagcgagcagagcgctaaactcgagacgagcagagcgcggagcaccggagcgctcagacccagatcactccacatgcgcggcctctggcagcagcgcgcggcgcgagcagccgagagcgaagcgccgagacgagagcaaggacgaagagaaggagagaccgagccggaacgacggggcgacttgaaccagcgccgacacgacagagacgcgacacaggaacagccaacaacacggaggagagcgcaagcggcgacgactgcgacgagcgaaggcagaggcagaacgcaggaggacacagaagcacggaagcgacgaggagagcgccgggagtgcaaaagaggggaggctgcgggagccagcgagaagggacgagacagcacaaccaaacaaagaaaacgcgcgacaagagagacaggagccagcagaaggagaaaaagaagcgaggagcaagaacacgaacacgcacacgacgagacacgagaagcaagaaggcagcagaaggaccaagcgcaggccataccgacggacgcaacccgaaaaagccaagaagaagacaacgacgtagggacagagaggacacaaagcacgagggg

SEQ ID NO: 427730 - DNA, 3009 bp, Homo sapiens
tggggcgcgtatggctgccgccccccgctggcagacgctggcggcgtaaggcgcgcgggccccggagcgggcgcggcggagcgcggcgagcccggcgcctcccgtcccgaacatgcggaggccggcccaggcggcgcgggagccggagcgggggcccaagcgggcaccggagccggagcgcgagggggcgcggggcccggagcgggggtccgcgctgcgctgctgaggccgggccggccgcccagacgctgcccgcgggcccggccacggcggagccaagctgtgagccgtgagctttgaggcggtgggatgtgtcagcagaatgtctcctgcccccgagagcgaccccgaggccactgagaagagcagcgcggcctggccggcccgaacgcctgcgtctcagtagctgggagccacgggcccacgcccgcccaccggccgcagtgatgttctagccacagaggagccaagacctcaggtttccagagacttgggatttgcacggcagcagagtcaccgtggagaggccagggtatcacaaacttatggattttgacaagaaaggagggaaaggggagacggaggagggccggagaatgtccaaggccggcgggggccggagcagccacggcatccggagctcggggaccagctcgggggtcctgatggtgggccccaacttccgcgtcggcaagaagatcggctgcggcaacttcggggagctccgcctaggaaagaatctctatacaaatgaatacgtggctatcaaattggagccgatcaagtcccgggccccgcagctgcacctggagtaccggttctacaagcagctcagcgccacagagggcgtccctcaggtctactacttcggtccgtgcgggaagtacaacgccatggtgctggagctgctggggcccagcctggaggacctgttcgacctgtgcgaccggaccttcacgctcaagacggtgctgatgatcgccatccagctgatcacgcgcatggagtatgtgcacaccaagagcctaatctaccgggacgtgaagcccgagaacttcctggtgggccgcccggggaccaagcggcagcatgccatccacatcatcgacttcgggctggccaaggagtacatcgaccccgagaccaagaagcacatcccgtaccgcgagcacaagagcctgacgggcacggcgcgctacatgagcatcaacacgcacctgggcaagggtgagctgcgcgcgcgcggcggggggcgggcgcccggaccccgctgaggctgcgcccctgtcccgcagagcagagccgccgcgacgacctggaggcgctgggccacatgttcatgtacttcctgcgcggcagcctcccctggcaggggctcaaggccgacacgctcaaggagcggtaccagaagatcggggacaccaaacgcgccacgcccatcgaggtgctctgcgagaacttcccagaggagatggccacgtacctgcgctatgtgcggcgcctggacttcttcgagaagcccgactatgactacctgcggaagctcttcaccgacctcttcgaccgcagtggcttcgtgttcgactatgagtacgactgggccgggaagcccctgccgacccccatcggcaccgtccacaccgacctgccctcccagcctcagctccgggacaaaacccagccgcacagcaaaaaccaggcgttgaactccaccaacggggagctgaatgcggacgaccccacggccggccactccaacgccccgatcacagcgcctgcagaggtggaggtggccgatgaaaccaaatgctgctgtttcttcaagaggagaaagagaaaatcgctgcagcgacacaagtgaccctgggcgcgtgcagccccctgaatcttctccgtgcagccccttggggcgcgaccttgtgcgaggccctcggggcccacccacagcggcccagggccagaccctggctggaagccagaacgcagactgcaggggccgcgcctggctcaggcggccccacccccgggacgtggggtcacttccttcatgtaagactttggccgaaatttctacacctgtgtctagtcctcccctccaagagcattaactatttaaaacaaggaaaagaggaaaaaaaaaacagaggcccgccctaccccactcctgcccctccgtttctttgctgaagtgagtagtgtgatcctggaggccccccggcctggccccgccccgccagccgcccccgttagcgtcataaagtccagcttgtctccctcgatccaaaggccgttttctcgaggggagggcaggcccggcctggaggggtgctgtggagctgtcttgcccaggccctcctgggagggggacaggcattgttgccaggggtgaggccgtgccccaggcctccccgaaaccaaaggggaaggcaggggtggggccgtggctgaagccggctccccaaccaaaatgctgcaccaaagctcgggcgccgcgggcacggctgctgcagtctcttcccagcctggccctggcaaggggcgggtgggcgctgccaggcgggtgcttctcgacgcacttgctcccggaggctgcgccccggcgcctggaacccgaggtgggaggaccggttggtgtcaccctgctcggccctcagccctgccgcgtggggcgcgtgggcacggagcttcctgcctctctgctccgacacccggcaagcagccggagacaaaacgccttaaagcccccggcccagccctgcaggtatattgcaggggcctgggggcggccctggactggcgggcggttccccagtggggtgccctggaggctgccgggcagagtggagcagcttggggccgtgcccagggcggtggctgtgagtctagtttttgctttaccaagtgtacagaaatggcatttacgtttctctgatgctcccttgaagccatagaatttaggggcttttttaaaaaaataaaagaaaaatgaaaccaaaaacaaacgaacag

SEQ ID NO: 427731 - DNA, 2855 bp, Homo sapiens
tggggcgcgtatggctgccgccccccgctggcagacgctggcggcgtaaggcgcgcgggccccggagcgggcgcggcggagcgcggcgagcccggcgcctcccgtcccgaacatgcggaggccggcccaggcggcgcgggagccggagcgggggcccaagcgggcaccggagccggagcgcgagggggcgcggggcccggagcgggggtccgcgctgcgctgctgaggccgggccggccgcccagacgctgcccgcgggcccggccacggcggagccaagctgtgagccgtgagctttgaggcggtgggatgtgtcagcagaatgtctcctgcccccgagagcgaccccgaggccactgagaagagcagcgcggcctggccggcccgaacgcctgcgtctcagtagctgggagccacgggcccacgcccgcccaccggccgcagtgatgttctagccacagaggagccaagacctcaggtttccagagacttgggatttgcacggcagcagagtcaccgtggagaggccagggtatcacaaacttatggattttgacaagaaaggagggaaaggggagacggaggagggccggagaatgtccaaggccggcgggggccggagcagccacggcatccggagctcggggaccagctcgggggtcctgatggtgggccccaacttccgcgtcggcaagaagatcggctgcggcaacttcggggagctccgcctaggaaagaatctctatacaaatgaatacgtggctatcaaattggagccgatcaagtcccgggccccgcagctgcacctggagtaccggttctacaagcagctcagcgccacagagggcgtccctcaggtctactacttcggtccgtgcgggaagtacaacgccatggtgctggagctgctggggcccagcctggaggacctgttcgacctgtgcgaccggaccttcacgctcaagacggtgctgatgatcgccatccagctgatcacgcgcatggagtatgtgcacaccaagagcctaatctaccgggacgtgaagcccgagaacttcctggtgggccgcccggggaccaagcggcagcatgccatccacatcatcgacttcgggctggccaaggagtacatcgaccccgagaccaagaagcacatcccgtaccgcgagcacaagagcctgacgggcacggcgcgctacatgagcatcaacacgcacctgggcaagggccgacacgctcaaggagcggtaccagaagatcggggacaccaaacgcgccacgcccatcgaggtgctctgcgagaacttcccagaggagatggccacgtacctgcgctatgtgcggcgcctggacttcttcgagaagcccgactatgactacctgcggaagctcttcaccgacctcttcgaccgcagtggcttcgtgttcgactatgagtacgactgggccgggaagcccctgccgacccccatcggcaccgtccacaccgacctgccctcccagcctcagctccgggacaaaacccagccgcacagcaaaaaccaggcgttgaactccaccaacggggagctgaatgcggacgaccccacggccggccactccaacgccccgatcacagcgcctgcagaggtggaggtggccgatgaaaccaaatgctgctgtttcttcaagaggagaaagagaaaatcgctgcagcgacacaagtgaccctgggcgcgtgcagccccctgaatcttctccgtgcagccccttggggcgcgaccttgtgcgaggccctcggggcccacccacagcggcccagggccagaccctggctggaagccagaacgcagactgcaggggccgcgcctggctcaggcggccccacccccgggacgtggggtcacttccttcatgtaagactttggccgaaatttctacacctgtgtctagtcctcccctccaagagcattaactatttaaaacaaggaaaagaggaaaaaaaaaacagaggcccgccctaccccactcctgcccctccgtttctttgctgaagtgagtagtgtgatcctggaggccccccggcctggccccgccccgccagccgcccccgttagcgtcataaagtccagcttgtctccctcgatccaaaggccgttttctcgaggggagggcaggcccggcctggaggggtgctgtggagctgtcttgcccaggccctcctgggagggggacaggcattgttgccaggggtgaggccgtgccccaggcctccccgaaaccaaaggggaaggcaggggtggggccgtggctgaagccggctccccaaccaaaatgctgcaccaaagctcgggcgccgcgggcacggctgctgcagtctcttcccagcctggccctggcaaggggcgggtgggcgctgccaggcgggtgcttctcgacgcacttgctcccggaggctgcgccccggcgcctggaacccgaggtgggaggaccggttggtgtcaccctgctcggccctcagccctgccgcgtggggcgcgtgggcacggagcttcctgcctctctgctccgacacccggcaagcagccggagacaaaacgccttaaagcccccggcccagccctgcaggtatattgcaggggcctgggggcggccctggactggcgggcggttccccagtggggtgccctggaggctgccgggcagagtggagcagcttggggccgtgcccagggcggtggctgtgagtctagtttttgctttaccaagtgtacagaaatggcatttacgtttctctgatgctcccttgaagccatagaatttaggggcttttttaaaaaaataaaagaaaaatgaaaccaaaaacaaacgaacag

SEQ ID NO: 427732 - DNA, 1276 bp, Homo sapiens
cttgcccaggccctcctgggagggggacaggcattgttgccaggggtgaggcagtgccccaggcctccccgaaaccaaaggggaaggcaggggtggggccgtggctgaagccggctccccaaccaaaatgctgcaccaaagcagccccctgaatcttctccgtgcagccccttggggcgcgaccttgtgcgaggccctcggggcccacccacagcggcccagggccagaccctggctggaagccagaacgcagactgcaggggccgcgcctggctcaggcggccccacccccgggacgtggggtcacttccttcatgtaagactttggccgaaatttctacacctgtgtctagtcctcccctccaagagcattaactatttaaaacaaggaaaagaggaaaaaaaaaacagaggcccgccctaccccactcctgcccctccgtttctttgctgaagtgagtagtgtgatcctggaggccccccggcctggccccgccccgccagccgcccccgttagcgtcataaagtccagcttgtctccctcgatccaaaggccgttttctcgaggggagggcaggcccggcctggaggggtgctgtggagctgtcttgcccaggccctcctgggagggggacaggcattgttgccaggggtgaggccgtgccccaggcctccccgaaaccaaaggggaaggcaggggtggggccgtggctgaagccggctccccaaccaaaatgctgcaccaaagctcgggcgccgcgggcacggctgctgcagtctcttcccagcctggccctggcaaggggcgggtgggcgctgccaggcgggtgcttctcgacgcacttgctcccggaggctgcgccccggcgcctggaacccgaggtgggaggaccggttggtgtcaccctgctcggccctcagccctgccgcgtggggcgcgtgggcacggagcttcctgcctctctgctccgacacccggcaagcagccggagacaaaacgccttaaagcccccggcccagccctgcaggtatattgcaggggcctgggggcggccctggactggcgggcggttccccagtggggtgccctggaggctgccgggcagagtggagcagcttggggccgtgcccagggcggtggctgtgagtctagtttttgctttaccaagtgtacagaaatggcatttacgtttctctgatgctcccttgaagccatagaatttaggggcttttttaaaaaaataaaagaaaaatgaaaccaaaaacaaacgaacag

SEQ ID NO: 427733 - DNA, 1114 bp, Homo sapiens
ataaaaaaaataaaaaaataataaaaaataatcaaaaataaaataaaaaagttaaataaatcatgataaagaaaataaataaaaattatgagtgtaaataaaatttaataaaatgcgcggccccacccccgggacgtggggtcacttccttcatgtaagactttggccgaaatttctacacctgtgtctagtcctcccctccaagagcattaactatttaaaacaaggaaaagaggaaaaaaaaaacagaggcccgccctaccccactcctgcccctccgtttctttgctgaagtgagtagtgtgatcctggaggccccccggcctggccccgccccgccagccgcccccgttagcgtcataaagtccagcttgtctccctcgatccaaaggccgttttctcgaggggagggcaggcccggcctggaggggtgctgtggagctgtcttgcccaggccctcctgggagggggacaggcattgttgccaggggtgaggccgtgccccaggcctccccgaaaccaaaggggaaggcaggggtggggccgtggctgaagccggctccccaaccaaaatgctgcaccaaagctcgggcgccgcgggcacggctgctgcagtctcttcccagcctggccctggcaaggggcgggtgggcgctgccaggcgggtgcttctcgacgcacttgctcccggaggctgcgccccggcgcctggaacccgaggtgggaggaccggttggtgtcaccctgctcggccctcagccctgccgcgtggggcgcgtgggcacggagcttcctgcctctctgctccgacacccggcaagcagccggagacaaaacgccttaaagcccccggcccagccctgcaggtatattgcaggggcctgggggcggccctggactggcgggcggttccccagtggggtgccctggaggctgccgggcagagtggagcagcttggggccgtgcccagggcggtggctgtgagtctagtttttgctttaccaagtgtacagaaatggcatttacgtttctctgatgctcccttgaagccatagaatttaggggcttttttaaaaaaataaaagaaaaatgaaaccaaaaacaaacgaacag

SEQ ID NO: 427734 - DNA, 1089 bp, Homo sapiens
ttcattcggggggtgtgagtgaaagtgaattttggaacgcaagtgcatgtcgttggaatactgaacacatagtgccagaaacttccctgaggcggccccacccccgggacgtggggtcacttccttcatgtaagactttggccgaaatttctacacctgtgtctagtcctcccctccaagagcattaactatttaaaacaaggaaaagaggaaaaaaaaaacagaggcccgccctaccccactcctgcccctccgtttctttgctgaagtgagtagtgtgatcctggaggccccccggcctggccccgccccgccagccgcccccgttagcgtcataaagtccagcttgtctccctcgatccaaaggccgttttctcgaggggagggcaggcccggcctggaggggtgctgtggagctgtcttgcccaggccctcctgggagggggacaggcattgttgccaggggtgaggccgtgccccaggcctccccgaaaccaaaggggaaggcaggggtggggccgtggctgaagccggctccccaaccaaaatgctgcaccaaagctcgggcgccgcgggcacggctgctgcagtctcttcccagcctggccctggcaaggggcgggtgggcgctgccaggcgggtgcttctcgacgcacttgctcccggaggctgcgccccggcgcctggaacccgaggtgggaggaccggttggtgtcaccctgctcggccctcagccctgccgcgtggggcgcgtgggcacggagcttcctgcctctctgctccgacacccggcaagcagccggagacaaaacgccttaaagcccccggcccagccctgcaggtatattgcaggggcctgggggcggccctggactggcgggcggttccccagtggggtgccctggaggctgccgggcagagtggagcagcttggggccgtgcccagggcggtggctgtgagtctagtttttgctttaccaagtgtacagaaatggcatttacgtttctctgatgctcccttgaagccatagaatttaggggcttttttaaaaaaataaaagaaaaatgaaaccaaaaacaaacgaacag

SEQ ID NO: 427735 - DNA, 2026 bp, Homo sapiens
tggggcgcgtatggctgccgccccccgctggcagacgctggcggcgtaaggcgcgcgggccccggagcgggcgcggcggagcgcggcgagcccggcgcctcccgtcccgaacatgcggaggccggcccaggcggcgcgggagccggagcgggggcccaagcgggcaccggagccggagcgcgagggggcgcggggcccggagcgggggtccgcgctgcgctgctgaggccgggccggccgcccagacgctgcccgcgggcccggccacggcggagccaagctgtgagccgtgagctttgaggcggtgggatgtgtcagcagaatgtctcctgcccccgagagcgaccccgaggccactgagaagagcagcgcggcctggccggcccgaacgcctgcgtctcagtagctgggagccacgggcccacgcccgcccaccggccgcagtgatgttctagccacagaggagccaagacctcaggtttccagagacttgggatttgcacggcagcagagtcaccgtggagaggccagggtatcacaaacttatggattttgacaagaaaggagggaaaggggagacggaggagggccggagaatgtccaaggccggcgggggccggagcagccacggcatccggagctcggggaccagctcgggggtcctgatggtgggccccaacttccgcgtcggcaagaagatcggctgcggcaacttcggggagctccgcctaggaaagaatctctatacaaatgaatacgtggctatcaaattggagccgatcaagtcccgggccccgcagctgcacctggagtaccggttctacaagcagctcagcgccacagagggcgtccctcaggtctactacttcggtccgtgcgggaagtacaacgccatggtgctggagctgctggggcccagcctggaggacctgttcgacctgtgcgaccggaccttcacgctcaagacggtgctgatgatcgccatccagctgatcacgcgcatggagtatgtgcacaccaagagcctaatctaccgggacgtgaagcccgagaacttcctggtgggccgcccggggaccaagcggcagcatgccatccacatcatcgacttcgggctggccaaggagtacatcgaccccgagaccaagaagcacatcccgtaccgcgagcacaagagcctgacgggcacggcgcgctacatgagcatcaacacgcacctgggcaaggagcagagccgccgcgacgacctggaggcgctgggccacatgttcatgtacttcctgcgcggcagcctcccctggcaggggctcaaggccgacacgctcaaggagcggtaccagaagatcggggacaccaaacgcgccacgcccatcgaggtgctctgcgagaacttcccagaggagatggccacgtacctgcgctatgtgcggcgcctggacttcttcgagaagcccgactatgactacctgcggaagctcttcaccgacctcttcgaccgcagtggcttcgtgttcgactatgagtacgactgggccgggaagcccctgccgacccccatcggcaccgtccacaccgacctgccctcccagcctcagctccgggacaaaacccagccgcacagcaaaaaccaggcgttgaactccaccaacggggagctgaatgcggacgaccccacggccggccactccaacgccccgatcacagcgcctgcagaggtggaggtggccgatgaaaccaaatgctgctgtttcttcaagaggagaaagagaaaatcgctgcagcgacacaagtgaccctgggcgcgtctggactggcgggcggttccccagtggggtgccctggaggctgccgggcagagtggagcagcttggggccgtgcccagggcggtggctgtgagtctagtttttgctttaccaagtgtacagaaatggcatttacgtttctctgatgctcccttgaagccatagaatttaggggcttttttaaaaaaataaaagaaaaatgaaaccaaaaacaaacgaacag

SEQ ID NO: 427736 - DNA, 703 bp, Homo sapiens
gtggagacagtcagagaagggggctcccggggccctccccagggaactggccctgggcccagaccagatggaggaccccgaaaagaacagggcagctgtgagccgtgagctttgaggcggtgggatgtgtcagcagaatgtctcctgcccccgagagcgaccccgaggccactgagaagagcagcgcggcctggccggcccgaacgcctgcgtctcagtagctgggagccacgggcccacgcccgcccaccggccgcagtgatgttctagccacagaggagccaagacctcaggtttccagagacttgggatttgcacggcagcagagtcaccctgctcggccctcagccctgccgcgtggggcgcgtgggcacggagcttcctgcctctctgctccgacacccggcaagcagccggagacaaaacgccttaaagcccccggcccagccctgcaggtatattgcaggggcctgggggcggccctggactggcgggcggttccccagtggggtgccctggaggctgccgggcagagtggagcagcttggggccgtgcccagggcggtggctgtgagtctagtttttgctttaccaagtgtacagaaatggcatttacgtttctctgatgctcccttgaagccatagaatttaggggcttttttaaaaaaataaaagaaaaatgaaaccaaaaacaaacgaacag

SEQ ID NO: 427737 - DNA, 523 bp, Homo sapiens
atgtggcttcccagtctgcatctccatctgctcccagggtgcgagttggtttttgtattaataactgaggtgtgacactcgggctgtacccgctagctgtgtaactcatgcagctcagtgcctttagctcatcatgaggctgtgtctctgtctgtgccatctaatagaggatattttcatcctcatggcgagaagggatggatttgttttcctcgtgaagtcggtgacgtttgcttttcaggtttggttggtggcctccagtctcttgtcctcaacgagggttttggcagctccctctcagtggcctgtgagtgtccccactcccttgtctgggaaagggctggagctctggggctcacagagagggtgggtgtgatgtctttttcctgacgtggcatcggggtgtcttacctgcccggacacctgcctgcgcagggtagcacagaccctacaggctgcggctgagcccccagcacccacctgccatcgacagacgcccgccatcgggtcctctaagcagcca

SEQ ID NO: 427738 - DNA, 2756 bp, Homo sapiens
gtggagacagtcagagaagggggctcccggggccctccccagggaactggccctgggcccagaccagatggaggaccccgaaaagaacagggcagctgtgagccgtgagctttgaggcggtgggatgtgtcagcagaatgtctcctgcccccgagagcgaccccgaggccactgagaagagcagcgcggcctggccggcccgaacgcctgcgtctcagtagctgggagccacgggcccacgcccgcccaccggccgcagtgatgttctagccacagaggagccaagacctcaggtttccagagacttgggatttgcacggcagcagagtcaccgtggagaggccagggtatcacaaacttatggattttgacaagaaaggagggaaaggggagacggaggagggccggagaatgtccaaggccggcgggggccggagcagccacggcatccggagctcggggaccagctcgggggtcctgatggtgggccccaacttccgcgtcggcaagaagatcggctgcggcaacttcggggagctccgcctaggaaagaatctctatacaaatgaatacgtggctatcaaattggagccgatcaagtcccgggccccgcagctgcacctggagtaccggttctacaagcagctcagcgccacagagggcgtccctcaggtctactacttcggtccgtgcgggaagtacaacgccatggtgctggagctgctggggcccagcctggaggacctgttcgacctgtgcgaccggaccttcacgctcaagacggtgctgatgatcgccatccagctgatcacgcgcatggagtatgtgcacaccaagagcctaatctaccgggacgtgaagcccgagaacttcctggtgggccgcccggggaccaagcggcagcatgccatccacatcatcgacttcgggctggccaaggagtacatcgaccccgagaccaagaagcacatcccgtaccgcgagcacaagagcctgacgggcacggcgcgctacatgagcatcaacacgcacctgggcaaggagcagagccgccgcgacgacctggaggcgctgggccacatgttcatgtacttcctgcgcggcagcctcccctggcaggggctcaaggccgacacgctcaaggagcggtaccagaagatcggggacaccaaacgcgccacgcccatcgaggtgctctgcgagaacttcccagaggagatggccacgtacctgcgctatgtgcggcgcctggacttcttcgagaagcccgactatgactacctgcggaagctcttcaccgacctcttcgaccgcagtggcttcgtgttcgactatgagtacgactgggccgggaagcccctgccgacccccatcggcaccgtccacaccgacctgccctcccagcctcagctccgggacaaaacccagccgcacagcaaaaaccaggcgttgaactccaccaacggggagctgaatgcggacgaccccacggccggccactccaacgccccgatcacagcgcctgcagaggtggaggtggccgatgaaaccaaatgctgctgtttcttcaagaggagaaagagaaaatcgctgcagcgacacaagtgaccctgggcgcgtgcagccccctgaatcttctccgtgcagccccttggggcgcgaccttgtgcgaggccctcggggcccacccacagcggcccagggccagaccctggctggaagccagaacgcagactgcaggggccgcgcctggctcaggcggccccacccccgggacgtggggtcacttccttcatgtaagactttggccgaaatttctacacctgtgtctagtcctcccctccaagagcattaactatttaaaacaaggaaaagaggaaaaaaaaaacagaggcccgccctaccccactcctgcccctccgtttctttgctgaagtgagtagtgtgatcctggaggccccccggcctggccccgccccgccagccgcccccgttagcgtcataaagtccagcttgtctccctcgatccaaaggccgttttctcgaggggagggcaggcccggcctggaggggtgctgtggagctgtcttgcccaggccctcctgggagggggacaggcattgttgccaggggtgaggccgtgccccaggcctccccgaaaccaaaggggaaggcaggggtggggccgtggctgaagccggctccccaaccaaaatgctgcaccaaagctcgggcgccgcgggcacggctgctgcagtctcttcccagcctggccctggcaaggggcgggtgggcgctgccaggcgggtgcttctcgacgcacttgctcccggaggctgcgccccggcgcctggaacccgaggtgggaggaccggttggtgtcaccctgctcggccctcagccctgccgcgtggggcgcgtgggcacggagcttcctgcctctctgctccgacacccggcaagcagccggagacaaaacgccttaaagcccccggcccagccctgcaggtatattgcaggggcctgggggcggccctggactggcgggcggttccccagtggggtgccctggaggctgccgggcagagtggagcagcttggggccgtgcccagggcggtggctgtgagtctagtttttgctttaccaagtgtacagaaatggcatttacgtttctctgatgctcccttgaagccatagaatttaggggcttttttaaaaaaataaaagaaaaatgaaaccaaaaacaaacgaacag

SEQ ID NO: 427739 - DNA, 4043 bp, Homo sapiens
tggggcgcgtatggctgccgccccccgctggcagacgctggcggcgtaaggcgcgcgggccccggagcgggcgcggcggagcgcggcgagcccggcgcctcccgtcccgaacatgcggaggccggcccaggcggcgcgggagccggagcgggggcccaagcgggcaccggagccggagcgcgagggggcgcggggcccggagcgggggtccgcgctgcgctgctgaggccgggccggccgcccagacgctgcccgcgggcccggccacggcggagccaagctgtgagccgtgagctttgaggcggtgggatgtgtcagcagaatgtctcctgcccccgagagcgaccccgaggccactgagaagagcagcgcggcctggccggcccgaacgcctgcgtctcagtagctgggagccacgggcccacgcccgcccaccggccgcagtgatgttctagccacagaggagccaagacctcaggtttccagagacttgggatttgcacggcagcagagtcaccgtggagaggccagggtatcacaaacttatggattttgacaagaaaggagggaaaggggagacggaggagggccggagaatgtccaaggccggcgggggccggagcagccacggcatccggagctcggggaccagctcgggggtcctgatggtgggccccaacttccgcgtcggcaagaagatcggctgcggcaacttcggggagctccgcctagtgcagagtagaagagccgggaaggaccccatcaccatcagatgcatcagagcttcaaaggcccgcccatcaagacgctgccaagagcatgaggccagccaggctggggaggacgttggcgagcatccgcctgcccgtcagggagccacagctggatgatacatcgacagacagcagagggacggtgtagcacacaggcgagggcttgtcctcctcagcctgggggagcgcagctcagtgcttggtggtcagcacgtgactgacactttgccggagaaggggacggctgcccgcaggaagagctacacagccgtgttcgccggaactccgctctggagagtcagaactggagacgggagggcgtgcctcaagggcagatgggcaaaccaaaccccatcctccctgtgagccgcggcacagcaccaggcgggcacacgcagcacgacacggcgaggagcccaccgcaggggcagccttttgggcggggaaggggggatgaatccactgtgaatcccacctccgaagggcagcgcaggaaggacacgcaaatgctggactgaacctgcagctgattcagggggcagtgtcctgagctctaaaacttcaaacctggggcagtgtcctgagctctaaaacttcgaaatctgaccaggcacagtggctcacgcctgtaatcccaacactttgggaggctgatgtgggcggatcacctgacgtcaggagttcgagaccagcctggacaacatggagaaagcccatctctagtaaaaatacaaaaattagccaggttgatggtgcctgcctgtaattccagctactcaggaggctgaggcaggagaatcgcttgaacccaggaggcagaggttccagtgagccgtgatcgcgccagtgcactccagcctgggcaacagaacgagactctgctccaaaaagaaaaaaactttgaaatccctctaaaaataaaatggaccggtggatggtagctgtgaggatggaccgtgtggcaggaaagaatctctatacaaatgaatacgtggctatcaaattggtgagtcggcccctccaccccacccccgctgacgtgccccccagggatttcagggcagcgacccggtcccctggtgactcgctcttgtgcccccaggagccgatcaagtcccgggccccgcagctgcacctggagtaccggttctacaagcagctcagcgccacagagggcgtccctcaggtctactacttcggtccgtgcgggaagtacaacgccatggtgctggagctgctggggcccagcctggaggacctgttcgacctgtgcgaccggaccttcacgctcaagacggtgctgatgatcgccatccagctgatcacgcgcatggagtatgtgcacaccaagagcctaatctaccgggacgtgaagcccgagaacttcctggtgggccgcccggggaccaagcggcagcatgccatccacatcatcgacttcgggctggccaaggagtacatcgaccccgagaccaagaagcacatcccgtaccgcgagcacaagagcctgacgggcacggcgcgctacatgagcatcaacacgcacctgggcaaggagcagagccgccgcgacgacctggaggcgctgggccacatgttcatgtacttcctgcgcggcagcctcccctggcaggggctcaaggccgacacgctcaaggagcggtaccagaagatcggggacaccaaacgcgccacgcccatcgaggtgctctgcgagaacttcccagaggagatggccacgtacctgcgctatgtgcggcgcctggacttcttcgagaagcccgactatgactacctgcggaagctcttcaccgacctcttcgaccgcagtggcttcgtgttcgactatgagtacgactgggccgggaagcccctgccgacccccatcggcaccgtccacaccgacctgccctcccagcctcagctccgggacaaaacccagccgcacagcaaaaaccaggcgttgaactccaccaacggggagctgaatgcggacgaccccacggccggccactccaacgccccgatcacagcgcctgcagaggtggaggtggccgatgaaaccaaatgctgctgtttcttcaagaggagaaagagaaaatcgctgcagcgacacaagtgaccctgggcgcgtgcagccccctgaatcttctccgtgcagccccttggggcgcgaccttgtgcgaggccctcggggcccacccacagcggcccagggccagaccctggctggaagccagaacgcagactgcaggggccgcgcctggctcaggcggccccacccccgggacgtggggtcacttccttcatgtaagactttggccgaaatttctacacctgtgtctagtcctcccctccaagagcattaactatttaaaacaaggaaaagaggaaaaaaaaaacagaggcccgccctaccccactcctgcccctccgtttctttgctgaagtgagtagtgtgatcctggaggccccccggcctggccccgccccgccagccgcccccgttagcgtcataaagtccagcttgtctccctcgatccaaaggccgttttctcgaggggagggcaggcccggcctggaggggtgctgtggagctgtcttgcccaggccctcctgggagggggacaggcattgttgccaggggtgaggccgtgccccaggcctccccgaaaccaaaggggaaggcaggggtggggccgtggctgaagccggctccccaaccaaaatgctgcaccaaagctcgggcgccgcgggcacggctgctgcagtctcttcccagcctggccctggcaaggggcgggtgggcgctgccaggcgggtgcttctcgacgcacttgctcccggaggctgcgccccggcgcctggaacccgaggtgggaggaccggttggtgtcaccctgctcggccctcagccctgccgcgtggggcgcgtgggcacggagcttcctgcctctctgctccgacacccggcaagcagccggagacaaaacgccttaaagcccccggcccagccctgcaggtatattgcaggggcctgggggcggccctggactggcgggcggttccccagtggggtgccctggaggctgccgggcagagtggagcagcttggggccgtgcccagggcggtggctgtgagtctagtttttgctttaccaagtgtacagaaatggcatttacgtttctctgatgctcccttgaagccatagaatttaggggcttttttaaaaaaataaaagaaaaatgaaaccaaaaacaaacgaacag

SEQ ID NO: 427740 - DNA, 2749 bp, Homo sapiens
tggggcgcgtatggctgccgccccccgctggcagacgctggcggcgtaaggcgcgcgggccccggagcgggcgcggcggagcgcggcgagcccggcgcctcccgtcccgaacatgcggaggccggcccaggcggcgcgggagccggagcgggggcccaagcgggcaccggagccggagcgcgagggggcgcggggcccggagcgggggtccgcgctgcgctgctgaggccgggccggccgcccagacgctgcccgcgggcccggccacggcggagccaagctgtgagccgtgagctttgaggcggtgggatgtgtcagcagaatgtctcctgcccccgagagcgaccccgaggccactgagaagagcagcgcggcctggccggcccgaacgcctgcgtctcagtagctgggagccacgggcccacgcccgcccaccggccgcagtgatgttctagccacagaggagccaagacctcaggtttccagagacttgggatttgcacggcagcagagtcaccgtggagaggccagggtatcacaaacttatggattttgacaagaaaggagggaaaggggagacggaggagggccggagaatgtccaaggccggcgggggccggagcagccacggcatccggagctcggggaccagctcgggggtcctgatggtgggccccaacttccgcgtcggcaagaagatcggctgcggcaacttcggggagctccgcctaggaaagaatctctatacaaatgaatacgtggctatcaaattggagccgatcaagtcccgggccccgcagctgcacctggagtaccggttctacaagcagctcagcgccacagagggcgtccctcaggtctactacttcggtccgtgcgggaagtacaacgccatggtgctggagctgctggggcccagcctggaggacctgttcgacctgtgcgaccggaccttcacgctcaagacggtgctgatgatcgccatccagctgatcacgcgcatggagtatgtgcacaccaagagcctaatctaccgggacgtgaagcccgagaacttcctggtgggccgcccggggaccaagcggcagcatgccatccacatcatcgacttcgggctggccaaggagtacatcgaccccgagaccaagaagcacatcccgtaccgcgagcacaagagcctgacgggcacggcgcgctacatgagcatcaacacgcacctgggcaaggagcagagccgccgcgacgacctggaggcgctgggccacatgttcatgtacttcctgcgcggcagcctcccctggcaggggctcaaggccgacacgctcaaggagcggtaccagaagatcggggacaccaaacgcgccacgcccatcgaggtgctctgcgagaacttcccagaggagatggccacgtacctgcgctatgtgcggcgcctggacttcttcgagaagcccgactatgactacctgcggaagctcttcaccgacctcttcgaccgcagtggcttcgtgttcgactatgagtacgactgggccgggaagcccctgccgacccccatcggcaccgtccacaccgacctgccctcccagcctcagctccgggacaaaacccaggcagccccctgaatcttctccgtgcagccccttggggcgcgaccttgtgcgaggccctcggggcccacccacagcggcccagggccagaccctggctggaagccagaacgcagactgcaggggccgcgcctggctcaggcggccccacccccgggacgtggggtcacttccttcatgtaagactttggccgaaatttctacacctgtgtctagtcctcccctccaagagcattaactatttaaaacaaggaaaagaggaaaaaaaaaacagaggcccgccctaccccactcctgcccctccgtttctttgctgaagtgagtagtgtgatcctggaggccccccggcctggccccgccccgccagccgcccccgttagcgtcataaagtccagcttgtctccctcgatccaaaggccgttttctcgaggggagggcaggcccggcctggaggggtgctgtggagctgtcttgcccaggccctcctgggagggggacaggcattgttgccaggggtgaggccgtgccccaggcctccccgaaaccaaaggggaaggcaggggtggggccgtggctgaagccggctccccaaccaaaatgctgcaccaaagctcgggcgccgcgggcacggctgctgcagtctcttcccagcctggccctggcaaggggcgggtgggcgctgccaggcgggtgcttctcgacgcacttgctcccggaggctgcgccccggcgcctggaacccgaggtgggaggaccggttggtgtcaccctgctcggccctcagccctgccgcgtggggcgcgtgggcacggagcttcctgcctctctgctccgacacccggcaagcagccggagacaaaacgccttaaagcccccggcccagccctgcaggtatattgcaggggcctgggggcggccctggactggcgggcggttccccagtggggtgccctggaggctgccgggcagagtggagcagcttggggccgtgcccagggcggtggctgtgagtctagtttttgctttaccaagtgtacagaaatggcatttacgtttctctgatgctcccttgaagccatagaatttaggggcttttttaaaaaaataaaagaaaaatgaaaccaaaaacaaacgaacag

SEQ ID NO: 427741 - DNA, 2916 bp, Homo sapiens
tggggcgcgtatggctgccgccccccgctggcagacgctggcggcgtaaggcgcgcgggccccggagcgggcgcggcggagcgcggcgagcccggcgcctcccgtcccgaacatgcggaggccggcccaggcggcgcgggagccggagcgggggcccaagcgggcaccggagccggagcgcgagggggcgcggggcccggagcgggggtccgcgctgcgctgctgaggccgggccggccgcccagacgctgcccgcgggcccggccacggcggagccaagctgtgagccgtgagctttgaggcggtgggatgtgtcagcagaatgtctcctgcccccgagagcgaccccgaggccactgagaagagcagcgcggcctggccggcccgaacgcctgcgtctcagtagctgggagccacgggcccacgcccgcccaccggccgcagtgatgttctagccacagaggagccaagacctcaggtttccagagacttgggatttgcacggcagcagagtcaccgtggagaggccagggtatcacaaacttatggattttgacaagaaaggagggaaaggggagacggaggagggccggagaatgtccaaggccggcgggggccggagcagccacggcatccggagctcggggaccagctcgggggtcctgatggtgggccccaacttccgcgtcggcaagaagatcggctgcggcaacttcggggagctccgcctaggaaagaatctctatacaaatgaatacgtggctatcaaattggagccgatcaagtcccgggccccgcagctgcacctggagtaccggttctacaagcagctcagcgccacagagggcgtccctcaggtctactacttcggtccgtgcgggaagtacaacgccatggtgctggagctgctggggcccagcctggaggacctgttcgacctgtgcgaccggaccttcacgctcaagacggtgctgatgatcgccatccagctgatcacgcgcatggagtatgtgcacaccaagagcctaatctaccgggacgtgaagcccgagaacttcctggtgggccgcccggggaccaagcggcagcatgccatccacatcatcgacttcgggctggccaaggagtacatcgaccccgagaccaagaagcacatcccgtaccgcgagcacaagagcctgacgggcacggcgcgctacatgagcatcaacacgcacctgggcaaggagcagagccgccgcgacgacctggaggcgctgggccacatgttcatgtacttcctgcgcggcagcctcccctggcaggggctcaaggccgacacgctcaaggagcggtaccagaagatcggggacaccaaacgcgccacgcccatcgaggtgctctgcgagaacttcccagaggagatggccacgtacctgcgctatgtgcggcgcctggacttcttcgagaagcccgactatgactacctgcggaagctcttcaccgacctcttcgaccgcagtggcttcgtgttcgactatgaccgacccccatcggcaccgtccacaccgacctgccctcccagcctcagctccgggacaaaacccagccgcacagcaaaaaccaggcgttgaactccaccaacggggagctgaatgcggacgaccccacggccggccactccaacgccccgatcacagcgcctgcagaggtggaggtggccgatgaaaccaaatgctgctgtttcttcaagaggagaaagagaaaatcgctgcagcgacacaagtgaccctgggcgcgtgcagccccctgaatcttctccgtgcagccccttggggcgcgaccttgtgcgaggccctcggggcccacccacagcggcccagggccagaccctggctggaagccagaacgcagactgcaggggccgcgcctggctcaggcggccccacccccgggacgtggggtcacttccttcatgtaagactttggccgaaatttctacacctgtgtctagtcctcccctccaagagcattaactatttaaaacaaggaaaagaggaaaaaaaaaacagaggcccgccctaccccactcctgcccctccgtttctttgctgaagtgagtagtgtgatcctggaggccccccggcctggccccgccccgccagccgcccccgttagcgtcataaagtccagcttgtctccctcgatccaaaggccgttttctcgaggggagggcaggcccggcctggaggggtgctgtggagctgtcttgcccaggccctcctgggagggggacaggcattgttgccaggggtgaggccgtgccccaggcctccccgaaaccaaaggggaaggcaggggtggggccgtggctgaagccggctccccaaccaaaatgctgcaccaaagctcgggcgccgcgggcacggctgctgcagtctcttcccagcctggccctggcaaggggcgggtgggcgctgccaggcgggtgcttctcgacgcacttgctcccggaggctgcgccccggcgcctggaacccgaggtgggaggaccggttggtgtcaccctgctcggccctcagccctgccgcgtggggcgcgtgggcacggagcttcctgcctctctgctccgacacccggcaagcagccggagacaaaacgccttaaagcccccggcccagccctgcaggtatattgcaggggcctgggggcggccctggactggcgggcggttccccagtggggtgccctggaggctgccgggcagagtggagcagcttggggccgtgcccagggcggtggctgtgagtctagtttttgctttaccaagtgtacagaaatggcatttacgtttctctgatgctcccttgaagccatagaatttaggggcttttttaaaaaaataaaagaaaaatgaaaccaaaaacaaacgaacag

SEQ ID NO: 427742 - DNA, 1689 bp, Homo sapiens
gaggccgggcaggcgggcggggacgcagggcgggagcaaggctgaccacagacccccgcaggccgacacgctcaaggagcggtaccagaagatcggggacaccaaacgcgccacgcccatcgaggtgctctgcgagaacttcccagaggagatggccacgtacctgcgctatgtgcggcgcctggacttcttcgagaagcccgactatgactacctgcggaagctcttcaccgacctcttcgaccgcagtggcttcgtgttcgactatgagtacgactgggccgggaagcccctgccgacccccatcggcaccgtccacaccgacctgccctcccagcctcagctccgggacaaaacccagccgcacagcaaaaaccaggcgttgaactccaccaacggggagctgaatgcggacgaccccacggccggccactccaacgccccgatcacagcgcctgcagaggtggaggtggccgatgaaaccaaatgctgctgtttcttcaagaggagaaagagaaaatcgctgcagcgacacaagtgaccctgggcgcgtgcagccccctgaatcttctccgtgcagccccttggggcgcgaccttgtgcgaggccctcggggcccacccacagcggcccagggccagaccctggctggaagccagaacgcagactgcaggggccgcgcctggctcaggcggccccacccccgggacgtggggtcacttccttcatgtaagactttggccgaaatttctacacctgtgtctagtcctcccctccaagagcattaactatttaaaacaaggaaaagaggaaaaaaaaaacagaggcccgccctaccccactcctgcccctccgtttctttgctgaagtgagtagtgtgatcctggaggccccccggcctggccccgccccgccagccgcccccgttagcgtcataaagtccagcttgtctccctcgatccaaaggccgttttctcgaggggagggcaggcccggcctggaggggtgctgtggagctgtcttgcccaggccctcctgggagggggacaggcattgttgccaggggtgaggccgtgccccaggcctccccgaaaccaaaggggaaggcaggggtggggccgtggctgaagccggctccccaaccaaaatgctgcaccaaagctcgggcgccgcgggcacggctgctgcagtctcttcccagcctggccctggcaaggggcgggtgggcgctgccaggcgggtgcttctcgacgcacttgctcccggaggctgcgccccggcgcctggaacccgaggtgggaggaccggttggtgtcaccctgctcggccctcagccctgccgcgtggggcgcgtgggcacggagcttcctgcctctctgctccgacacccggcaagcagccggagacaaaacgccttaaagcccccggcccagccctgcaggtatattgcaggggcctgggggcggccctggactggcgggcggttccccagtggggtgccctggaggctgccgggcagagtggagcagcttggggccgtgcccagggcggtggctgtgagtctagtttttgctttaccaagtgtacagaaatggcatttacgtttctctgatgctcccttgaagccatagaatttaggggcttttttaaaaaaataaaagaaaaatgaaaccaaaaacaaacgaacag

SEQ ID NO: 427743 - DNA, 1145 bp, Homo sapiens
agcaggaattcccggcacccaagggcttcagggggctttgtagattatccctcaggtacatgtccaaggagtctaattgagatatccacaggtttattataggtcggggagccagtaccgatttatacctggcaaactacagctgaagcggccccacccccgggacgtggggtcacttccttcatgtaagactttggccgaaatttctacacctgtgtctagtcctcccctccaagagcattaactatttaaaacaaggaaaagaggaaaaaaaaaacagaggcccgccctaccccactcctgcccctccgtttctttgctgaagtgagtagtgtgatcctggaggccccccggcctggccccgccccgccagccgcccccgttagcgtcataaagtccagcttgtctccctcgatccaaaggccgttttctcgaggggagggcaggcccggcctggaggggtgctgtggagctgtcttgcccaggccctcctgggagggggacaggcattgttgccaggggtgaggccgtgccccaggcctccccgaaaccaaaggggaaggcaggggtggggccgtggctgaagccggctccccaaccaaaatgctgcaccaaagctcgggcgccgcgggcacggctgctgcagtctcttcccagcctggccctggcaaggggcgggtgggcgctgccaggcgggtgcttctcgacgcacttgctcccggaggctgcgccccggcgcctggaacccgaggtgggaggaccggttggtgtcaccctgctcggccctcagccctgccgcgtggggcgcgtgggcacggagcttcctgcctctctgctccgacacccggcaagcagccggagacaaaacgccttaaagcccccggcccagccctgcaggtatattgcaggggcctgggggcggccctggactggcgggcggttccccagtggggtgccctggaggctgccgggcagagtggagcagcttggggccgtgcccagggcggtggctgtgagtctagtttttgctttaccaagtgtacagaaatggcatttacgtttctctgatgctcccttgaagccatagaatttaggggcttttttaaaaaaataaaagaaaaatgaaaccaaaaacaaacgaacag

SEQ ID NO: 427744 - DNA, 2081 bp, Homo sapiens
tggggcgcgtatggctgccgccccccgctggcagacgctggcggcgtaaggcgcgcgggccccggagcgggcgcggcggagcgcggcgagcccggcgcctcccgtcccgaacatgcggaggccggcccaggcggcgcgggagccggagcgggggcccaagcgggcaccggagccggagcgcgagggggcgcggggcccggagcgggggtccgcgctgcgctgctgaggccgggccggccgcccagacgctgcccgcgggcccggccacggcggagccaagctgtgagccgtgagctttgaggcggtgggatgtgtcagcagaatgtctcctgcccccgagagcgaccccgaggccactgagaagagcagcgcggcctggccggcccgaacgcctgcgtctcagtagctgggagccacgggcccacgcccgcccaccggccgcagtgatgttctagccacagaggagccaagacctcaggtttccagagacttgggatttgcacggcagcagagtcaccgtggagaggccagggtatcacaaacttatggattttgacaagaaaggagggaaaggggagacggaggagggccggagaatgtccaaggccggcgggggccggagcagccacggcatccggagctcggggaccagctcgggggtcctgatggtgggccccaacttccgcgtcggcaagaagatcggctgcggcaacttcggggagctccgcctaggaaagaatctctatacaaatgaatacgtggctatcaaattggagccgatcaagtcccgggccccgcagctgcacctggagtaccggttctacaagcagctcagcgccacagagggcgtccctcaggtctactacttcggtccgtgcgggaagtacaacgccatggtgctggagctgctggggcccagcctggaggacctgttcgacctgtgcgaccggaccttcacgctcaagacggtgctgatgatcgccatccagctgatcacgcgcatggagtatgtgcacaccaagagcctaatctaccgggacgtgaagcccgagaacttcctggtgggccgcccggggaccaagcggcagcatgccatccacatcatcgacttcgggctggccaaggagtacatcgaccccgagaccaagaagcacatcccgtaccgcgagcacaagagcctgacgggcacggcgcgctacatgagcatcaacacgcacctgggcaaggagcagagccgccgcgacgacctggaggcgctgggccacatgttcatgtacttcctgcgcggcagcctcccctggcaggggctcaaggccgacacgctcaaggagcggtaccagaagatcggggacaccaaacgcgccacgcccatcgaggtgctctgcgagaacttcccagaggagatggccacgtacctgcgctatgtgcggcgcctggacttcttcgagaagcccgactatgactacctgcggaagctcttcaccgacctcttcgaccgcagtggcttcgtgttcgactatgagtacgactgggccgggaagcccctgccgacccccatcggcaccgtccacaccgacctgccctcccagcctcagctccgggacaaaacccagccgcacagcaaaaaccaggcgttgaactccaccaacggggagctgaatgcggacgaccccacggccggccactccaacgccccgatcacagcgcctgcagaggtggaggtggccgatgaaaccaaatgctgctgtttcttcaagaggagaaagagaaaatcgctgcagcgacacaagtgaccctgggcgcgtgcagccccctgaatcttctccgtgcagccccttggggcgcgaccttgtgcgaggccctcggggcccacccacagcggcccagggccagaccctggctggaagccagaacgcagactgcaggggccgcgcctggctcaggcggccccacccccgggacgtggggtcacttccttcatgtaagactttggccgaaatttctacacctgtgtctagtcctcccctccaagagcattaacactagtaatctcgtttcgggttctctgtcgttgtgtggtc

SEQ ID NO: 427745 - DNA, 1636 bp, Homo sapiens
tggggcgcgtatggctgccgccccccgctggcagacgctggcggcgtaaggcgcgcgggccccggagcgggcgcggcggagcgcggcgagcccggcgcctcccgtcccgaacatgcggaggccggcccaggcggcgcgggagccggagcgggggcccaagcgggcaccggagccggagcgcgagggggcgcggggcccggagcgggggtccgcgctgcgctgctgaggccgggccggccgcccagacgctgcccgcgggcccggccacggcggagccaagctgtgagccgtgagctttgaggcggtgggatgtgtcagcagaatgtctcctgcccccgagagcgaccccgaggccactgagaagagcagcgcggcctggccggcccgaacgcctgcgtctcagtagctgggagccacgggcccacgcccgcccaccggccgcagtgatgttctagccacagaggagccaagacctcaggtttccagagacttgggatttgcacggcagcagagtcaccgtggagaggccagggtatcacaaacttatggattttgacaagaaaggagggaaaggggagacggaggagggccggagaatgtccaaggccggcgggggccggagcagccacggcatccggagctcggggaccagctcgggggtcctgatggtgggccccaacttccgcgtcggcaagaagatcggctgcggcaacttcggggagctccgcctaggaaagaatctctatacaaatgaatacgtggctatcaaattggagccgatcaagtcccgggccccgcagctgcacctggagtaccggttctacaagcagctcagcgccacagagggcgtccctcaggtctactacttcggtccgtgcgggaagtacaacgccatggtgctggagctgctggggcccagcctggaggacctgttcgacctgtgcgaccggaccttcacgctcaagacggtgctgatgatcgccatccagctgatcacgcgcatggagtatgtgcacaccaagagcctaatctaccgggacgtgaagcccgagaacttcctggtgggccgcccggggaccaagcggcagcatgccatccacatcatcgacttcgggctggccaaggagtacatcgaccccgagaccaagaagcacatcccgtaccgcgagcacaagagcctgacgggcacggcgcgctacatgagcatcaacacgcacctgggcaaggagcagagccgccgcgacgacctggaggcgctgggccacatgttcatgtacttcctgcgcggcagcctcccctggcaggggctcaaggccgacacgctcaaggagcggtaccagaagatcggggacaccaaacgcgccacgcccatcgaggtgctctgcgagaacttcccagaggagatggccacgtacctgaagaatattggggccctgcctgtggacatggtgcgtctatactttgcggaaactgtgctggccctggagtacttacacaactatggcatcgtgcaccgtgacctcaagcctgacaacctcctaattacatccatggggcacatcaagctcacggactttggactgtccaaaattggcctcatacaagttcgttgtcagactcatgaggccaattttgg

SEQ ID NO: 427746 - DNA, 494 bp, Homo sapiens
gctcttcaggataaatgatcaaggcctaagaccttttaaaaataggtaacacttcattaggtgctacttggccccggccatgttgctggaccgtaggagatactgatccacacttccttttcgccggctcacagtccgcctctcattgtcgaacatgcgctgcaactgcagagccaactgtcggtcttcttcctcttgctgaagcttctgctccatctctcgcaggactgggtctgttggggccagacccacctccccactggtttgtcgcagttttttaagggagccattttgttctaagtgcttggtcttgcagtgtcttttccggcctcgacgcaaagaaggaagtggctcttcacttaggctctcaactagaacaccattagtcagatcaaaatgatttaatgtcttcaattgttgctttgttttgaggactccacccaaaacactgttttggggtagcactgaattaactgtggtgattttcatggctc

SEQ ID NO: 427747 - DNA, 6551 bp, Homo sapiens
agcggagtcgtcccggccgtcggttgccgcctacactgtctgccgtcgcgtcgcagttactaaggcgtggggaagatagcggcaggcaccgcagtggagcggctccgagatccccggggggctcgcaggcgcgcatccctcctgactgggacgtcgcctccgcagacccctcggaggctgaagcgacgccggaggcaggccaaggacactggttagtggttcagaaaggtaacctcaagaagaagcccaagggtttggttggagcacaagctgaacgtcgggaaagcctgaaggcgacttcttttgagttcaaggggaagaaagagtctcggcgggaaaatcaggtggaccttcctggacatatcctggaccaggcttttctgctgaagcaccactgtgtgaggaagccatcagatctgtgcaccattaatgtgagtggcctgaagttctccaaggccaaggaaaatgacttcaagcattttcattctgtgatttatatcaatgcctcagaaaacctgctgcctctagaggcatttcacacgtttccagccctaaaggaactggatctcgcatttaatggcatcaaaactatctacgtgaaatatggagactttaagttattagaattcttggacctttccttcaacagcctgactgtggaggccatctgtgatttggggattctgccacacctccgtgtcctgctcctcacaggcaatggccttacctccctgccgcccaatttggccgtcgcagaacaggaggcatctgtaacatcgctgacaagcaagaggtacatcctgaggttcccagcgctggagacactgatgctggatgacaacagactctccaaccccagttgctttgccagcctggctgggctcaggagactgaagaagttaagcttggatgaaaacaggattatcaggatcccatacctacagcaagttcagctctatgacgagtcagtagactggaatggaggcaggggaagtccccataaagagccccaattcatgctgcagtccaagccaaggatgcttgaggactcagatgagcaactggattatactgtactgcccatgaaaaaggatgttgaccggacagatcgcaaaagaggatgctgtcctaccagtagctctcttcccatctctctgtgagttcgtctttcataacaaccctctggtggcccatacacgaggggtccctccactgctgaagagcttcctccaggagcgactgggaatccacttaattcgaaggaagatagtaaagcctaagcatcatgttttgatgtctcggaaggaatcatggaaggtgaaaagcgaaatcccaaaggtgccgaagcagcctctggtgctccatcacccgcgcatgacgacaaccaagtctccctcaaaggatatgctagagccagaggcagagctggctgaagatctgcccactaccaaaagcacttctgtggagtcagagatgcccactgagaacctggaaggccattccccgtcttgccggaccttcgtgccactgcctcccatctgctccaactccactgtgcatagtgaagagaccctgtcccacctgagtgacacaactgtccgcctcagcccagagcgcccatcagatgaggactccaagagcacagagtccatcttcctgacccaggtgagtgaactgccttcctccgtcatccataaggatgatttagagttaaaggagaaagaccaaaagaaaccaccaacggcacccagagaggtgaaagggactcggaggaaactcccaactgccttccttcccagcaagtaccacggctatgaagaactgctgacagccaagcctgatccagccttcattgagccaaagggaatccagaagaatgcacaagccctgcaacaaatgctgaagcacccactcctgtgccactcctccaagcccaagctggacactcttcagaaaccctatgttcacaaagagaaacgggcccagagaatcccgattccacccccaaagaagactagagcccaacttctggatgacatcttcattcgcttgcgggatccccggaacattacagaggctccactaggtgctgtcctgcaccagtggacagaacggcggctggtgaaccacaagcagtacctggaggccaagaggctgttgaaggagttccaggcacgttaccggcagctggtgagtggctctctgcgcacagtgttcgggactaccccgctccccatggcctgcccagcgctgagtgagagccagcccaagttcggccacttcctcgagttcatggatgagttctgccaggagcccacagccagtgactcacaaggctagagctgtgcatgggggctgtgtgcaccacccggcctgtgccccagctctccccgagggctctgtgccctggaccgcacctcaaggttgaccagccggccacaggcctcagagctcagctgggccccacttgctggccacaaggtggcatccccttgtcaggatctcccctccttggcccaggcatgacctggtgcctggcccagcggcaataaagagtgggtgcacagggcaatagactgggtgccacatgcattctttcttggaacccaggccacagcagcattgtcacacttccctctaaaaatggttttccagttcagatgcaacagggatacatttgttctctgttgtatgagaaactgacaccaaggggatcttaacaaattcctgaacaatggctccaaaaaaggatatttttaaaaaccagatcttgtgagtacagccctaatgtgcagggacagtgtcatcctgtatattcgttctttactcagactctttcttggttccttcattaggagcatgaatggttgaatgtgaacatgacagtaaattggagcaaactgtaaactggacataacttatgccaaaagacgtagttgtacaccatggaaaccccatccctgctcctaatctctactgccattctgaatgccaaagcaagacatccaacatggggcatctcccagagcacatacagcaccaaaaatccacacacagcctaagcttaacccatgtttttgtctgagattgttcaccagagacaagactctgactataaacagaacatccactttcatgagtttcctttactgtattctcaacttgggccttgcttcaagcaggcaaacatacattgaagaatgcactttggtactgtttaaataacaacacatcagcccacttgattccatgccatgtccttgctgacagaaacatccccaacagggcatgccctggtccaagtcctctgtctttgtcaaaatgctcttctgatgagttggagaggaggcagccagcagtggcagtccacaaggatccaggtaccttctccaatcctaaagcagacagcaggttgaataaaaccaatacacaacctattttctaggcaggaggggaaaaggcccttaggacaataatatttgtacaaagagttgagagtaaacaaacagtatatcaggttcaaaaaaaaaaaaactattcgttggcatttaaatttttttcccttgcatagtatctattctctcactaggacttttaagtgctctgctggaggctcagcgttggtaataccatgtttgatgcaaacttgaacccaatgctctcattggtggcacagctttggagggtggtggccccaagaaggggcaatctgcctgctgctatattaatctggaaccagggccaacagctactcttgaactatggtatttgaagagcgagttcattgcctgttttaccttaaatgacaggaaaggaagatgaacaaaccttgctttgccttggcttcaaactagttcttgatttaagacaccagaaagggagagagggagtctgcttagagtttgaggttgcctctcacaagatgacagttaaaagttgccaccttacttaaaaggcattaaggaggcatttactcacaaaggagagagagtaaatttttttcttaagagggaaaaaaatactgataatacatagaacaatctgcacatccagtcttggcactttttccaatttgactgatctctaaactggtgacccttgcatatatcttagtctcttttctacaatcttcttcagaaagctacagcagctaacaatcatgtataaagatgcatttcctagatcatcttcagaagaaaatctcttcagcactttccctagaatctgtctcctgaccaccccgccccagacctgctttctcttttgagaattcataaccaggtatgtttagataccagttcaaaagaccactctatgggttgatgaggaaaaggctgcctgaggacaatttaagaccataatgagtttccaatttttaaagaaaatttggctagctggcttttaattcttaattaaaatcattaaatttaattaaaattattccaatcaaaatatatcactttccaagattccacattcatattacttacttatactatggagactttctctacctgagcatgtattcaggggctataggtacatttaactctaactaactgaaaaaaatcaggaagaaaaaactattaaaataaaataacctcctaaatcatttgggggtatccccatcattggtgcgtgtgtctgcgtgtgtcaaactttaatgattatttattcagaccctggaaaaccacactataaaatagggcactggatcacaagttcgtttggttaaaaaaaaaaaaaaaaaaagtgggggcggggggcagagaagaagtttaacttggatgatttccatgcccattccagctgtaacattctatgactgtgacccagcctttgttctcttttctcactctcctactagacatttcaatgaaaagttaggcaggaaaaaggaaaggaatcccaagttgctgccagctctgatgagagatcaggttgggggagagattaggtggttactgaattgaggtgtgggcctcccctgaccatgtcagtgatccacaacccacctcacttcttggggcttaagctaaaagcagcttctgaagagatgttaatgtcctgtaatcactagaggagaaaattcattctccttccataacattacttagtaaaggaaaagcggtggtgcaatcaaattcacaaataccaatggggtctctaaaatgtagaatgcagcttgctgggtgctggtcagttttctaaatgggaccagaaatggctttcctaagaccataaatgaactctccagccacacatacattcaaatgcattccattagacattgagctcctcaagagcaggaactgctttatctccacagtccagctcagggttggctcaagtctgaagctcagtaaatgtctgtcaaatagaaaagaaaggatgagccttcggtcatcagctacatgagtcaggcacggtggcagcttcccattttagtcagtttgccagtttgtaaccagacagtaatcaattaagagctttaatctcttaaggacatttttcctttagggaaaatgaacaaaaaataaaacatttattaccagtgcttcttccaagcaaaaatttaaaaattaaattaaaatttaaaaaataagtgaagccacttaggagtttccccggcaagcctcacccaagaagacttaaccttttttaaaaagaggcaaatagattaaaggggccaggggctggatgcataatccccctgatctgataccaacccaacaggcccagatgacttcttccagcagatacaatcaatgggtcaagaacattttctcaaagtttctttccctctctatggaaaagagctgacagcccccttctaagggcaccacatttcctggatttcccctcagactgaccttcaccctcccccctaacttcccctttaataataaaaaaacccagaatgcatatatacaaggaacagagtaagacatgggtaatttgtatggtgaactgggcttcaatgatttgtgaggaatttgttttgtgaaatcctgcacctcttattctagctcacaaacccttcccatcgttctgtttccttccttgtccttttctgttcccccaaataatacacatcaacatatcgacttttaaccaacttcagaatcatggaaggagagagggagatttttcagaaagaaaagcattcaggttttagttattaaggatgggaagcatcttaaaattcagataataccttagtggtttttccttcctccaaagccaacctgattaaagatcaaccctcctccctccttaacctagaccactctacctatatttgaaggactgttgctcagcaggaagtttagaaaacaactgtcaataccatcctaggcatcactgtaggtacaaggggggaaggcagtaagctggacctagagtttggactatttgcttaacaagaatttgttcttcattctgcacttgttacaactgctatgcaattcttaaaatgaaagtattaatttggggaaatatttaaaatatatatcttttatctattaaaaatatttctttttaccaaagac

SEQ ID NO: 427748 - DNA, 6619 bp, Homo sapiens
agcggagtcgtcccggccgtcggttgccgcctacactgtctgccgtcgcgtcgcagttactaaggcgtggggaagatagcggcaggcaccgcagtggagcggctccgagatccccggggggctcgcaggcgcgcatccctcctgactgggacgtcgcctccgcagacccctcggaggctgaagcgacgccggaggcaggcaaagaaacaagtgaagaaacaaaaaaaaaaggaagttaaggggccattcccaaagtcaaagatcaagccaaggacactggttagtggttcagaaaggtaacctcaagaagaagcccaagggtttggttggagcacaagctgaacgtcgggaaagcctgaaggcgacttcttttgagttcaaggggaagaaagagtctcggcgggaaaatcaggtggaccttcctggacatatcctggaccaggcttttctgctgaagcaccactgtgtgaggaagccatcagatctgtgcaccattaatgtgagtggcctgaagttctccaaggccaaggaaaatgacttcaagcattttcattctgtgatttatatcaatgcctcagaaaacctgctgcctctagaggcatttcacacgtttccagccctaaaggaactggatctcgcatttaatggcatcaaaactatctacgtgaaatatggagactttaagttattagaattcttggacctttccttcaacagcctgactgtggaggccatctgtgatttggggattctgccacacctccgtgtcctgctcctcacaggcaatggccttacctccctgccgcccaatttggccgtcgcagaacaggaggcatctgtaacatcgctgacaagcaagaggtacatcctgaggttcccagcgctggagacactgatgctggatgacaacagactctccaaccccagttgctttgccagcctggctgggctcaggagactgaagaagttaagcttggatgaaaacaggattatcaggatcccatacctacagcaagttcagctctatgacgagtcagtagactggaatggaggcaggggaagtccccataaagagccccaattcatgctgcagtccaagccaaggatgcttgaggactcagatgagcaactggattatactgtactgcccatgaaaaaggatgttgaccggacagatcgcaaaagaggatgctgtcctaccagtagctctcttcccatctctctgtgagttcgtctttcataacaaccctctggtggcccatacacgaggggtccctccactgctgaagagcttcctccaggagcgactgggaatccacttaattcgaaggaagatagtaaagcctaagcatcatgttttgatgtctcggaaggaatcatggaaggtgaaaagcgaaatcccaaaggtgccgaagcagcctctggtgctccatcacccgcgcatgacgacaaccaagtctccctcaaaggatatgctagagccagaggcagagctggctgaagatctgcccactaccaaaagcacttctgtggagtcagagatgcccactgagaacctggaaggccattccccgtcttgccggaccttcgtgccactgcctcccatctgctccaactccactgtgcatagtgaagagaccctgtcccacctgagtgacacaactgtccgcctcagcccagagcgcccatcagatgaggactccaagagcacagagtccatcttcctgacccaggtgagtgaactgccttcctccgtcatccataaggatgatttagagttaaaggagaaagaccaaaagaaaccaccaacggcacccagagaggtgaaagggactcggaggaaactcccaactgccttccttcccagcaagtaccacggctatgaagaactgctgacagccaagcctgatccagccttcattgagccaaagggaatccagaagaatgcacaagccctgcaacaaatgctgaagcacccactcctgtgccactcctccaagcccaagctggacactcttcagaaaccctatgttcacaaagagaaacgggcccagagaatcccgattccacccccaaagaagactagagcccaacttctggatgacatcttcattcgcttgcgggatccccggaacattacagaggctccactaggtgctgtcctgcaccagtggacagaacggcggctggtgaaccacaagcagtacctggaggccaagaggctgttgaaggagttccaggcacgttaccggcagctggtgagtggctctctgcgcacagtgttcgggactaccccgctccccatggcctgcccagcgctgagtgagagccagcccaagttcggccacttcctcgagttcatggatgagttctgccaggagcccacagccagtgactcacaaggctagagctgtgcatgggggctgtgtgcaccacccggcctgtgccccagctctccccgagggctctgtgccctggaccgcacctcaaggttgaccagccggccacaggcctcagagctcagctgggccccacttgctggccacaaggtggcatccccttgtcaggatctcccctccttggcccaggcatgacctggtgcctggcccagcggcaataaagagtgggtgcacagggcaatagactgggtgccacatgcattctttcttggaacccaggccacagcagcattgtcacacttccctctaaaaatggttttccagttcagatgcaacagggatacatttgttctctgttgtatgagaaactgacaccaaggggatcttaacaaattcctgaacaatggctccaaaaaaggatatttttaaaaaccagatcttgtgagtacagccctaatgtgcagggacagtgtcatcctgtatattcgttctttactcagactctttcttggttccttcattaggagcatgaatggttgaatgtgaacatgacagtaaattggagcaaactgtaaactggacataacttatgccaaaagacgtagttgtacaccatggaaaccccatccctgctcctaatctctactgccattctgaatgccaaagcaagacatccaacatggggcatctcccagagcacatacagcaccaaaaatccacacacagcctaagcttaacccatgtttttgtctgagattgttcaccagagacaagactctgactataaacagaacatccactttcatgagtttcctttactgtattctcaacttgggccttgcttcaagcaggcaaacatacattgaagaatgcactttggtactgtttaaataacaacacatcagcccacttgattccatgccatgtccttgctgacagaaacatccccaacagggcatgccctggtccaagtcctctgtctttgtcaaaatgctcttctgatgagttggagaggaggcagccagcagtggcagtccacaaggatccaggtaccttctccaatcctaaagcagacagcaggttgaataaaaccaatacacaacctattttctaggcaggaggggaaaaggcccttaggacaataatatttgtacaaagagttgagagtaaacaaacagtatatcaggttcaaaaaaaaaaaaactattcgttggcatttaaatttttttcccttgcatagtatctattctctcactaggacttttaagtgctctgctggaggctcagcgttggtaataccatgtttgatgcaaacttgaacccaatgctctcattggtggcacagctttggagggtggtggccccaagaaggggcaatctgcctgctgctatattaatctggaaccagggccaacagctactcttgaactatggtatttgaagagcgagttcattgcctgttttaccttaaatgacaggaaaggaagatgaacaaaccttgctttgccttggcttcaaactagttcttgatttaagacaccagaaagggagagagggagtctgcttagagtttgaggttgcctctcacaagatgacagttaaaagttgccaccttacttaaaaggcattaaggaggcatttactcacaaaggagagagagtaaatttttttcttaagagggaaaaaaatactgataatacatagaacaatctgcacatccagtcttggcactttttccaatttgactgatctctaaactggtgacccttgcatatatcttagtctcttttctacaatcttcttcagaaagctacagcagctaacaatcatgtataaagatgcatttcctagatcatcttcagaagaaaatctcttcagcactttccctagaatctgtctcctgaccaccccgccccagacctgctttctcttttgagaattcataaccaggtatgtttagataccagttcaaaagaccactctatgggttgatgaggaaaaggctgcctgaggacaatttaagaccataatgagtttccaatttttaaagaaaatttggctagctggcttttaattcttaattaaaatcattaaatttaattaaaattattccaatcaaaatatatcactttccaagattccacattcatattacttacttatactatggagactttctctacctgagcatgtattcaggggctataggtacatttaactctaactaactgaaaaaaatcaggaagaaaaaactattaaaataaaataacctcctaaatcatttgggggtatccccatcattggtgcgtgtgtctgcgtgtgtcaaactttaatgattatttattcagaccctggaaaaccacactataaaatagggcactggatcacaagttcgtttggttaaaaaaaaaaaaaaaaaaagtgggggcggggggcagagaagaagtttaacttggatgatttccatgcccattccagctgtaacattctatgactgtgacccagcctttgttctcttttctcactctcctactagacatttcaatgaaaagttaggcaggaaaaaggaaaggaatcccaagttgctgccagctctgatgagagatcaggttgggggagagattaggtggttactgaattgaggtgtgggcctcccctgaccatgtcagtgatccacaacccacctcacttcttggggcttaagctaaaagcagcttctgaagagatgttaatgtcctgtaatcactagaggagaaaattcattctccttccataacattacttagtaaaggaaaagcggtggtgcaatcaaattcacaaataccaatggggtctctaaaatgtagaatgcagcttgctgggtgctggtcagttttctaaatgggaccagaaatggctttcctaagaccataaatgaactctccagccacacatacattcaaatgcattccattagacattgagctcctcaagagcaggaactgctttatctccacagtccagctcagggttggctcaagtctgaagctcagtaaatgtctgtcaaatagaaaagaaaggatgagccttcggtcatcagctacatgagtcaggcacggtggcagcttcccattttagtcagtttgccagtttgtaaccagacagtaatcaattaagagctttaatctcttaaggacatttttcctttagggaaaatgaacaaaaaataaaacatttattaccagtgcttcttccaagcaaaaatttaaaaattaaattaaaatttaaaaaataagtgaagccacttaggagtttccccggcaagcctcacccaagaagacttaaccttttttaaaaagaggcaaatagattaaaggggccaggggctggatgcataatccccctgatctgataccaacccaacaggcccagatgacttcttccagcagatacaatcaatgggtcaagaacattttctcaaagtttctttccctctctatggaaaagagctgacagcccccttctaagggcaccacatttcctggatttcccctcagactgaccttcaccctcccccctaacttcccctttaataataaaaaaacccagaatgcatatatacaaggaacagagtaagacatgggtaatttgtatggtgaactgggcttcaatgatttgtgaggaatttgttttgtgaaatcctgcacctcttattctagctcacaaacccttcccatcgttctgtttccttccttgtccttttctgttcccccaaataatacacatcaacatatcgacttttaaccaacttcagaatcatggaaggagagagggagatttttcagaaagaaaagcattcaggttttagttattaaggatgggaagcatcttaaaattcagataataccttagtggtttttccttcctccaaagccaacctgattaaagatcaaccctcctccctccttaacctagaccactctacctatatttgaaggactgttgctcagcaggaagtttagaaaacaactgtcaataccatcctaggcatcactgtaggtacaaggggggaaggcagtaagctggacctagagtttggactatttgcttaacaagaatttgttcttcattctgcacttgttacaactgctatgcaattcttaaaatgaaagtattaatttggggaaatatttaaaatatatatcttttatctattaaaaatatttctttttaccaaagac

SEQ ID NO: 427749 - DNA, 5747 bp, Homo sapiens
ccctagtatttgatgtaggctacatatccagcatggaaaaaagaggaaaaactcttagctcttaaacacgcaacagtgatggtggaatttcagacaggaggggcaaggtactctgtgcatgagtaggtattattacagggtcaaggcatcacccagcagtgagtcccatccacagcagcatgtcttacccaataccacccccaatcctagcaagcatgtagccctgcagtgaggggcctagacatacctgggtagaggtgaggggtggtgtcaacctgagagtctctcctgcattcattacagatcgcaaaagaggatgctgtcctaccagtagctctcttcccatctctctgtgagttcgtctttcataacaaccctctggtggcccatacacgaggggtccctccactgctgaagagcttcctccaggagcgactgggaatccacttaattcgaaggaagatagtaaagcctaagcatcatgttttgatgtctcggaaggaatcatggaaggtgaaaagcgaaatcccaaaggtgccgaagcagcctctggtgctccatcacccgcgcatgacgacaaccaagtctccctcaaaggatatgctagagccagaggcagagctggctgaagatctgcccactaccaaaagcacttctgtggagtcagagatgcccactgagaacctggaaggccattccccgtcttgccggaccttcgtgccactgcctcccatctgctccaactccactgtgcatagtgaagagaccctgtcccacctgagtgacacaactgtccgcctcagcccagagcgcccatcagatgaggactccaagagcacagagtccatcttcctgacccaggtgagtgaactgccttcctccgtcatccataaggatgatttagagttaaaggagaaagaccaaaagaaaccaccaacggcacccagagaggtgaaagggactcggaggaaactcccaactgccttccttcccagcaagtaccacggctatgaagaactgctgacagccaagcctgatccagccttcattgagccaaagggaatccagaagaatgcacaagccctgcaacaaatgctgaagcacccactcctgtgccactcctccaagcccaagctggacactcttcagaaaccctatgttcacaaagagaaacgggcccagagaatcccgattccacccccaaagaagactagagcccaacttctggatgacatcttcattcgcttgcgggatccccggaacattacagaggctccactaggtgctgtcctgcaccagtggacagaacggcggctggtgaaccacaagcagtacctggaggccaagaggctgttgaaggagttccaggcacgttaccggcagctggtgagtggctctctgcgcacagtgttcgggactaccccgctccccatggcctgcccagcgctgagtgagagccagcccaagttcggccacttcctcgagttcatggatgagttctgccaggagcccacagccagtgactcacaaggctagagctgtgcatgggggctgtgtgcaccacccggcctgtgccccagctctccccgagggctctgtgccctggaccgcacctcaaggttgaccagccggccacaggcctcagagctcagctgggccccacttgctggccacaaggtggcatccccttgtcaggatctcccctccttggcccaggcatgacctggtgcctggcccagcggcaataaagagtgggtgcacagggcaatagactgggtgccacatgcattctttcttggaacccaggccacagcagcattgtcacacttccctctaaaaatggttttccagttcagatgcaacagggatacatttgttctctgttgtatgagaaactgacaccaaggggatcttaacaaattcctgaacaatggctccaaaaaaggatatttttaaaaaccagatcttgtgagtacagccctaatgtgcagggacagtgtcatcctgtatattcgttctttactcagactctttcttggttccttcattaggagcatgaatggttgaatgtgaacatgacagtaaattggagcaaactgtaaactggacataacttatgccaaaagacgtagttgtacaccatggaaaccccatccctgctcctaatctctactgccattctgaatgccaaagcaagacatccaacatggggcatctcccagagcacatacagcaccaaaaatccacacacagcctaagcttaacccatgtttttgtctgagattgttcaccagagacaagactctgactataaacagaacatccactttcatgagtttcctttactgtattctcaacttgggccttgcttcaagcaggcaaacatacattgaagaatgcactttggtactgtttaaataacaacacatcagcccacttgattccatgccatgtccttgctgacagaaacatccccaacagggcatgccctggtccaagtcctctgtctttgtcaaaatgctcttctgatgagttggagaggaggcagccagcagtggcagtccacaaggatccaggtaccttctccaatcctaaagcagacagcaggttgaataaaaccaatacacaacctattttctaggcaggaggggaaaaggcccttaggacaataatatttgtacaaagagttgagagtaaacaaacagtatatcaggttcaaaaaaaaaaaaactattcgttggcatttaaatttttttcccttgcatagtatctattctctcactaggacttttaagtgctctgctggaggctcagcgttggtaataccatgtttgatgcaaacttgaacccaatgctctcattggtggcacagctttggagggtggtggccccaagaaggggcaatctgcctgctgctatattaatctggaaccagggccaacagctactcttgaactatggtatttgaagagcgagttcattgcctgttttaccttaaatgacaggaaaggaagatgaacaaaccttgctttgccttggcttcaaactagttcttgatttaagacaccagaaagggagagagggagtctgcttagagtttgaggttgcctctcacaagatgacagttaaaagttgccaccttacttaaaaggcattaaggaggcatttactcacaaaggagagagagtaaatttttttcttaagagggaaaaaaatactgataatacatagaacaatctgcacatccagtcttggcactttttccaatttgactgatctctaaactggtgacccttgcatatatcttagtctcttttctacaatcttcttcagaaagctacagcagctaacaatcatgtataaagatgcatttcctagatcatcttcagaagaaaatctcttcagcactttccctagaatctgtctcctgaccaccccgccccagacctgctttctcttttgagaattcataaccaggtatgtttagataccagttcaaaagaccactctatgggttgatgaggaaaaggctgcctgaggacaatttaagaccataatgagtttccaatttttaaagaaaatttggctagctggcttttaattcttaattaaaatcattaaatttaattaaaattattccaatcaaaatatatcactttccaagattccacattcatattacttacttatactatggagactttctctacctgagcatgtattcaggggctataggtacatttaactctaactaactgaaaaaaatcaggaagaaaaaactattaaaataaaataacctcctaaatcatttgggggtatccccatcattggtgcgtgtgtctgcgtgtgtcaaactttaatgattatttattcagaccctggaaaaccacactataaaatagggcactggatcacaagttcgtttggttaaaaaaaaaaaaaaaaaaagtgggggcggggggcagagaagaagtttaacttggatgatttccatgcccattccagctgtaacattctatgactgtgacccagcctttgttctcttttctcactctcctactagacatttcaatgaaaagttaggcaggaaaaaggaaaggaatcccaagttgctgccagctctgatgagagatcaggttgggggagagattaggtggttactgaattgaggtgtgggcctcccctgaccatgtcagtgatccacaacccacctcacttcttggggcttaagctaaaagcagcttctgaagagatgttaatgtcctgtaatcactagaggagaaaattcattctccttccataacattacttagtaaaggaaaagcggtggtgcaatcaaattcacaaataccaatggggtctctaaaatgtagaatgcagcttgctgggtgctggtcagttttctaaatgggaccagaaatggctttcctaagaccataaatgaactctccagccacacatacattcaaatgcattccattagacattgagctcctcaagagcaggaactgctttatctccacagtccagctcagggttggctcaagtctgaagctcagtaaatgtctgtcaaatagaaaagaaaggatgagccttcggtcatcagctacatgagtcaggcacggtggcagcttcccattttagtcagtttgccagtttgtaaccagacagtaatcaattaagagctttaatctcttaaggacatttttcctttagggaaaatgaacaaaaaataaaacatttattaccagtgcttcttccaagcaaaaatttaaaaattaaattaaaatttaaaaaataagtgaagccacttaggagtttccccggcaagcctcacccaagaagacttaaccttttttaaaaagaggcaaatagattaaaggggccaggggctggatgcataatccccctgatctgataccaacccaacaggcccagatgacttcttccagcagatacaatcaatgggtcaagaacattttctcaaagtttctttccctctctatggaaaagagctgacagcccccttctaagggcaccacatttcctggatttcccctcagactgaccttcaccctcccccctaacttcccctttaataataaaaaaacccagaatgcatatatacaaggaacagagtaagacatgggtaatttgtatggtgaactgggcttcaatgatttgtgaggaatttgttttgtgaaatcctgcacctcttattctagctcacaaacccttcccatcgttctgtttccttccttgtccttttctgttcccccaaataatacacatcaacatatcgacttttaaccaacttcagaatcatggaaggagagagggagatttttcagaaagaaaagcattcaggttttagttattaaggatgggaagcatcttaaaattcagataataccttagtggtttttccttcctccaaagccaacctgattaaagatcaaccctcctccctccttaacctagaccactctacctatatttgaaggactgttgctcagcaggaagtttagaaaacaactgtcaataccatcctaggcatcactgtaggtacaaggggggaaggcagtaagctggacctagagtttggactatttgcttaacaagaatttgttcttcattctgcacttgttacaactgctatgcaattcttaaaatgaaagtattaatttggggaaatatttaaaatatatatcttttatctattaaaaatatttctttttaccaaagac

SEQ ID NO: 427750 - DNA, 5589 bp, Homo sapiens
ctttattatcttggacaaattccttagcctctctgtgcctcagtttccttgcctattgaatgggaataatggtaggaggtaggaattctcctaggaggtaggaattctcgacctacctcctagggttgagaataagtttcagtaatacatgtaaagcaatttgaatagtgcctggcacatagtaagccccagtataaattttagctaatagtaatcttattttcccatcatggcaccaggggtccctccactgctgaagagcttcctccaggagcgactgggaatccacttaattcgaaggaagatagtaaagcctaagcatcatgttttgatgtctcggaaggaatcatggaaggtgaaaagcgaaatcccaaaggtgccgaagcagcctctggtgctccatcacccgcgcatgacgacaaccaagtctccctcaaaggatatgctagagccagaggcagagctggctgaagatctgcccactaccaaaagcacttctgtggagtcagagatgcccactgagaacctggaaggccattccccgtcttgccggaccttcgtgccactgcctcccatctgctccaactccactgtgcatagtgaagagaccctgtcccacctgagtgacacaactgtccgcctcagcccagagcgcccatcagatgaggactccaagagcacagagtccatcttcctgacccaggtgagtgaactgccttcctccgtcatccataaggatgatttagagttaaaggagaaagaccaaaagaaaccaccaacggcacccagagaggtgaaagggactcggaggaaactcccaactgccttccttcccagcaagtaccacggctatgaagaactgctgacagccaagcctgatccagccttcattgagccaaagggaatccagaagaatgcacaagccctgcaacaaatgctgaagcacccactcctgtgccactcctccaagcccaagctggacactcttcagaaaccctatgttcacaaagagaaacgggcccagagaatcccgattccacccccaaagaagactagagcccaacttctggatgacatcttcattcgcttgcgggatccccggaacattacagaggctccactaggtgctgtcctgcaccagtggacagaacggcggctggtgaaccacaagcagtacctggaggccaagaggctgttgaaggagttccaggcacgttaccggcagctggtgagtggctctctgcgcacagtgttcgggactaccccgctccccatggcctgcccagcgctgagtgagagccagcccaagttcggccacttcctcgagttcatggatgagttctgccaggagcccacagccagtgactcacaaggctagagctgtgcatgggggctgtgtgcaccacccggcctgtgccccagctctccccgagggctctgtgccctggaccgcacctcaaggttgaccagccggccacaggcctcagagctcagctgggccccacttgctggccacaaggtggcatccccttgtcaggatctcccctccttggcccaggcatgacctggtgcctggcccagcggcaataaagagtgggtgcacagggcaatagactgggtgccacatgcattctttcttggaacccaggccacagcagcattgtcacacttccctctaaaaatggttttccagttcagatgcaacagggatacatttgttctctgttgtatgagaaactgacaccaaggggatcttaacaaattcctgaacaatggctccaaaaaaggatatttttaaaaaccagatcttgtgagtacagccctaatgtgcagggacagtgtcatcctgtatattcgttctttactcagactctttcttggttccttcattaggagcatgaatggttgaatgtgaacatgacagtaaattggagcaaactgtaaactggacataacttatgccaaaagacgtagttgtacaccatggaaaccccatccctgctcctaatctctactgccattctgaatgccaaagcaagacatccaacatggggcatctcccagagcacatacagcaccaaaaatccacacacagcctaagcttaacccatgtttttgtctgagattgttcaccagagacaagactctgactataaacagaacatccactttcatgagtttcctttactgtattctcaacttgggccttgcttcaagcaggcaaacatacattgaagaatgcactttggtactgtttaaataacaacacatcagcccacttgattccatgccatgtccttgctgacagaaacatccccaacagggcatgccctggtccaagtcctctgtctttgtcaaaatgctcttctgatgagttggagaggaggcagccagcagtggcagtccacaaggatccaggtaccttctccaatcctaaagcagacagcaggttgaataaaaccaatacacaacctattttctaggcaggaggggaaaaggcccttaggacaataatatttgtacaaagagttgagagtaaacaaacagtatatcaggttcaaaaaaaaaaaaactattcgttggcatttaaatttttttcccttgcatagtatctattctctcactaggacttttaagtgctctgctggaggctcagcgttggtaataccatgtttgatgcaaacttgaacccaatgctctcattggtggcacagctttggagggtggtggccccaagaaggggcaatctgcctgctgctatattaatctggaaccagggccaacagctactcttgaactatggtatttgaagagcgagttcattgcctgttttaccttaaatgacaggaaaggaagatgaacaaaccttgctttgccttggcttcaaactagttcttgatttaagacaccagaaagggagagagggagtctgcttagagtttgaggttgcctctcacaagatgacagttaaaagttgccaccttacttaaaaggcattaaggaggcatttactcacaaaggagagagagtaaatttttttcttaagagggaaaaaaatactgataatacatagaacaatctgcacatccagtcttggcactttttccaatttgactgatctctaaactggtgacccttgcatatatcttagtctcttttctacaatcttcttcagaaagctacagcagctaacaatcatgtataaagatgcatttcctagatcatcttcagaagaaaatctcttcagcactttccctagaatctgtctcctgaccaccccgccccagacctgctttctcttttgagaattcataaccaggtatgtttagataccagttcaaaagaccactctatgggttgatgaggaaaaggctgcctgaggacaatttaagaccataatgagtttccaatttttaaagaaaatttggctagctggcttttaattcttaattaaaatcattaaatttaattaaaattattccaatcaaaatatatcactttccaagattccacattcatattacttacttatactatggagactttctctacctgagcatgtattcaggggctataggtacatttaactctaactaactgaaaaaaatcaggaagaaaaaactattaaaataaaataacctcctaaatcatttgggggtatccccatcattggtgcgtgtgtctgcgtgtgtcaaactttaatgattatttattcagaccctggaaaaccacactataaaatagggcactggatcacaagttcgtttggttaaaaaaaaaaaaaaaaaaagtgggggcggggggcagagaagaagtttaacttggatgatttccatgcccattccagctgtaacattctatgactgtgacccagcctttgttctcttttctcactctcctactagacatttcaatgaaaagttaggcaggaaaaaggaaaggaatcccaagttgctgccagctctgatgagagatcaggttgggggagagattaggtggttactgaattgaggtgtgggcctcccctgaccatgtcagtgatccacaacccacctcacttcttggggcttaagctaaaagcagcttctgaagagatgttaatgtcctgtaatcactagaggagaaaattcattctccttccataacattacttagtaaaggaaaagcggtggtgcaatcaaattcacaaataccaatggggtctctaaaatgtagaatgcagcttgctgggtgctggtcagttttctaaatgggaccagaaatggctttcctaagaccataaatgaactctccagccacacatacattcaaatgcattccattagacattgagctcctcaagagcaggaactgctttatctccacagtccagctcagggttggctcaagtctgaagctcagtaaatgtctgtcaaatagaaaagaaaggatgagccttcggtcatcagctacatgagtcaggcacggtggcagcttcccattttagtcagtttgccagtttgtaaccagacagtaatcaattaagagctttaatctcttaaggacatttttcctttagggaaaatgaacaaaaaataaaacatttattaccagtgcttcttccaagcaaaaatttaaaaattaaattaaaatttaaaaaataagtgaagccacttaggagtttccccggcaagcctcacccaagaagacttaaccttttttaaaaagaggcaaatagattaaaggggccaggggctggatgcataatccccctgatctgataccaacccaacaggcccagatgacttcttccagcagatacaatcaatgggtcaagaacattttctcaaagtttctttccctctctatggaaaagagctgacagcccccttctaagggcaccacatttcctggatttcccctcagactgaccttcaccctcccccctaacttcccctttaataataaaaaaacccagaatgcatatatacaaggaacagagtaagacatgggtaatttgtatggtgaactgggcttcaatgatttgtgaggaatttgttttgtgaaatcctgcacctcttattctagctcacaaacccttcccatcgttctgtttccttccttgtccttttctgttcccccaaataatacacatcaacatatcgacttttaaccaacttcagaatcatggaaggagagagggagatttttcagaaagaaaagcattcaggttttagttattaaggatgggaagcatcttaaaattcagataataccttagtggtttttccttcctccaaagccaacctgattaaagatcaaccctcctccctccttaacctagaccactctacctatatttgaaggactgttgctcagcaggaagtttagaaaacaactgtcaataccatcctaggcatcactgtaggtacaaggggggaaggcagtaagctggacctagagtttggactatttgcttaacaagaatttgttcttcattctgcacttgttacaactgctatgcaattcttaaaatgaaagtattaatttggggaaatatttaaaatatatatcttttatctattaaaaatatttctttttaccaaagac

SEQ ID NO: 427751 - DNA, 6506 bp, Homo sapiens
agcggagtcgtcccggccgtcggttgccgcctacactgtctgccgtcgcgtcgcagttactaaggcgtggggaagatagcggcaggcaccgcagtggagcggctccgagatccccggggggctcgcaggcgcgcatccctcctgactgggacgtcgcctccgcagacccctcggaggctgaagcgacgccggaggcaggccaaggacactggttagtggttcagaaaggtaacctcaagaagaagcccaagggtttggttggagcacaagctgaacgtcgggaaagcctgaaggcgacttcttttgagttcaaggggaagaaagagtctcggcgggaaaatcaggtggaccttcctggacatatcctggaccaggcttttctgctgaagcaccactgtgtgaggaagccatcagatctgtgcaccattaatgtgagtggcctgaagttctccaaggccaaggaaaatgacttcaagcattttcattctgtgatttatatcaatgcctcagaaaacctgctgcctctagaggcatttcacacgtttccagccctaaaggaactggatctcgcatttaatggcatcaaaactatctacgtgaaatatggagactttaagttattagaattcttggacctttccttcaacagcctgactgtggaggccatctgtgatttggggattctgccacacctccgtgtcctgctcctcacaggcaatggccttacctccctgccgcccaatttggccgtcgcagaacaggaggcatctgtaacatcgctgacaagcaagaggtacatcctgaggttcccagcgctggagacactgatgctggatgacaacagactctccaaccccagttgctttgccagcctggctgggctcaggagactgaagaagttaagcttggatgaaaacaggattatcaggatcccatacctacagcaagttcagctctatgacgagtcagtagactggaatggaggcaggggaagtccccataaagagccccaattcatgctgcagtccaagccaaggatgcttgaggactcagatgagcaactggattatactgtactgcccatgaaaaaggatgttgaccggacagatcgcaaaagaggatgctgtcctaccagtagctctcttcccatctctctgtgagttcgtctttcataacaaccctctggtggcccatacacgaggggtccctccactgctgaagagcttcctccaggagcgactgggaatccacttaattcgaaggaagatagtaaagcctaagcatcatgttttgatgtctcggaaggaatcatggaaggtgaaaagcgaaatcccaaaggtgccgaagcagcctctggtgctccatcacccgcgcatgacgacaaccaagtctccctcaaaggatatgctagagccagaggcagagctggctgaagatctgcccactaccaaaagcacttctgtggagtcagagatgcccactgagaacctggaaggccattccccgtcttgccggaccttcgtgccactgcctcccatctgctccaactccactgtgcatagtgaagagaccctgtcccacctgagtgacacaactgtccgcctcagcccagagcgcccatcagatgaggactccaagagcacagagtccatcttcctgacccaggtgagtgaactgccttcctccgtcatccataaggatgatttagagttaaaggagaaagaccaaaagaaaccaccaacggcacccagagaggtgaaagggactcggaggaaactcccaactgccttccttcccagcaagtaccacggctatgaagaactgctgacagccaagcctgatccagccttcattgagccaaagggaatccagaagaatgcacaagccctgcaacaaatgctgaagcacccactcctgtgccactcctccaagcccaagctggacactcttcagaaaccctatgttcacaaagagaaacgggcccagagaatcccgattccacccccaaagaagactagagcccaacttctggatgacatcttcattcgcttgcgggatccccggaacattacagaggctccactaggtgctgtcctgcaccagtggacagaacggcggctggtgaaccacaagcagtacctggaggccaagaggctgttgaaggagttccaggcacgttaccggcagctggtgagtggctctctgcgcacagtgttcgggactaccccgctccccatggcctgcccagcgctgagtgagagccagcccaagttcggccacttcctcgagttcatggatgagttctgccaggagcccacagccagtgactcacaaggctagagctgtgcatgggggctgtgtgcaccacccggcctgtgccccagctctccccgagggctctgtgccctggaccgcacctcaaggttgaccagccggccacaggcctcagagctcagctgggccccacttgctggccacaaggtggcatccccttgtcaggatctcccctccttggcccaggcatgacctggtgcctggcccagcggcaataaagagtgggtgcacagggcaatagactgggtgccacatgcattctttcttggaacccaggccacagcagcattgtcacacttccctctaaaaatggttttccagttcagatgcaacagggatacatttgttctctgttgtatgagaaactgacaccaaggggatcttaacaaattcctgaacaatggctccaaaaaaggatatttttaaaaaccagatcttgtgagtacagccctaatgtgcagggacagtgtcatcctgtatattcgttctttactcagactctttcttggttccttcattaggagcatgaatggttgaatgtgaacatgacagtaaattggagcaaactgtaaactggacataacttatgccaaaagacgtagttgtacaccatggaaaccccatccctgctcctaatctctactgccattctgaatgccaaagcaagacatccaacatggggcatctcccagagcacatacagcaccaaaaatccacacacagcctaagcttaacccatgtttttgtctgagattgttcaccagagacaagactctgactataaacagaacatccactttcatgagtttcctttactgtattctcaacttgggccttgcttcaagcaggcaaacatacattgaagaatgcactttggtactgtttaaataacaacacatcagcccacttgattccatgccatgtccttgctgacagaaacatccccaacagggcatgccctggtccaagtcctctgtctttgtcaaaatgctcttctgatgagttggagaggaggcagccagcagacagcaggttgaataaaaccaatacacaacctattttctaggcaggaggggaaaaggcccttaggacaataatatttgtacaaagagttgagagtaaacaaacagtatatcaggttcaaaaaaaaaaaaactattcgttggcatttaaatttttttcccttgcatagtatctattctctcactaggacttttaagtgctctgctggaggctcagcgttggtaataccatgtttgatgcaaacttgaacccaatgctctcattggtggcacagctttggagggtggtggccccaagaaggggcaatctgcctgctgctatattaatctggaaccagggccaacagctactcttgaactatggtatttgaagagcgagttcattgcctgttttaccttaaatgacaggaaaggaagatgaacaaaccttgctttgccttggcttcaaactagttcttgatttaagacaccagaaagggagagagggagtctgcttagagtttgaggttgcctctcacaagatgacagttaaaagttgccaccttacttaaaaggcattaaggaggcatttactcacaaaggagagagagtaaatttttttcttaagagggaaaaaaatactgataatacatagaacaatctgcacatccagtcttggcactttttccaatttgactgatctctaaactggtgacccttgcatatatcttagtctcttttctacaatcttcttcagaaagctacagcagctaacaatcatgtataaagatgcatttcctagatcatcttcagaagaaaatctcttcagcactttccctagaatctgtctcctgaccaccccgccccagacctgctttctcttttgagaattcataaccaggtatgtttagataccagttcaaaagaccactctatgggttgatgaggaaaaggctgcctgaggacaatttaagaccataatgagtttccaatttttaaagaaaatttggctagctggcttttaattcttaattaaaatcattaaatttaattaaaattattccaatcaaaatatatcactttccaagattccacattcatattacttacttatactatggagactttctctacctgagcatgtattcaggggctataggtacatttaactctaactaactgaaaaaaatcaggaagaaaaaactattaaaataaaataacctcctaaatcatttgggggtatccccatcattggtgcgtgtgtctgcgtgtgtcaaactttaatgattatttattcagaccctggaaaaccacactataaaatagggcactggatcacaagttcgtttggttaaaaaaaaaaaaaaaaaaagtgggggcggggggcagagaagaagtttaacttggatgatttccatgcccattccagctgtaacattctatgactgtgacccagcctttgttctcttttctcactctcctactagacatttcaatgaaaagttaggcaggaaaaaggaaaggaatcccaagttgctgccagctctgatgagagatcaggttgggggagagattaggtggttactgaattgaggtgtgggcctcccctgaccatgtcagtgatccacaacccacctcacttcttggggcttaagctaaaagcagcttctgaagagatgttaatgtcctgtaatcactagaggagaaaattcattctccttccataacattacttagtaaaggaaaagcggtggtgcaatcaaattcacaaataccaatggggtctctaaaatgtagaatgcagcttgctgggtgctggtcagttttctaaatgggaccagaaatggctttcctaagaccataaatgaactctccagccacacatacattcaaatgcattccattagacattgagctcctcaagagcaggaactgctttatctccacagtccagctcagggttggctcaagtctgaagctcagtaaatgtctgtcaaatagaaaagaaaggatgagccttcggtcatcagctacatgagtcaggcacggtggcagcttcccattttagtcagtttgccagtttgtaaccagacagtaatcaattaagagctttaatctcttaaggacatttttcctttagggaaaatgaacaaaaaataaaacatttattaccagtgcttcttccaagcaaaaatttaaaaattaaattaaaatttaaaaaataagtgaagccacttaggagtttccccggcaagcctcacccaagaagacttaaccttttttaaaaagaggcaaatagattaaaggggccaggggctggatgcataatccccctgatctgataccaacccaacaggcccagatgacttcttccagcagatacaatcaatgggtcaagaacattttctcaaagtttctttccctctctatggaaaagagctgacagcccccttctaagggcaccacatttcctggatttcccctcagactgaccttcaccctcccccctaacttcccctttaataataaaaaaacccagaatgcatatatacaaggaacagagtaagacatgggtaatttgtatggtgaactgggcttcaatgatttgtgaggaatttgttttgtgaaatcctgcacctcttattctagctcacaaacccttcccatcgttctgtttccttccttgtccttttctgttcccccaaataatacacatcaacatatcgacttttaaccaacttcagaatcatggaaggagagagggagatttttcagaaagaaaagcattcaggttttagttattaaggatgggaagcatcttaaaattcagataataccttagtggtttttccttcctccaaagccaacctgattaaagatcaaccctcctccctccttaacctagaccactctacctatatttgaaggactgttgctcagcaggaagtttagaaaacaactgtcaataccatcctaggcatcactgtaggtacaaggggggaaggcagtaagctggacctagagtttggactatttgcttaacaagaatttgttcttcattctgcacttgttacaactgctatgcaattcttaaaatgaaagtattaatttggggaaatatttaaaatatatatcttttatctattaaaaatatttctttttaccaaagac

SEQ ID NO: 427752 - DNA, 3522 bp, Homo sapiens
agcggagtcgtcccggccgtcggttgccgcctacactgtctgccgtcgcgtcgcagttactaaggcgtggggaagatagcggcaggcaccgcagtggagcggctccgagatccccggggggctcgcaggcgcgcatccctcctgactgggacgtcgcctccgcagacccctcggaggctgaagcgacgccggaggcaggccaaggacactggttagtggttcagaaaggtaacctcaagaagaagcccaagggtttggttggagcacaagctgaacgtcgggaaagcctgaaggcgacttcttttgagttcaaggggaagaaagagtctcggcgggaaaatcaggtggaccttcctggacatatcctggaccaggcttttctgctgaagcaccactgtgtgaggaagccatcagatctgtgcaccattaatgtgagtggcctgaagttctccaaggccaaggaaaatgacttcaagcattttcattctgtgatttatatcaatgcctcagaaaacctgctgcctctagaggcatttcacacgtttccagccctaaaggaactggatctcgcatttaatggcatcaaaactatctacgtgaaatatggagactttaagttattagaattcttggacctttccttcaacagcctgactgtggaggccatctgtgatttggggattctgccacacctccgtgtcctgctcctcacaggcaatggccttacctccctgccgcccaatttggccgtcgcagaacaggaggcatctgtaacatcgctgacaagcaagaggtacatcctgaggttcccagcgctggagacactgatgctggatgacaacagactctccaaccccagttgctttgccagcctggctgggctcaggagactgaagaagttaagcttggatgaaaacaggattatcaggatcccatacctacagcaagttcagctctatgacgagtcagtagactggaatggaggcaggggaagtccccataaagagccccaattcatgctgcagtccaagccaaggatgcttgaggactcagatgagcaactggattatactgtactgcccatgaaaaaggatgttgaccggacagatcgcaaaagaggatgctgtcctaccagtagctctcttcccatctctctgtgagttcgtctttcataacaaccctctggtggcccatacacgaggggtccctccactgctgaagagcttcctccaggagcgactgggaatccacttaattcgaaggaagatagtaaagcctaagcatcatgttttgatgtctcggaaggaatcatggaaggtgaaaagcgaaatcccaaaggtgccgaagcagcctctggtgctccatcacccgcgcatgacgacaaccaagtctccctcaaaggatatgctagagccagaggcagagctggctgaagatctgcccactaccaaaagcacttctgtggagtcagagatgcccactgagaacctggaaggccattccccgtcttgccggaccttcgtgccactgcctcccatctgctccaactccactgtgcatagtgaagagaccctgtcccacctgagtgacacaactgtccgcctcagcccagagcgcccatcagatgaggactccaagagcacagagtccatcttcctgacccaggtgagtgaactgccttcctccgtcatccataaggatgatttagagttaaaggagaaagaccaaaagaaaccaccaacggcacccagagaggtgaaagggactcggaggaaactcccaactgccttccttcccagcaagtaccacggctatgaagaactgctgacagccaagcctgatccagccttcattgagccaaagggaatccagaagaatgcacaagccctgcaacaaatgctgaagcacccactcctgtgccactcctccaagcccaagctggacactcttcagaaaccctatgttcacaaagagaaacgggcccagagaatcccgattccacccccaaagaagactagagcccaacttctggatgacatcttcattcgcttgcgggatccccggaacattacagaggctccactaggtgctgtcctgcaccagtggacagaacggcggctggtgaaccacaagcagtacctggaggccaagaggctgttgaaggagttccaggcacgttaccggcagctggtgagtggctctctgcgcacagtgttcgggactaccccgctccccatggcctgcccagcgctgagtgagagccagcccaagttcggccacttcctcgagttcatggatgagttctgccaggagcccacagccagtgactcacaaggctagagctgtgcatgggggctgtgtgcaccacccggcctgtgccccagctctccccgagggctctgtgccctggaccgcacctcaaggttgaccagccggccacaggcctcagagctcagctgggccccacttgctggccacaaggtggcatccccttgtcaggatctcccctccttggcccaggcatgacctggtgcctggcccagcggcaataaagagtgggtgcacagggcaatagactgggtgccacatgcattctttcttggaacccaggccacagcagcattgtcacacttccctctaaaaatggttttccagttcagatgcaacagggatacatttgttctctgttgtatgagaaactgacaccaaggggatcttaacaaattcctgaacaatggctccaaaaaaggatatttttaaaaaccagatcttgtgagtacagccctaatgtgcagggacagtgtcatcctgtatattcgttctttactcagactctttcttggttccttcattaggagcatgaatggttgaatgtgaacatgacagtaaattggagcaaactgtaaactggacataacttatgccaaaagacgtagttgtacaccatggaaaccccatccctgctcctaatctctactgccattctgaatgccaaagcaagacatccaacatggggcatctcccagagcacatacagcaccaaaaatccacacacagcctaagcttaacccatgtttttgtctgagattgttcaccagagacaagactctgactataaacagaacatccactttcatgagtttcctttactgtattctcaacttgggccttgcttcaagcaggcaaacatacattgaagaatgcactttggtactgtttaaataacaacacatcagcccacttgattccatgccatgtccttgctgacagaaacatccccaacagggcatgccctggtccaagtcctctgtctttgtcaaaatgctcttctgatgagttggagaggaggcagccagcagtggcagtccacaaggatccaggtaccttctccaatcctaaagcagacagcaggttgaataaaaccaatacacaacctattttctaggcaggaggggaaaaggcccttaggacaataatatttgtacaaagagttgagagtaaacaaacagtatatcaggttca

SEQ ID NO: 427753 - DNA, 3865 bp, Homo sapiens
agcggagtcgtcccggccgtcggttgccgcctacactgtctgccgtcgcgtcgcagttactaaggcgtggggaagatagcggcaggcaccgcagtggagcggctccgagatccccggggggctcgcaggcgcgcatccctcctgactgggacgtcgcctccgcagacccctcggaggctgaagcgacgccggaggcaggccaaggacactggttagtggttcagaaaggtaacctcaagaagaagcccaagggtttggttggagcacaagctgaacgtcgggaaagcctgaaggcgacttcttttgagttcaaggggaagaaagagtctcggcgggaaaatcaggtggaccttcctggacatatcctggaccaggcttttctgctgaagcaccactgtgtgaggaagccatcagatctgtgcaccattaatgtgagtggcctgaagttctccaaggccaaggaaaatgacttcaagcattttcattctgtgatttatatcaatgcctcagaaaacctgctgcctctagaggcatttcacacgtttccagccctaaaggaactggatctcgcatttaatggcatcaaaactatctacgtgaaatatggagactttaagttattagaattcttggacctttccttcaacagcctgactgtggaggccatctgtgatttggggattctgccacacctccgtgtcctgctcctcacaggcaatggccttacctccctgccgcccaatttggccgtcgcagaacaggaggcatctgtaacatcgctgacaagcaagaggtacatcctgaggttcccagcgctggagacactgatgctggatgacaacagactctccaaccccagttgctttgccagcctggctgggctcaggagactgaagaagttaagcttggatgaaaacaggattatcaggatcccatacctacagcaagttcagctctatgacgagtcagtagactggaatggaggcaggggaagtccccataaagagccccaattcatgctgcagtccaagccaaggatgcttgaggactcagatgagcaactggattatactgtactgcccatgaaaaaggatgttgaccggacagatcgcaaaagaggatgctgtcctaccagtagctctcttcccatctctctgtgagttcgtctttcataacaaccctctggtggcccatacacgaggggtccctccactgctgaagagcttcctccaggagcgactgggaatccacttaattcgaaggaagatagtaaagcctaagcatcatgttttgatgtctcggaaggaatcatggaaggtgaaaagcgaaatcccaaaggtgccgaagcagcctctggtgctccatcacccgcgcatgacgacaaccaagtctccctcaaaggatatgctagagccagaggcagagctggctgaagatctgcccactaccaaaagcacttctgtggagtcagagatgcccactgagaacctggaaggccattccccgtcttgccggaccttcgtgccactgcctcccatctgctccaactccactgtgcatagtgaagagaccctgtcccacctgagtgacacaactgtccgcctcagcccagagcgcccatcagatgaggactccaagagcacagagtccatcttcctgacccaggtgagtgaactgccttcctccgtcatccataaggatgatttagagttaaaggagaaagaccaaaagaaaccaccaacggcacccagagaggtgaaagggactcggaggaaactcccaactgccttccttcccagcaagtaccacggctatgaagaactgctgacagccaagcctgatccagccttcattgagccaaagggaatccagaagaatgcacaagccctgcaacaaatgctgaagcacccactcctgtgccactcctccaagcccaagctggacactcttcagaaaccctatgttcacaaagagaaacgggcccagagaatcccgattccacccccaaagaagactagagcccaacttctggatgacatcttcattcgcttgcgggatccccggaacattacagaggctccactaggtgctgtcctgcaccagtggacagaacggcggctggtgaaccacaagcagtacctggaggccaagaggctgttgaaggagttccaggcacgttaccggcagctggtgagtggctctctgcgcacagtgttcgggactaccccgctccccatggcctgcccagcgctgagtgagagccagcccaagttcggccacttcctcgagttcatggatgagttctgccaggagcccacagccagtgactcacaaggctagagctgtgcatgggggctgtgtgcaccacccggcctgtgccccagctctccccgagggctctgtgccctggaccgcacctcaaggttgaccagccggccacaggcctcagagctcagctgggccccacttgctggccacaaggtggcatccccttgtcaggatctcccctccttggcccaggcatgacctggtgcctggcccagcggcaataaagagtgggtgcacagggcaatagactgggtgccacatgcattctttcttggaacccaggccacagcagcattgtcacacttccctctaaaaatggttttccagttcagatgcaacagggatacatttgttctctgttgtatgagaaactgacaccaaggggatcttaacaaattcctgaacaatggctccaaaaaaggatatttttaaaaaccagatcttgtgagtacagccctaatgtgcagggacagtgtcatcctgtatattcgttctttactcagactctttcttggttccttcattaggagcatgaatggttgaatgtgaacatgacagtaaattggagcaaactgtaaactggacataacttatgccaaaagacgtagttgtacaccatggaaaccccatccctgctcctaatctctactgccattctgaatgccaaagcaagacatccaacatggggcatctcccagagcacatacagcaccaaaaatccacacacagcctaagcttaacccatgtttttgtctgagattgttcaccagagacaagactctgactataaacagaacatccactttcatgagtttcctttactgtattctcaacttgggccttgcttcaagcaggcaaacatacattgaagaatgcactttggtactgtttaaataacaacacatcagcccacttgattccatgccatgtccttgctgacagaaacatccccaacagggcatgccctggtccaagtcctctgtctttgtcaaaatgctcttctgatgagttggagaggaggcagccagcagtggcagtccacaaggatccaggtaccttctccaatcctaaagcacttttaaaaataggtaacacttcattaggtgctacttggccccggccatgttgctggaccgtaggagatactgatccacacttccttttcgccggctcacagtccgcctctcattgtcgaacatgcgctgcaactgcagagccaactgtcggtcttcttcctcttgctgaagcttctgctccatctctcgcaggactgggtctgttggggccagacccacctccccactggtttgtcgcagttttttaagggagccattttgttctaagtgcttggtcttgcagtgtcttttccggcctcgacgcaaagaaggaagtggctcttcacttaggctctcaactagaacaccattagtcagatcaaaatgatttaatgtcttcaattgttgctttgttttgaggactccacccaaaacactgttttggggtagcactgaattaactgtggtgattttcatggctc

SEQ ID NO: 427754 - DNA, 1533 bp, Homo sapiens
agcggagtcgtcccggccgtcggttgccgcctacactgtctgccgtcgcgtcgcagttactaaggcgtggggaagatagcggcaggcaccgcagtggagcggctccgagatccccggggggctcgcaggcgcgcatccctcctgactgggacgtcgcctccgcagacccctcggaggctgaagcgacgccggaggcaggccaaggacactggttagtggttcagaaaggtaacctcaagaagaagcccaagggtttggttggagcacaagctgaacgtcgggaaagcctgaaggcgacttcttttgagttcaaggggaagaaagagtctcggcgggaaaatcaggtggaccttcctggacatatcctggaccaggcttttctgctgaagcaccactgtgtgaggaagccatcagatctgtgcaccattaatgtgagtggcctgaagttctccaaggccaaggaaaatgacttcaagcattttcattctgtgatttatatcaatgcctcagaaaacctgctgcctctagaggcatttcacacgtttccagccctaaaggaactggatctcgcatttaatggcatcaaaactatctacgtgaaatatggagactttaagttattagaattcttggacctttccttcaacagcctgactgtggaggccatctgtgatttggggattctgccacacctccgtgtcctgctcctcacaggcaatggccttacctccctgccgcccaatttggccgtcgcagaacaggaggcatctgtaacatcgctgacaagcaagaggtacatcctgaggttcccagcgctggagacactgatgctggatgacaacagactctccaaccccagttgctttgccagcctggctgggctcaggagactgaagaagttaagcttggatgaaaacaggattatcaggatcccatacctacagcaagttcagctctatgacgagtcagtagactggaatggaggcaggggaagtccccataaagagccccaattcatgctgcagtccaagccaaggatgcttgaggactcagatgagcaactggattatactgtactgcccatgaaaaaggatgttgaccggacagatcgcaaaagaggatgctgtcctaccagtagctctcttcccatctctctgtgagttcgtctttcataacaaccctctggtggcccatacacgaggggtccctccactgctgaagagcttcctccaggagcgactgggaatccacttaattcgaaggaagatagtaaagcctaagcatcatgttttgatgtctcggaaggaatcatggaaggtagggcttccaaggcaggactcccacccccaggaagagtgcagcctattataatgtatgcaaaccaacctggctgtagagctgctcactccacagtgcctggaatctctccattaggttcagcattgccttctcctttccttgctttgggaagagcactggatgaaacaacagatatgaaaatatattttaaactcctaaaactcttaccattga

SEQ ID NO: 427755 - DNA, 433 bp, Homo sapiens
aaactcttagctcttaaacacgcaacagtgatggtggaatttcagacaggaggggcaaggtactctgtgcatgagtaggtattattacagggtcaaggcatcacccagcagtgagtcccatccacagcagcatgtcttacccaataccacccccaatcctagcaagcatgtagccctgcagtgaggggcctagacatacctgggtagaggtgaggggtggtgtcaacctgagagtctctcctgcattcattacagatcgcaaaagaggatgctgtcctaccagtagctctcttcccatctctctgtgagttcgtctttcataacaaccctctggtggcccatacacgaggtatagtgcccgcaaacctgccccctctcaacccagtgcccaaggagcagtgtggcaccctcatccccacctcatcaatgccaa

SEQ ID NO: 427756 - DNA, 572 bp, Homo sapiens
ggcactgtgacctttgaagatgtggctgtgaacttttcccaggaggaatggagtctccttagtgaggctcagagatgcctttatcatgacgtgatgctggagaacctgacacttatatcttctctaggttgttggtatggagcaaaagacgagacaccttctaagcagaccctttctatacaacaggagtccccactcaggacacattggacaggtgtatgtaccaagaaggtccacctctggggaatgtgtggccctctcctgggagatatcttacaccagggaacacaacacaatcagaaattgaatgggtttggggcatatgaaaaaaaattggatgacgatgcaaaccatcatcaagaccagaagcagcacattggagagaaatcgtacagaagcaatgccaagggaacatcttttgtaaagaactgtaaattccatatgtcacatgagccatttatctttcatgaggttgggaaagactttttgtccagcttgagattactccaacaagaggacattcacacttcagggaagtcaaaactttgaaactaagcatgggataccccttc

SEQ ID NO: 427757 - DNA, 351 bp, Homo sapiens
ggggccttaacccttcaatttcggaatgtgtggccctctcctgggagatatcttacaccagggaacacaacacaatcagaaattgaatgggtttggggcatatgaaaaaaaattggatgacgatgcaaaccatcatcaagaccagaagcagcacattggagagaaatcgtacagaagcaatgccaagggaacatcttttgtaaagaactgtaaattccatatgtcacatgagccatttatctttcatgaggttgggaaagactttttgtccagcttgagattactccaacaagaggacattcacacttcagggaagtcaaaactttgaaactaagcatgggataccccttc

SEQ ID NO: 427758 - DNA, 1491 bp, Homo sapiens
ttttagtgacacactttggtgcttctgagaacagcacaaaattattctcttgtttataatggatattgcattctgctcagtactggtgagggaaatctgttctcaagtcctacagtgcattcatgtgtcctgaagtccagaattctgtaggatagtgtcctacgttataagcctggagaaagaaatcataattctttaatttttatttttttagggaaatgatgtcactctgaaactcaggctggaatacactggcatggtcatacctcactgcggcctcaaactcctgggctcaagtgatcctcctgcctcagcctcccgagtacctgagattagcccaggtaatttaagaattttttatagagatagggttttgctattttaccctgactgatgttcaactcctggcctcaagtaatcctctagcatacgcccttgaaagcactaggattacaggtgtgagccaccatgcccagcccaaaaataatttttgtagaattagcatttctaggtagtgaagcagactgcaacagaatagttgggatatactttttttaaaaaggcatccacaatgattcagtcactatgtctgtgatggacaagcaggtacagaaattttcaggacctccataattatgaatctagtgtagcttaggtcattgtcagactaaatctaaaggttttgtggatttctgtagcctatctgggctgcataccaaaaagccatccctgaattagtaggaggaagaggatagggagaaaggaaatctcttagtccagtgatgtggcctttgcaaccagccagcattccaatttaatcaggtggaaatgatcttcctggctcataagtatttggtatcacacaggctaattgccccccttagggcgtgatgagagttaggagagtcaatgtaaaatcacataacctatttgtcaaaaataatgttaaatccagatagttctttcaaattaaatttttaaagctgtaataagactgggcatggtgactcatgcctgttatcccaacactttgggagtccagggtgggagtattgcttgaggtaagaagtttgagactagcctgggtcccatagtaagaccctgtctcttaaaaaataaatactatctttctctctggcctctccatcctccagacaatcactgaattacaatatttgcttaacagtagattaatgtcaattttctggaattttatatgactgatataacatgtttcctcttttcatacctgagtactctcctgagccctatttatttagatgttcttcttttttctttattattatttttatttcacatagcagggatgcatattttgacattcatcaatcatgatatatgagtagttcattctttttatcttagaatatgacatgctatggaaatcactgtatacgaattcatctgcttatggatatgttattgcttcttatttttgtctgttaggaataaaactgcttgttaagcaca

SEQ ID NO: 427759 - DNA, 1404 bp, Homo sapiens
ggcactgtgacctttgaagatgtggctgtgaacttttcccaggaggaatggagtctccttagtgaggctcagagatgcctttatcatgacgtgatgctggagaacctgacacttatatcttctctagggaaatgatgtcactctgaaactcaggctggaatacactggcatggtcatacctcactgcggcctcaaactcctgggctcaagtgatcctcctgcctcagcctcccgagtacctgagattagcccaggtaatttaagaattttttatagagatagggttttgctattttaccctgactgatgttcaactcctggcctcaagtaatcctctagcatacgcccttgaaagcactaggattacaggtgtgagccaccatgcccagcccaaaaataatttttgtagaattagcatttctaggtagtgaagcagactgcaacagaatagttgggatatactttttttaaaaaggcatccacaatgattcagtcactatgtctgtgatggacaagcaggtacagaaattttcaggacctccataattatgaatctagtgtagcttaggtcattgtcagactaaatctaaaggttttgtggatttctgtagcctatctgggctgcataccaaaaagccatccctgaattagtaggaggaagaggatagggagaaaggaaatctcttagtccagtgatgtggcctttgcaaccagccagcattccaatttaatcaggtggaaatgatcttcctggctcataagtatttggtatcacacaggctaattgccccccttagggcgtgatgagagttaggagagtcaatgtaaaatcacataacctatttgtcaaaaataatgttaaatccagatagttctttcaaattaaatttttaaagctgtaataagactgggcatggtgactcatgcctgttatcccaacactttgggagtccagggtgggagtattgcttgaggtaagaagtttgagactagcctgggtcccatagtaagaccctgtctcttaaaaaataaatactatctttctctctggcctctccatcctccagacaatcactgaattacaatatttgcttaacagtagattaatgtcaattttctggaattttatatgactgatataacatgtttcctcttttcatacctgagtactctcctgagccctatttatttagatgttcttcttttttctttattattatttttatttcacatagcagggatgcatattttgacattcatcaatcatgatatatgagtagttcattctttttatcttagaatatgacatgctatggaaatcactgtatacgaattcatctgcttatggatatgttattgcttcttatttttgtctgttaggaataaaactgcttgttaagcaca

SEQ ID NO: 427760 - DNA, 1728 bp, Homo sapiens
ttttagtgacacactttggtgcttctgagaacagcacaaaattattctcttgtttataatggatattgcattctgctcagtactggtgagggaaatctgttctcaagtcctacagtgcattcatgtgtcctgaagtccagaattctgtaggatagtgtcctacgttataagcctggagaaagaaatcataattctttaatttttatttttttagggaaatgatgtcactctgaaactcaggctggaatacactggcatggtcatacctcactgcggcctcaaactcctgggctcaagtgatcctcctgcctcagcctcccgagtacctgagattagcccaggtaatttaagaattttttatagagatagggttttgctattttaccctgactgatgttcaactcctggcctcaagtaatcctctagcatacgcccttgaaagcactaggattacaggtgtgagccaccatgcccagcccaaaaataatttttgtagaattagcatttctaggtagtgaagcagactgcaacagaatagttgggatatactttttttaaaaaggcatccacaatgattcagtcactatgtctgtgatggacaagcaggtacagaaattttcaggacctccataattatgaatctagtgtagcttaggtcattgtcagactaaatctaaaggttttgtggatttctgtagcctatctgggctgcataccaaaaagccatccctgaattagtaggaggaagaggatagggagaaaggaaatctcttagtccagtgatgtggcctttgcaaccagccagcattccaatttaatcaggtggaaatgatcttcctggctcataagtatttggtatcacacaggctaattgccccccttagggcgtgatgagagttaggagagtcaatgtaaaatcacataacctatttgtcaaaaataatgttaaatccagatagttctttcaaattaaatttttaaagctgtaataagactgggcatggtgactcatgcctgttatcccaacactttgggagtccagggtgggagtattgcttgaggtaagaagtttgagactagcctgggtcccatagtaagaccctgtctcttaaaaaataaatactatctttctctctggcctctccatcctccagacaatcactgaattacaatatttgcttaacagtagattaatgtcaattttctggaattttatatgactgatataacatgtttcctcttttcatacctgagtactctcctgagccctatttatttagatgttcttcttttttctttattattatttttatttcacatagcagggatgcatattttgacattcatcaatcatgatatatgagtagttcattctttttatcttagaatatgacatgctatggaaatcactgtatacgaattcatctgcttatggatatgttattgcttcttatttttgtctgttaggaataaaactgcttgttaagcacatttgaatgcaattcttcatatagataaggtttcatttctcttgtttgaatgccttggtgtgcagtgcccaactcacatggtagatgaatgtatacccctctcccaactccaggccgcacagcttacagctccaagagagactccttccctccacttgaggagaggagagggaagaataaagaaaactttgtcttggaacttgttccagctcagctacagtaggatagggcaccaggc

SEQ ID NO: 427761 - DNA, 286 bp, Homo sapiens
cccaggaggaatggagtctccttagtgaggctcagagatgcctttatcatgacgtgatgctggagaacctgacacttatatcttctctaggtaaggcactcacactcttctctatgacctcagctattgtctgtctgtccccatcttttttccccatggcaagactgttttcctcacttcaggagcctgggcacaggttcctctgttagttccctgggtaggttctatgtggtatgtaggactgaggtgtgtgcactgccctctctctccttgagcagccccaaca

SEQ ID NO: 427762 - DNA, 1493 bp, Homo sapiens
ggcactgtgacctttgaagatgtggctgtgaacttttcccaggaggaatggagtctccttagtgaggctcagagatgcctttatcatgacgtgatgctggagaacctgacacttatatcttctctaggttgttggtatggagcaaaagacgagacaccttctaagcagaccctttctatacaacaggagtccccactcaggacacattggacaggtggaaatgatgtcactctgaaactcaggctggaatacactggcatggtcatacctcactgcggcctcaaactcctgggctcaagtgatcctcctgcctcagcctcccgagtacctgagattagcccaggtaatttaagaattttttatagagatagggttttgctattttaccctgactgatgttcaactcctggcctcaagtaatcctctagcatacgcccttgaaagcactaggattacaggtgtgagccaccatgcccagcccaaaaataatttttgtagaattagcatttctaggtagtgaagcagactgcaacagaatagttgggatatactttttttaaaaaggcatccacaatgattcagtcactatgtctgtgatggacaagcaggtacagaaattttcaggacctccataattatgaatctagtgtagcttaggtcattgtcagactaaatctaaaggttttgtggatttctgtagcctatctgggctgcataccaaaaagccatccctgaattagtaggaggaagaggatagggagaaaggaaatctcttagtccagtgatgtggcctttgcaaccagccagcattccaatttaatcaggtggaaatgatcttcctggctcataagtatttggtatcacacaggctaattgccccccttagggcgtgatgagagttaggagagtcaatgtaaaatcacataacctatttgtcaaaaataatgttaaatccagatagttctttcaaattaaatttttaaagctgtaataagactgggcatggtgactcatgcctgttatcccaacactttgggagtccagggtgggagtattgcttgaggtaagaagtttgagactagcctgggtcccatagtaagaccctgtctcttaaaaaataaatactatctttctctctggcctctccatcctccagacaatcactgaattacaatatttgcttaacagtagattaatgtcaattttctggaattttatatgactgatataacatgtttcctcttttcatacctgagtactctcctgagccctatttatttagatgttcttcttttttctttattattatttttatttcacatagcagggatgcatattttgacattcatcaatcatgatatatgagtagttcattctttttatcttagaatatgacatgctatggaaatcactgtatacgaattcatctgcttatggatatgttattgcttcttatttttgtctgttaggaataaaactgcttgttaagcaca

SEQ ID NO: 427763 - DNA, 2337 bp, Homo sapiens
tagattaggacccgcgggaaggttgtttaccgtaactaggggtaaggaggtacaaagaacaaggaagttaggctttgaaaatagagaacaaagaacaagtaagctgaacaagtaagttcctctttggagaggcaagagggcaaagaagctgaggacccagaagacaggattgtgcctaagaaagtggccttggagcagaggcccaaagaaagcggggagagcgccttgcccatcggtaagggaaaggtgctccaggcacagaagcagctaatgcaacggccctgaggcaaatgcaagataactggcaagttccaggaacagcaaggagggcaaggcgcctggagcagaggaagctagcggatcccttgatgagagggaggaactggcccatctctcatgggtcctgcaggcaggccatgagactgtcttttatgcggggcgagataacgaggcatggacgtgttgtgagcggaggcctagcctgttcaaggtctgaatttttacccctagaatgtaagaagcatgggagcagggactttgttttgctccctgccatatccacagccctagaaaaacgtcgggccattgatagctctcagtaaatgcttgacaagtaagtgaatgaacgaatgcacaattaatgaaatgagggctgcgtcaatgaataactgggaatctgactcctgcagggagccttcagcccacaggtgtatgtaagacccgccccgcctctcatccttcgggctcccacccccgccgttaggctgcggttcgcgccgcggtcgccagagggcgcggagcggcggggcttcccgcacggagggctttgcgtgaggcaccgcgtggggcggggctgcgggcgggctcccagctgctgggccctcatcggctgggcctcgtcgaccggcaagcggaacgcggcagcggggctgggcctgtgcggcggccgccggagcgctttggaaggcgcacggggcgaagatggcggcggagcgacaggaggcgctgagggagttcgtggcggtgacgggcgccgaggaggaccgggcccgcttctttctcgagtcggccggctgggacttgcagatcgcgctagcgagcttttatgaggacggaggggatgaagacattgtgaccatttcgcaggcaacccccagttcagtgtccagaggcacagcccccagtgataatagagtgacatccttcagagacctcattcatgaccaagatgaagatgaggaggaagaggaaggccagaggttttatgctgggggctcagagagaagtggacagcagattgttggccctcccaggaagaaaagtcccaacgagctggtggatgatctctttaaaggtgccaaagagcatggagctgtagctgtggagcgagtgaccaagagccctggagagaccagtaaaccgagaccatttgcaggaggtggctaccgccttggggcagcaccagaggaagagtctgcctatgtggcaggagaaaagaggcagcattccagccaagatgttcatgtagtattgaaactctggaagagtggattcagcctggataatggagaactcagaagctaccaagacccatccaatgcccagtttctggagtctatccgcagaggggaggtgccagcagagcttcggaggctagctcacggtggacaggtgaacttggatatggaggaccatcgggacgaggactttgtgaagcccaaaggagccttcaaagccttcactggcgagggtcagaaactgggcagcactgccccccaggtgttgagtaccagctctccagcccaacaggcagaaaatgaagccaaagccagctcttccatcttaatcgacgaatcagagcctaccacaaacatccaaattcggcttgcagacggcgggaggctggtgcagaaatttaaccacagccacaggatcagcgacatccgactcttcatcgtggatgcccggccagccatggctgccaccagctttatcctcatgactactttcccgaacaaagagctggctgatgagagccagaccctgaaggaagccaacctgctcaatgctgtcatcgtgcagcggttaacataaccgcccagccagctgcctggcctccctcctgtgtttcccatggccagtggccatgccccatggggatcgcccctcctgcccccttgtgcacacccagcagtccagtgcaacgtctcctccatagctctgggttcttagatcttggttggacgtttgttttctccttagttgcatttcctgggtttttgtgatgatcaatggactttaatgaaaaaaaaaataaaaacaaccaaaaaaattgaa

SEQ ID NO: 427764 - DNA, 1318 bp, Homo sapiens
  misc_feature (535)..(535): n is a, c, g, or t
taagcgagtgacccatcccagtgatgtgagttatttgtctcagtttcatttcactcattaagctcagcacactgctgcccattcccagggtggacagcccatgcagaggctttgctaggtgaaaaagcttggtttgctaaaagtcacaggcagaatcctgcaggtccatgcccttagatgtgccaaattgtaagttgcatagattttaggggtttggggcaaaaaggaaacttatgtttaagtgctctagggaaggaggcattgtttccaggtggtttcattgtcatatgatctccaggttcagaaggcaggtagtgtctggagaaacgattcctggccctgagaagttgaccattaatttctgacagatagtttaagtgcctcctgtgacatacaaaagagacacacactgtccttgtgaaattcatgagctgcaggaggagacactaatcagatcatcccagaaacgtggaaggagggccagggatggagccaaggagctaaggagggctttcctgaggaggtggcattgganccgaggcctgagttgtgattaggattacagaaaggggatcaggcaggggagcctctggaaagaaggacccaaatgtgggaagagagtatggcctgatgaactagaagcgggcagaagagaacgaggggaaagagggtggtataaaattaggtccttgggaacacagtagggttgttggtgtttatctcaaggaaaatggaaacaacagtgaaggactcttggcaaggaagggacttggtcccacatgcctgagcgtagctttcgctgttctgtggagaaagtcaggaaaggggatttgcgaggtgtttagctttccacagggcaggggtatggacagcagaggatggcactgctcaccgcttccccaactcctgcaggatcagcgacatccgactcttcatcgtggatgcccggccagccatggctgccaccagctttatcctcatgactactttcccgaacaaagagctggctgatgagagccagaccctgaaggaagccaacctgctcaatgctgtcatcgtgcagcggttaacataaccgcccagccagctgcctggcctccctcctgtgtttcccatggccagtggccatgccccatggggatcgcccctcctgcccccttgtgcacacccagcagtccagtgcaacgtctcctccatagctctgggttcttagatcttggttggacgtttgttttctccttagttgcatttcctgggtttttgtgatgatcaatggactttaatgaaaaaaaaaataaaaacaaccaaaaaaattgaa

SEQ ID NO: 427765 - DNA, 518 bp, Homo sapiens
ggaatcgagctcggtacctgacagtaaaatgaaccatttgcaggaggtggctaccgccttggggcagcaccagaggaagagtctgcctatgtggcaggagaaaagaggcagcattccagccaagatgttcatgtagtattgaaactctggaagagtggattcagcctggataatggagaactcagaagctaccaagacccatccaatgcccagtttctggagtctatccgcagaggggaggtgccagcagagcttcggaggctagctcacggtggacaggtgaacttggatatggaggaccatcgggacgaggactttgtgaagcccaaaggagccttcaaagccttcactggcgagggtcagaaactgggcagcactgccccccaggtgttgagtaccagctctccagcccaacaggcagaaaatgaagccaaagccagctcttccatcttaatcgacgaatcagagcctaccacagagcaatgtgttcatttactgtcaggtaccgagctgatctc

SEQ ID NO: 427766 - DNA, 1488 bp, Homo sapiens
tagattaggacccgcgggaaggttgtttaccgtaactaggggtaaggaggtacaaagaacaaggaagttaggctttgaaaatagagaacaaagaacaagtaagctgaacaagtaagttcctctttggagaggcaagagggcaaagaagctgaggacccagaagacaggattgtgcctaagaaagtggccttggagcagaggcccaaagaaagcggggagagcgccttgcccatcggtaagggaaaggtgctccaggcacagaagcagctaatgcaacggccctgaggcaaatgcaagataactggcaagttccaggaacagcaaggagggcaaggcgcctggagcagaggaagctagcggatcccttgatgagagggaggaactggcccatctctcatgggtcctgcaggcaggccatgagactgtcttttatgcggggcgagataacgaggcatggacgtgttgtgagcggaggcctagcctgttcaaggtctgaatttttacccctagaatgtaagaagcatgggagcagggactttgttttgctccctgccatatccacagccctagaaaaacgtcgggccattgatagctctcagtaaatgcttgacaagtaagtgaatgaacgaatgcacaattaatgaaatgagggctgcgtcaatgaataactgggaatctgactcctgcagggagccttcagcccacaggtgtatgtaagacccgccccgcctctcatccttcgggctcccacccccgccgttaggctgcggttcgcgccgcggtcgccagagggcgcggagcggcggggcttcccgcacggagggctttgcgtgaggcaccgcgtggggcggggctgcgggcgggctcccagctgctgggccctcatcggctgggcctcgtcgaccggcaagcggaacgcggcagcggggctgggcctgtgcggcggccgccggagcgctttggaaggcgcacggggcgaagatggcggcggagcgacaggaggcgctgagggagttcgtggcggtgacgggcgccgaggaggaccgggcccgcttctttctcgagtcggccggctgggacttgcagatcgcgctagcgagcttttatgaggacggaggggatgaagacattgtgaccatttcgcaggcaacccccagttcagtgtccagaggcacagcccccagtgataatagagtgacatccttcagagacctcattcatgaccaagatgaagatgaggaggaagaggaaggccagaggtgagtcttctagagggggtcagggggacagttcacagggaagtccagggtaatgtgtaaatcacctagaacaggacctggtaaacatgtttggttattgttagccattactactgtgggctggtctgtgtgggttatatcttaggaagtctcttctactccttgtagcttagaagtgacccctgttccgttacttaatgtatttattgaggaatattaggggagggaa

SEQ ID NO: 427767 - DNA, 3677 bp, Homo sapiens
tagattaggacccgcgggaaggttgtttaccgtaactaggggtaaggaggtacaaagaacaaggaagttaggctttgaaaatagagaacaaagaacaagtaagctgaacaagtaagttcctctttggagaggcaagagggcaaagaagctgaggacccagaagacaggattgtgcctaagaaagtggccttggagcagaggcccaaagaaagcggggagagcgccttgcccatcggtaagggaaaggtgctccaggcacagaagcagctaatgcaacggccctgaggcaaatgcaagataactggcaagttccaggaacagcaaggagggcaaggcgcctggagcagaggaagctagcggatcccttgatgagagggaggaactggcccatctctcatgggtcctgcaggcaggccatgagactgtcttttatgcggggcgagataacgaggcatggacgtgttgtgagcggaggcctagcctgttcaaggtctgaatttttacccctagaatgtaagaagcatgggagcagggactttgttttgctccctgccatatccacagccctagaaaaacgtcgggccattgatagctctcagtaaatgcttgacaagtaagtgaatgaacgaatgcacaattaatgaaatgagggctgcgtcaatgaataactgggaatctgactcctgcagggagccttcagcccacaggtgtatgtaagacccgccccgcctctcatccttcgggctcccacccccgccgttaggctgcggttcgcgccgcggtcgccagagggcgcggagcggcggggcttcccgcacggagggctttgcgtgaggcaccgcgtggggcggggctgcgggcgggctcccagctgctgggccctcatcggctgggcctcgtcgaccggcaagcggaacgcggcagcggggctgggcctgtgcggcggccgccggagcgctttggaaggcgcacggggcgaagatggcggcggagcgacaggaggcgctgagggagttcgtggcggtgacgggcgccgaggaggaccgggcccgcttctttctcgagtcggccggctgggacttgcagatcgcgctagcgagcttttatgaggacggaggggatgaagacattgtgaccatttcgcaggcaacccccagttcagtgtccagaggcacagcccccagtgataatagagtgacatccttcagagacctcattcatgaccaagatgaagatgaggaggaagaggaaggccagaggttttatgctgggggctcagagagaagtggacagcagattgttggccctcccaggaagaaaagtcccaacgagctggtggatgatctctttaaaggtgccaaagagcatggagctgtagctgtggagcgagtgaccaagagccctggagagaccagtaaaccgagaccatttgcaggaggtggctaccgccttggggcagcaccagaggaagagtctgcctatgtggcaggagaaaagaggcagcattccagccaagatgttcatgtagtattgaaactctggaagagtggattcagcctggataatggagaactcagaagctaccaagacccatccaatgcccagtttctggagtctatccgcagaggggaggtgccagcagagcttcggaggctagctcacggtggacaggtgaacttggatatggaggaccatcgggacgaggactttgtgaagcccaaaggagccttcaaagccttcactggcgagggtcagaaactgggcagcactgccccccaggtgttgagtaccagctctccagcccaacaggcagaaaatgaagccaaagccagctcttccatcttaatcgacgaatcagagcctaccacaaacatccaaattcggcttgcagacggcgggaggctggtgcagaaatttaaccacagccacaggatcagcgacatccgactcttcatcgtggatgcccggccagccatggctgccaccagctttatcctcatgactactttcccgaacaaagagctggctgatgagagccagaccctgaaggaagccaacctgctcaatgctgtcatcgtgcagcggttaacataaccgcccagccagctgcctggcctccctcctgtgtttcccatggccagtggccatgccccatggggatcgcccctcctgcccccttgtgcacacccagcagtccagtgcaacgtctcctccatagctctgggttcttagatcttggttggacgtttgttttctccttagttgcatttcctgggtttttgtgatgatcaatggactttaatgaaaaaaaaaataaaaacaaccaaaaaaattgaaggaatatcaccagcatgttgtacggaaactctcccactgaagcaggctttaattgctttaaaattatatttatcttggggcctgtgggaggaaacttccttccatcttctctgcataaaaacttgtggcacacaatgcttattcactagtgtgtcccacccgccagccccacagatgactggaggaaggaggggaaatgtgtagaaagaggcttcgccaccacttgttcccacgagaatatatcacttgcccagataaaactgggcggcagccagagttccctgaagtgggaagtcagagctacatgcacacagtgtcttcagaaggtgaaaataaatatttccctgtgctccttttactcaacccctggggtatctaatcttgccaggtcttggccagttgagattctgttccacctgcctgcctggccctttcctccattaccatccagactgctcgcctcctggggattctcaggggctccattatggcttgatttactccacgtgcagaagtcttgagtggacctaggaggtaggtgggatattttttttcactaggatacagctcatgccaacccatcctaagtgagttcagaatcagggtatcttgccctataagataaacagtcaaaatgccaccgagctgttcactagtgatgtgtggcaaatcaaatcaactgttgaagaaggggtgagttttctgtgctacaagcacctgtcactgttggtacttgcaggaggcttctgctgggtatgttttggaagtgagtgtcactacttggctttgcttagcaggttctgcttcacacttgttctttgacctgctgacttgtgacttgcagaaacataggcagtagtcctagcctggtaaagaccctccaccacccctataagtttgattgctatgcaggtttgggagaggaggcctattgggctcttggatggaaccctttcccgtattaaacaaaccagagacagaatcagtgctgactcaggatctcctggtttggaatcgtaatgtgcctcaatcctctttccaagcaggcctcaccagtctctttctctttcctgcttcacccctgcaatgagccaagaaccaacactacatccacctagaactgcagaagggcttgtggtttcaaccaagacccatcctgagcaagggacttggcttggtgcttttgatcccaaagttcccacaccggcagtggcctgctggggcaatggcatctgtcacggtgttttctccagcaggtggagattatggaacctacatatgggtctggaaaaactgtacactgttgtcaccttgaccattaaaaaccagaatgaggacaa

SEQ ID NO: 427768 - DNA, 3556 bp, Homo sapiens
  misc_feature (3165)..(3166): n is a, c, g, or t
  misc_feature (3169)..(3169): n is a, c, g, or t
  misc_feature (3171)..(3172): n is a, c, g, or t
  misc_feature (3174)..(3175): n is a, c, g, or t
tagattaggacccgcgggaaggttgtttaccgtaactaggggtaaggaggtacaaagaacaaggaagttaggctttgaaaatagagaacaaagaacaagtaagctgaacaagtaagttcctctttggagaggcaagagggcaaagaagctgaggacccagaagacaggattgtgcctaagaaagtggccttggagcagaggcccaaagaaagcggggagagcgccttgcccatcggtaagggaaaggtgctccaggcacagaagcagctaatgcaacggccctgaggcaaatgcaagataactggcaagttccaggaacagcaaggagggcaaggcgcctggagcagaggaagctagcggatcccttgatgagagggaggaactggcccatctctcatgggtcctgcaggcaggccatgagactgtcttttatgcggggcgagataacgaggcatggacgtgttgtgagcggaggcctagcctgttcaaggtctgaatttttacccctagaatgtaagaagcatgggagcagggactttgttttgctccctgccatatccacagccctagaaaaacgtcgggccattgatagctctcagtaaatgcttgacaagtaagtgaatgaacgaatgcacaattaatgaaatgagggctgcgtcaatgaataactgggaatctgactcctgcagggagccttcagcccacaggtgtatgtaagacccgccccgcctctcatccttcgggctcccacccccgccgttaggctgcggttcgcgccgcggtcgccagagggcgcggagcggcggggcttcccgcacggagggctttgcgtgaggcaccgcgtggggcggggctgcgggcgggctcccagctgctgggccctcatcggctgggcctcgtcgaccggcaagcggaacgcggcagcggggctgggcctgtgcggcggccgccggagcgctttggaaggcgcacggggcgaagatggcggcggagcgacaggaggcgctgagggagttcgtggcggtgacgggcgccgaggaggaccgggcccgcttctttctcgagtcggccggctgggacttgcagatcgcgctagcgagcttttatgaggacggaggggatgaagacattgtgaccatttcgcaggcaacccccagttcagtgtccagaggcacagcccccagtgataatagagtgacatccttcagagacctcattcatgaccaagatgaagatgaggaggaagaggaaggccagaggttttatgctgggggctcagagagaagtggacagcagattgttggccctcccaggaagaaaagtcccaacgagctggtggatgatctctttaaaggtgccaaagagcatggagctgtagctgtggagcgagtgaccaagagccctggagagaccagtaaaccgagaccatttgcaggaggtggctaccgccttggggcagcaccagaggaagagtctgcctatgtggcaggagaaaagaggcagcattccagccaagatgttcatgtagtattgaaactctggaagagtggattcagcctggataatggagaactcagaagctaccaagacccatccaatgcccagtttctggagtctatccgcagaggggaggtgccagcagagcttcggaggctagctcacggtggacaggtgaacttggatatggaggaccatcgggacgaggactttgtgaagcccaaaggagccttcaaagccttcactggcgagggtcagaaactgggcagcactgccccccaggtgttgagtaccagctctccagcccaacaggcagaaaatgaagccaaagccagctcttccatcttaatcgacgaatcagagcctaccacaaacatccaaattcggcttgcagacggcgggaggctggtgcagaaatttaaccacagccacaggatcagcgacatccgactcttcatcgtggatgcccggccagccatggctgccaccagctttatcctcatgactactttcccgaacaaagagctggctgatgagagccagaccctgaaggaagccaacctgctcaatgctgtcatcgtgcagcggttaacataaccgcccagccagctgcctggcctccctcctgtgtttcccatggccagtggccatgccccatggggatcgcccctcctgcccccttgtgcacacccagcagtccagtgcaacgtctcctccatagctctgggttcttagatcttggttggacgtttgttttctccttagttgcatttcctgggtttttgtgatgatcaatggactttaatgaaaaaaaaaataaaaacaaccaaaaaaattgaaggaatatcaccagcatgttgtacggaaactctcccactgaagcaggctttaattgctttaaaattatatttatcttggggcctgtgggaggaaacttccttccatcttctctgcataaaaacttgtggcacacaatgcttattcactagtgtgtcccacccgccagccccacagatgactggaggaaggaggggaaatgtgtagaaagaggcttcgccaccacttgttcccacgagaatatatcacttgcccagataaaactgggcggcagccagagttccctgaagtgggaagtcagagctacatgcacacagtgtcttcagaaggtgaaaataaatatttccctgtgctccttttactcaacccctggggtatctaatcttgccaggtcttggccagttgagattctgttccacctgcctgcctggccctttcctccattaccatccagactgctcgcctcctggggattctcaggggctccattatggcttgacactaggatacagctcatgccaacccatcctaagtgagttcagaatcagggtatcttgccctataagataaacagtcaaaatgccaccgagctgttcactagtgatgtgtggcaaatcaaatcaactgttgaagaaggggtgagttttctgtgctacaagcacctgtcactgttggtacttgcagcagtccagtgcaacgtctcctccatagctctgggttcttagatcttggttggacgtttgttttctccttagttgcatttcctgggtttttgtgatgatcaatggactttaatgaaaaaaaaaataaaaacaaccaaaaaaattgaannaanannannaaaaaaaaaaaaaaaaaaaaaaaaaaaaaaaaaaaaaaaaaaaaaaaaaaaaaaaaaaaaaaaaaaaaaaaaaaaaaaaaaaaaaaaaaaaaaaaaaaccggcaaaatttttgccaaaatttgcaaaagaaaaatttttttaaaaaaaaaaaaaaaaaaaaaaaaaaaaaaaaaaaaaaaaaaaaaaaaacttgggttttaaaacaaaaacccctttaaaggaatttggttcaaaagggatttgggtattaaaaaaaaatttttttttgaaaaaacatagggggaatttttaaaaactttaaaaaaaaatttgtaggggggcttttccatttaaaagaaatgggaaaacccaaggttttaaaaaagaaaagggggccccct

SEQ ID NO: 427769 - DNA, 3834 bp, Homo sapiens
tagattaggacccgcgggaaggttgtttaccgtaactaggggtaaggaggtacaaagaacaaggaagttaggctttgaaaatagagaacaaagaacaagtaagctgaacaagtaagttcctctttggagaggcaagagggcaaagaagctgaggacccagaagacaggattgtgcctaagaaagtggccttggagcagaggcccaaagaaagcggggagagcgccttgcccatcggtaagggaaaggtgctccaggcacagaagcagctaatgcaacggccctgaggcaaatgcaagataactggcaagttccaggaacagcaaggagggcaaggcgcctggagcagaggaagctagcggatcccttgatgagagggaggaactggcccatctctcatgggtcctgcaggcaggccatgagactgtcttttatgcggggcgagataacgaggcatggacgtgttgtgagcggaggcctagcctgttcaaggtctgaatttttacccctagaatgtaagaagcatgggagcagggactttgttttgctccctgccatatccacagccctagaaaaacgtcgggccattgatagctctcagtaaatgcttgacaagtaagtgaatgaacgaatgcacaattaatgaaatgagggctgcgtcaatgaataactgggaatctgactcctgcagggagccttcagcccacaggtgtatgtaagacccgccccgcctctcatccttcgggctcccacccccgccgttaggctgcggttcgcgccgcggtcgccagagggcgcggagcggcggggcttcccgcacggagggctttgcgtgaggcaccgcgtggggcggggctgcgggcgggctcccagctgctgggccctcatcggctgggcctcgtcgaccggcaagcggaacgcggcagcggggctgggcctgtgcggcggccgccggagcgctttggaaggcgcacggggcgaagatggcggcggagcgacaggaggcgctgagggagttcgtggcggtgacgggcgccgaggaggaccgggcccgcttctttctcgagtcggccggctgggacttgcagatcgcgctagcgagcttttatgaggacggaggggatgaagacattgtgaccatttcgcaggcaacccccagttcagtgtccagaggcacagcccccagtgataatagagtgacatccttcagagacctcattcatgaccaagatgaagatgaggaggaagaggaaggccagaggggccacagtgtgtgtcacatgaatggcaaggtgaggtgaggcttgggggagctcctggtgctgtgtcacaccaccttacctgtgtgcattactctgtgcttgttcttttgcatacatctgctgatttgaacctcacggctctgacttaaggagcaggttttatgctgggggctcagagagaagtggacagcagattgttggccctcccaggaagaaaagtcccaacgagctggtggatgatctctttaaaggtgccaaagagcatggagctgtagctgtggagcgagtgaccaagagccctggagagaccagtaaaccgagaccatttgcaggaggtggctaccgccttggggcagcaccagaggaagagtctgcctatgtggcaggagaaaagaggcagcattccagccaagatgttcatgtagtattgaaactctggaagagtggattcagcctggataatggagaactcagaagctaccaagacccatccaatgcccagtttctggagtctatccgcagaggggaggtgccagcagagcttcggaggctagctcacggtggacaggtgaacttggatatggaggaccatcgggacgaggactttgtgaagcccaaaggagccttcaaagccttcactggcgagggtcagaaactgggcagcactgccccccaggtgttgagtaccagctctccagcccaacaggcagaaaatgaagccaaagccagctcttccatcttaatcgacgaatcagagcctaccacaaacatccaaattcggcttgcagacggcgggaggctggtgcagaaatttaaccacagccacaggatcagcgacatccgactcttcatcgtggatgcccggccagccatggctgccaccagctttatcctcatgactactttcccgaacaaagagctggctgatgagagccagaccctgaaggaagccaacctgctcaatgctgtcatcgtgcagcggttaacataaccgcccagccagctgcctggcctccctcctgtgtttcccatggccagtggccatgccccatggggatcgcccctcctgcccccttgtgcacacccagcagtccagtgcaacgtctcctccatagctctgggttcttagatcttggttggacgtttgttttctccttagttgcatttcctgggtttttgtgatgatcaatggactttaatgaaaaaaaaaataaaaacaaccaaaaaaattgaaggaatatcaccagcatgttgtacggaaactctcccactgaagcaggctttaattgctttaaaattatatttatcttggggcctgtgggaggaaacttccttccatcttctctgcataaaaacttgtggcacacaatgcttattcactagtgtgtcccacccgccagccccacagatgactggaggaaggaggggaaatgtgtagaaagaggcttcgccaccacttgttcccacgagaatatatcacttgcccagataaaactgggcggcagccagagttccctgaagtgggaagtcagagctacatgcacacagtgtcttcagaaggtgaaaataaatatttccctgtgctccttttactcaacccctggggtatctaatcttgccaggtcttggccagttgagattctgttccacctgcctgcctggccctttcctccattaccatccagactgctcgcctcctggggattctcaggggctccattatggcttgatttactccacgtgcagaagtcttgagtggacctaggaggtaggtgggatattttttttcactaggatacagctcatgccaacccatcctaagtgagttcagaatcagggtatcttgccctataagataaacagtcaaaatgccaccgagctgttcactagtgatgtgtggcaaatcaaatcaactgttgaagaaggggtgagttttctgtgctacaagcacctgtcactgttggtacttgcaggaggcttctgctgggtatgttttggaagtgagtgtcactacttggctttgcttagcaggttctgcttcacacttgttctttgacctgctgacttgtgacttgcagaaacataggcagtagtcctagcctggtaaagaccctccaccacccctataagtttgattgctatgcaggtttgggagaggaggcctattgggctcttggatggaaccctttcccgtattaaacaaaccagagacagaatcagtgctgactcaggatctcctggtttggaatcgtaatgtgcctcaatcctctttccaagcaggcctcaccagtctctttctctttcctgcttcacccctgcaatgagccaagaaccaacactacatccacctagaactgcagaagggcttgtggtttcaaccaagacccatcctgagcaagggacttggcttggtgcttttgatcccaaagttcccacaccggcagtggcctgctggggcaatggcatctgtcacggtgttttctccagcaggtggagattatggaacctacatatgggtctggaaaaactgtacactgttgtcaccttgaccattaaaaaccagaatgaggacaa

SEQ ID NO: 427770 - DNA, 3582 bp, Homo sapiens
tagattaggacccgcgggaaggttgtttaccgtaactaggggtaaggaggtacaaagaacaaggaagttaggctttgaaaatagagaacaaagaacaagtaagctgaacaagtaagttcctctttggagaggcaagagggcaaagaagctgaggacccagaagacaggattgtgcctaagaaagtggccttggagcagaggcccaaagaaagcggggagagcgccttgcccatcggtaagggaaaggtgctccaggcacagaagcagctaatgcaacggccctgaggcaaatgcaagataactggcaagttccaggaacagcaaggagggcaaggcgcctggagcagaggaagctagcggatcccttgatgagagggaggaactggcccatctctcatgggtcctgcaggcaggccatgagactgtcttttatgcggggcgagataacgaggcatggacgtgttgtgagcggaggcctagcctgttcaaggtctgaatttttacccctagaatgtaagaagcatgggagcagggactttgttttgctccctgccatatccacagccctagaaaaacgtcgggccattgatagctctcagtaaatgcttgacaagtaagtgaatgaacgaatgcacaattaatgaaatgagggctgcgtcaatgaataactgggaatctgactcctgcagggagccttcagcccacaggtgtatgtaagacccgccccgcctctcatccttcgggctcccacccccgccgttaggctgcggttcgcgccgcggtcgccagagggcgcggagcggcggggcttcccgcacggagggctttgcgtgaggcaccgcgtggggcggggctgcgggcgggctcccagctgctgggccctcatcggctgggcctcgtcgaccggcaagcggaacgcggcagcggggctgggcctgtgcggcggccgccggagcgctttggaaggcgcacggggcgaagatggcggcggagcgacaggaggcgctgagggagttcgtggcggtgacgggcgccgaggaggaccgggcccgcttctttctcgagtcggccggctgggacttgcagatcgcgctagcgagcttttatgaggacggaggggatgaagacattgtgaccatttcgcaggcaacccccagttcagtgtccagaggcacagcccccagtgataatagagtgacatccttcagagacctcattcatgaccaagatgaagatgaggaggaagaggaaggccagaggtgccaaagagcatggagctgtagctgtggagcgagtgaccaagagccctggagagaccagtaaaccgagaccatttgcaggaggtggctaccgccttggggcagcaccagaggaagagtctgcctatgtggcaggagaaaagaggcagcattccagccaagatgttcatgtagtattgaaactctggaagagtggattcagcctggataatggagaactcagaagctaccaagacccatccaatgcccagtttctggagtctatccgcagaggggaggtgccagcagagcttcggaggctagctcacggtggacaggtgaacttggatatggaggaccatcgggacgaggactttgtgaagcccaaaggagccttcaaagccttcactggcgagggtcagaaactgggcagcactgccccccaggtgttgagtaccagctctccagcccaacaggcagaaaatgaagccaaagccagctcttccatcttaatcgacgaatcagagcctaccacaaacatccaaattcggcttgcagacggcgggaggctggtgcagaaatttaaccacagccacaggatcagcgacatccgactcttcatcgtggatgcccggccagccatggctgccaccagctttatcctcatgactactttcccgaacaaagagctggctgatgagagccagaccctgaaggaagccaacctgctcaatgctgtcatcgtgcagcggttaacataaccgcccagccagctgcctggcctccctcctgtgtttcccatggccagtggccatgccccatggggatcgcccctcctgcccccttgtgcacacccagcagtccagtgcaacgtctcctccatagctctgggttcttagatcttggttggacgtttgttttctccttagttgcatttcctgggtttttgtgatgatcaatggactttaatgaaaaaaaaaataaaaacaaccaaaaaaattgaaggaatatcaccagcatgttgtacggaaactctcccactgaagcaggctttaattgctttaaaattatatttatcttggggcctgtgggaggaaacttccttccatcttctctgcataaaaacttgtggcacacaatgcttattcactagtgtgtcccacccgccagccccacagatgactggaggaaggaggggaaatgtgtagaaagaggcttcgccaccacttgttcccacgagaatatatcacttgcccagataaaactgggcggcagccagagttccctgaagtgggaagtcagagctacatgcacacagtgtcttcagaaggtgaaaataaatatttccctgtgctccttttactcaacccctggggtatctaatcttgccaggtcttggccagttgagattctgttccacctgcctgcctggccctttcctccattaccatccagactgctcgcctcctggggattctcaggggctccattatggcttgatttactccacgtgcagaagtcttgagtggacctaggaggtaggtgggatattttttttcactaggatacagctcatgccaacccatcctaagtgagttcagaatcagggtatcttgccctataagataaacagtcaaaatgccaccgagctgttcactagtgatgtgtggcaaatcaaatcaactgttgaagaaggggtgagttttctgtgctacaagcacctgtcactgttggtacttgcaggaggcttctgctgggtatgttttggaagtgagtgtcactacttggctttgcttagcaggttctgcttcacacttgttctttgacctgctgacttgtgacttgcagaaacataggcagtagtcctagcctggtaaagaccctccaccacccctataagtttgattgctatgcaggtttgggagaggaggcctattgggctcttggatggaaccctttcccgtattaaacaaaccagagacagaatcagtgctgactcaggatctcctggtttggaatcgtaatgtgcctcaatcctctttccaagcaggcctcaccagtctctttctctttcctgcttcacccctgcaatgagccaagaaccaacactacatccacctagaactgcagaagggcttgtggtttcaaccaagacccatcctgagcaagggacttggcttggtgcttttgatcccaaagttcccacaccggcagtggcctgctggggcaatggcatctgtcacggtgttttctccagcaggtggagattatggaacctacatatgggtctggaaaaactgtacactgttgtcaccttgaccattaaaaaccagaatgaggacaa

SEQ ID NO: 427771 - DNA, 3609 bp, Homo sapiens
tagattaggacccgcgggaaggttgtttaccgtaactaggggtaaggaggtacaaagaacaaggaagttaggctttgaaaatagagaacaaagaacaagtaagctgaacaagtaagttcctctttggagaggcaagagggcaaagaagctgaggacccagaagacaggattgtgcctaagaaagtggccttggagcagaggcccaaagaaagcggggagagcgccttgcccatcggtaagggaaaggtgctccaggcacagaagcagctaatgcaacggccctgaggcaaatgcaagataactggcaagttccaggaacagcaaggagggcaaggcgcctggagcagaggaagctagcggatcccttgatgagagggaggaactggcccatctctcatgggtcctgcaggcaggccatgagactgtcttttatgcggggcgagataacgaggcatggacgtgttgtgagcggaggcctagcctgttcaaggtctgaatttttacccctagaatgtaagaagcatgggagcagggactttgttttgctccctgccatatccacagccctagaaaaacgtcgggccattgatagctctcagtaaatgcttgacaagtaagtgaatgaacgaatgcacaattaatgaaatgagggctgcgtcaatgaataactgggaatctgactcctgcagggagccttcagcccacaggtgtatgtaagacccgccccgcctctcatccttcgggctcccacccccgccgttaggctgcggttcgcgccgcggtcgccagagggcgcggagcggcggggcttcccgcacggagggctttgcgtgaggcaccgcgtggggcggggctgcgggcgggctcccagctgctgggccctcatcggctgggcctcgtcgaccggcaagcggaacgcggcagcggggctgggcctgtgcggcggccgccggagcgctttggaaggcgcacggggcgaagatggcggcggagcgacaggaggcgctgagggagttcgtggcggtgacgggcgccgaggaggaccgggcccgcttctttctcgagtcggccggctgggacttgcagatcgcgctagcgagcttttatgaggacggaggggatgaagacattgtgaccatttcgcaggcaacccccagttcagtgtccagaggcacagcccccagtgataatagagtgacatccttcagagacctcattcatgaccaagatgaagatgaggaggaagaggaaggccagaggttttatgctgggggctcagagagaagtggacagcagattgttggccctcccaggaagaaaagtcccaacgagctggtggatgatctctttaaaggtgccaaagagcatggagctgtagctgtggagcgagtgaccaagagccctggagagaccagtaaaccgagaccatttgcaggaggtggctaccgccttggggcagcaccagaggaagagtctgcctatgtggcaggagaaaagaggcagcattccagccaagatgttcatgtagtattgaaactctggaagagtggattcagcctggataatggagaactcagaagctaccaagacccatccaatgcccagtttctggagtctatccgcagaggggaggtgccagcagagcttcggaggctagctcacggtggacaggtgaacttggatatggaggaccatcgggacgaggactttgtgaagcccaaaggagccttcaaagccttcactggcgagggtcagaaactgggcagcactgccccccaggtgttgagtaccagctctccagcccaacaggcagaaaatgaagccaaagccagctcttccatcttaatcgacgaatcagagcctaccacaaacatccaaattcggcttgcagacggcgggaggctggtggatgatctctttaaaggtgccaaagagcatggagctgtagctgtggagcgagtgaccaagagccctggagagaccagtaaacctgctcaatgctgtcatcgtgcagcggttaacataaccgcccagccagctgcctggcctccctcctgtgtttcccatggccagtggccatgccccatggggatcgcccctcctgcccccttgtgcacacccagcagtccagtgcaacgtctcctccatagctctgggttcttagatcttggttggacgtttgttttctccttagttgcatttcctgggtttttgtgatgatcaatggactttaatgaaaaaaaaaataaaaacaaccaaaaaaattgaaggaatatcaccagcatgttgtacggaaactctcccactgaagcaggctttaattgctttaaaattatatttatcttggggcctgtgggaggaaacttccttccatcttctctgcataaaaacttgtggcacacaatgcttattcactagtgtgtcccacccgccagccccacagatgactggaggaaggaggggaaatgtgtagaaagaggcttcgccaccacttgttcccacgagaatatatcacttgcccagataaaactgggcggcagccagagttccctgaagtgggaagtcagagctacatgcacacagtgtcttcagaaggtgaaaataaatatttccctgtgctccttttactcaacccctggggtatctaatcttgccaggtcttggccagttgagattctgttccacctgcctgcctggccctttcctccattaccatccagactgctcgcctcctggggattctcaggggctccattatggcttgatttactccacgtgcagaagtcttgagtggacctaggaggtaggtgggatattttttttcactaggatacagctcatgccaacccatcctaagtgagttcagaatcagggtatcttgccctataagataaacagtcaaaatgccaccgagctgttcactagtgatgtgtggcaaatcaaatcaactgttgaagaaggggtgagttttctgtgctacaagcacctgtcactgttggtacttgcaggaggcttctgctgggtatgttttggaagtgagtgtcactacttggctttgcttagcaggttctgcttcacacttgttctttgacctgctgacttgtgacttgcagaaacataggcagtagtcctagcctggtaaagaccctccaccacccctataagtttgattgctatgcaggtttgggagaggaggcctattgggctcttggatggaaccctttcccgtattaaacaaaccagagacagaatcagtgctgactcaggatctcctggtttggaatcgtaatgtgcctcaatcctctttccaagcaggcctcaccagtctctttctctttcctgcttcacccctgcaatgagccaagaaccaacactacatccacctagaactgcagaagggcttgtggtttcaaccaagacccatcctgagcaagggacttggcttggtgcttttgatcccaaagttcccacaccggcagtggcctgctggggcaatggcatctgtcacggtgttttctccagcaggtggagattatggaacctacatatgggtctggaaaaactgtacactgttgtcaccttgaccattaaaaaccagaatgaggacaa

SEQ ID NO: 427772 - DNA, 3324 bp, Homo sapiens
gaacaagaatgaacgccagcctcatttcatgggttttggttctccacaggatctgcctcggtctgtcagacattcctaaggaaaattgtataataactatttcgggaatgcagttatctcatcatggtcagtctttggggaagtgggctgagaaattacatgtgttctattctctattttcattcctattgtgaccttcacaccgactcaaaaccttccttttagatacttctggatataaaaatatatgttaattttggggtttcacactcctgagtgaaaggcagtgtcatcaagtacgtgaatgcccagctcctaaatgtctttctcgttctcctcccacccagtcacgtcctccaggcagtgaccttcctttatttcacattccgcttacttccttgacccctcagcatttcagacctgaaaggacactggtactgttgtccttgtcggggcctgtggctttgcctctcattccctggtgaatgtcaggaaatagagggctgagactaatttttataggttctcaatttttcttgcttggggacaagctgttgacttagctctgaataggagtaataaggaggcagtgggccaggctgcatgacaactggttttcaggcccatataaaaaagtactaactttattatctcaagccatgcctggcctattgcaaagcccagtgtgggtgtcttggggcttgtatttgagattggagcttctctgacctccagtaccctttcctcaggggccacagtgtgtgtcacatgaatggcaaggtgaggtgaggcttgggggagctcctggtgctgtgtcacaccaccttacctgtgtgcattactctgtgcttgttcttttgcatacatctgctgatttgaacctcacggctctgacttaaggagcaggttttatgctgggggctcagagagaagtggacagcagattgttggccctcccaggaagaaaagtcccaacgagctggtggatgatctctttaaaggtgccaaagagcatggagctgtagctgtggagcgagtgaccaagagccctggagagaccagtaaaccgagaccatttgcaggaggtggctaccgccttggggcagcaccagaggaagagtctgcctatgtggcaggagaaaagaggcagcattccagccaagatgttcatgtagtattgaaactctggaagagtggattcagcctggataatggagaactcagaagctaccaagacccatccaatgcccagtttctggagtctatccgcagaggggaggtgccagcagagcttcggaggctagctcacggtggacaggtgaacttggatatggaggaccatcgggacgaggactttgtgaagcccaaaggagccttcaaagccttcactggcgagggtcagaaactgggcagcactgccccccaggtgttgagtaccagctctccagcccaacaggcagaaaatgaagccaaagccagctcttccatcttaatcgacgaatcagagcctaccacaaacatccaaattcggcttgcagacggcgggaggctggtgcagaaatttaaccacagccacaggatcagcgacatccgactcttcatcgtggatgcccggccagccatggctgccaccagctttatcctcatgactactttcccgaacaaagagctggctgatgagagccagaccctgaaggaagccaacctgctcaatgctgtcatcgtgcagcggttaacataaccgcccagccagctgcctggcctccctcctgtgtttcccatggccagtggccatgccccatggggatcgcccctcctgcccccttgtgcacacccagcagtccagtgcaacgtctcctccatagctctgggttcttagatcttggttggacgtttgttttctccttagttgcatttcctgggtttttgtgatgatcaatggactttaatgaaaaaaaaaataaaaacaaccaaaaaaattgaaggaatatcaccagcatgttgtacggaaactctcccactgaagcaggctttaattgctttaaaattatatttatcttggggcctgtgggaggaaacttccttccatcttctctgcataaaaacttgtggcacacaatgcttattcactagtgtgtcccacccgccagccccacagatgactggaggaaggaggggaaatgtgtagaaagaggcttcgccaccacttgttcccacgagaatatatcacttgcccagataaaactgggcggcagccagagttccctgaagtgggaagtcagagctacatgcacacagtgtcttcagaaggtgaaaataaatatttccctgtgctccttttactcaacccctggggtatctaatcttgccaggtcttggccagttgagattctgttccacctgcctgcctggccctttcctccattaccatccagactgctcgcctcctggggattctcaggggctccattatggcttgatttactccacgtgcagaagtcttgagtggacctaggaggtaggtgggatattttttttcactaggatacagctcatgccaacccatcctaagtgagttcagaatcagggtatcttgccctataagataaacagtcaaaatgccaccgagctgttcactagtgatgtgtggcaaatcaaatcaactgttgaagaaggggtgagttttctgtgctacaagcacctgtcactgttggtacttgcaggaggcttctgctgggtatgttttggaagtgagtgtcactacttggctttgcttagcaggttctgcttcacacttgttctttgacctgctgacttgtgacttgcagaaacataggcagtagtcctagcctggtaaagaccctccaccacccctataagtttgattgctatgcaggtttgggagaggaggcctattgggctcttggatggaaccctttcccgtattaaacaaaccagagacagaatcagtgctgactcaggatctcctggtttggaatcgtaatgtgcctcaatcctctttccaagcaggcctcaccagtctctttctctttcctgcttcacccctgcaatgagccaagaaccaacactacatccacctagaactgcagaagggcttgtggtttcaaccaagacccatcctgagcaagggacttggcttggtgcttttgatcccaaagttcccacaccggcagtggcctgctggggcaatggcatctgtcacggtgttttctccagcaggtggagattatggaacctacatatgggtctggaaaaactgtacactgttgtcaccttgaccattaaaaaccagaatgaggacaa

SEQ ID NO: 427773 - DNA, 3465 bp, Homo sapiens
tagattaggacccgcgggaaggttgtttaccgtaactaggggtaaggaggtacaaagaacaaggaagttaggctttgaaaatagagaacaaagaacaagtaagctgaacaagtaagttcctctttggagaggcaagagggcaaagaagctgaggacccagaagacaggattgtgcctaagaaagtggccttggagcagaggcccaaagaaagcggggagagcgccttgcccatcggtaagggaaaggtgctccaggcacagaagcagctaatgcaacggccctgaggcaaatgcaagataactggcaagttccaggaacagcaaggagggcaaggcgcctggagcagaggaagctagcggatcccttgatgagagggaggaactggcccatctctcatgggtcctgcaggcaggccatgagactgtcttttatgcggggcgagataacgaggcatggacgtgttgtgagcggaggcctagcctgttcaaggtctgaatttttacccctagaatgtaagaagcatgggagcagggactttgttttgctccctgccatatccacagccctagaaaaacgtcgggccattgatagctctcagtaaatgcttgacaagtaagtgaatgaacgaatgcacaattaatgaaatgagggctgcgtcaatgaataactgggaatctgactcctgcagggagccttcagcccacaggtgtatgtaagacccgccccgcctctcatccttcgggctcccacccccgccgttaggctgcggttcgcgccgcggtcgccagagggcgcggagcggcggggcttcccgcacggagggctttgcgtgaggcaccgcgtggggcggggctgcgggcgggctcccagctgctgggccctcatcggctgggcctcgtcgaccggcaagcggaacgcggcagcggggctgggcctgtgcggcggccgccggagcgctttggaaggcgcacggggcgaagatggcggcggagcgacaggaggcgctgagggagttcgtggcggtgacgggcgccgaggaggaccgggcccgcttctttctcgagtcggccggctgggacttgcagatcgcgctagcgagcttttatgaggacggaggggatgaagacattgtgaccatttcgcaggcaacccccagttcagtgtccagaggcacagcccccagtgataatagagtgacatccttcagagacctcattcatgaccaagatgaagatgaggaggaagaggaaggccagaggttttatgctgggggctcagagagaagtggacagcagattgttggccctcccaggaagaaaagtcccaacgagctggtggatgatctctttaaaggtgccaaagagcatggagctgtagctgtggagcgagtgaccaagagccctggagagaccagtaaaccgagaccatttgcaggaggtggctaccgccttggggcagcaccagaggaagagtctgcctatgtggcaggagaaaagaggcagcattccagccaagatgttcatgtagtattgaaactctggaagagtggattcagcctggataatggagaactcagaagctaccaagacccatccaatgcccagtttctggagtctatccgcagaggggaggtgccagcagagcttcggaggctagctcacggtggacaggtgaacttggatatggaggaccatcgggacgaggactttgtgaagcccaaaggagccttcaaagccttcactggcgagggtcagaaactgggcagcactgccccccaggtgttgagtaccagctctccagcccaacaggcagaatgatgagagccagaccctgaaggaagccaacctgctcaatgctgtcatcgtgcagcggttaacataaccgcccagccagctgcctggcctccctcctgtgtttcccatggccagtggccatgccccatggggatcgcccctcctgcccccttgtgcacacccagcagtccagtgcaacgtctcctccatagctctgggttcttagatcttggttggacgtttgttttctccttagttgcatttcctgggtttttgtgatgatcaatggactttaatgaaaaaaaaaataaaaacaaccaaaaaaattgaaggaatatcaccagcatgttgtacggaaactctcccactgaagcaggctttaattgctttaaaattatatttatcttggggcctgtgggaggaaacttccttccatcttctctgcataaaaacttgtggcacacaatgcttattcactagtgtgtcccacccgccagccccacagatgactggaggaaggaggggaaatgtgtagaaagaggcttcgccaccacttgttcccacgagaatatatcacttgcccagataaaactgggcggcagccagagttccctgaagtgggaagtcagagctacatgcacacagtgtcttcagaaggtgaaaataaatatttccctgtgctccttttactcaacccctggggtatctaatcttgccaggtcttggccagttgagattctgttccacctgcctgcctggccctttcctccattaccatccagactgctcgcctcctggggattctcaggggctccattatggcttgatttactccacgtgcagaagtcttgagtggacctaggaggtaggtgggatattttttttcactaggatacagctcatgccaacccatcctaagtgagttcagaatcagggtatcttgccctataagataaacagtcaaaatgccaccgagctgttcactagtgatgtgtggcaaatcaaatcaactgttgaagaaggggtgagttttctgtgctacaagcacctgtcactgttggtacttgcaggaggcttctgctgggtatgttttggaagtgagtgtcactacttggctttgcttagcaggttctgcttcacacttgttctttgacctgctgacttgtgacttgcagaaacataggcagtagtcctagcctggtaaagaccctccaccacccctataagtttgattgctatgcaggtttgggagaggaggcctattgggctcttggatggaaccctttcccgtattaaacaaaccagagacagaatcagtgctgactcaggatctcctggtttggaatcgtaatgtgcctcaatcctctttccaagcaggcctcaccagtctctttctctttcctgcttcacccctgcaatgagccaagaaccaacactacatccacctagaactgcagaagggcttgtggtttcaaccaagacccatcctgagcaagggacttggcttggtgcttttgatcccaaagttcccacaccggcagtggcctgctggggcaatggcatctgtcacggtgttttctccagcaggtggagattatggaacctacatatgggtctggaaaaactgtacactgttgtcaccttgaccattaaaaaccagaatgaggacaa

SEQ ID NO: 427774 - DNA, 3265 bp, Homo sapiens
tagattaggacccgcgggaaggttgtttaccgtaactaggggtaaggaggtacaaagaacaaggaagttaggctttgaaaatagagaacaaagaacaagtaagctgaacaagtaagttcctctttggagaggcaagagggcaaagaagctgaggacccagaagacaggattgtgcctaagaaagtggccttggagcagaggcccaaagaaagcggggagagcgccttgcccatcggtaagggaaaggtgctccaggcacagaagcagctaatgcaacggccctgaggcaaatgcaagataactggcaagttccaggaacagcaaggagggcaaggcgcctggagcagaggaagctagcggatcccttgatgagagggaggaactggcccatctctcatgggtcctgcaggcaggccatgagactgtcttttatgcggggcgagataacgaggcatggacgtgttgtgagcggaggcctagcctgttcaaggtctgaatttttacccctagaatgtaagaagcatgggagcagggactttgttttgctccctgccatatccacagccctagaaaaacgtcgggccattgatagctctcagtaaatgcttgacaagtaagtgaatgaacgaatgcacaattaatgaaatgagggctgcgtcaatgaataactgggaatctgactcctgcagggagccttcagcccacaggtgtatgtaagacccgccccgcctctcatccttcgggctcccacccccgccgttaggctgcggttcgcgccgcggtcgccagagggcgcggagcggcggggcttcccgcacggagggctttgcgtgaggcaccgcgtggggcggggctgcgggcgggctcccagctgctgggccctcatcggctgggcctcgtcgaccggcaagcggaacgcggcagcggggctgggcctgtgcggcggccgccggagcgctttggaaggcgcacggggcgaagatggcggcggagcgacaggaggcgctgagggagttcgtggcggtgacgggcgccgaggaggaccgggcccgcttctttctcgagtcggccggctgggacttgcagatcgcgctagcgagcttttatgaggacggaggggatgaagacattgtgaccatttcgcaggcaacccccagttcagtgtccagaggcacagcccccagtgataatagagtgacatccttcagagacctcattcatgaccaagatgaagatgaggaggaagaggaaggccagaggttttatgctgggggctcagagagaagtggacagcagattgttggccctcccaggaagaaaagtcccaacgagctggtggatgatctctttaaaggtgccaaagagcatggagctgtagctgtggagcgagtgaccaagagccctggagagaccagtaaaccgagaccatttgcaggaggtggctaccgccttggggcagcaccagaggaagagtctgcctatgtggcaggagaaaagaggcagcattccagccaagatgttcatgtagtattgaaactctggaagagtggattcagcctggataatggagaactcagaagctaccaagacccatccaatgcccagtttctggagtctatccgcagaggggaggtgccagcagagcttcggaggctagctcacggtggacaggtgaacttggatatggaggaccatcgggacgaggactttgtgaagcccaaaggagccttcaaagccttcactggcgagggtcagaaactgggcagtgtgcacacccagcagtccagtgcaacgtctcctccatagctctgggttcttagatcttggttggacgtttgttttctccttagttgcatttcctgggtttttgtgatgatcaatggactttaatgaaaaaaaaaataaaaacaaccaaaaaaattgaaggaatatcaccagcatgttgtacggaaactctcccactgaagcaggctttaattgctttaaaattatatttatcttggggcctgtgggaggaaacttccttccatcttctctgcataaaaacttgtggcacacaatgcttattcactagtgtgtcccacccgccagccccacagatgactggaggaaggaggggaaatgtgtagaaagaggcttcgccaccacttgttcccacgagaatatatcacttgcccagataaaactgggcggcagccagagttccctgaagtgggaagtcagagctacatgcacacagtgtcttcagaaggtgaaaataaatatttccctgtgctccttttactcaacccctggggtatctaatcttgccaggtcttggccagttgagattctgttccacctgcctgcctggccctttcctccattaccatccagactgctcgcctcctggggattctcaggggctccattatggcttgatttactccacgtgcagaagtcttgagtggacctaggaggtaggtgggatattttttttcactaggatacagctcatgccaacccatcctaagtgagttcagaatcagggtatcttgccctataagataaacagtcaaaatgccaccgagctgttcactagtgatgtgtggcaaatcaaatcaactgttgaagaaggggtgagttttctgtgctacaagcacctgtcactgttggtacttgcaggaggcttctgctgggtatgttttggaagtgagtgtcactacttggctttgcttagcaggttctgcttcacacttgttctttgacctgctgacttgtgacttgcagaaacataggcagtagtcctagcctggtaaagaccctccaccacccctataagtttgattgctatgcaggtttgggagaggaggcctattgggctcttggatggaaccctttcccgtattaaacaaaccagagacagaatcagtgctgactcaggatctcctggtttggaatcgtaatgtgcctcaatcctctttccaagcaggcctcaccagtctctttctctttcctgcttcacccctgcaatgagccaagaaccaacactacatccacctagaactgcagaagggcttgtggtttcaaccaagacccatcctgagcaagggacttggcttggtgcttttgatcccaaagttcccacaccggcagtggcctgctggggcaatggcatctgtcacggtgttttctccagcaggtggagattatggaacctacatatgggtctggaaaaactgtacactgttgtcaccttgaccattaaaaaccagaatgaggacaa

SEQ ID NO: 427775 - DNA, 2339 bp, Homo sapiens
  misc_feature (29)..(29): n is a, c, g, or t
  misc_feature (31)..(32): n is a, c, g, or t
ggtggtcgtctagaggatcccacatgatngnncaccgctccactgaggctaaaactgaccctgttctattatgtcttccagccttatgaccctgtctctcccaccctaggctgtcctgctttcctcccttcaagcccttgttcagttgaagacaccaaggaggaaaaaggccgagtaacttgcccacattactcaggagcggtggagctagcaataacgtatgaaatatatgactcagggtttgaagtgaattctgctggacctgtaagttccataagggcacgattttccctgtctgggtcaatagatcagcagcaccaaacaatgccaggcgcattgcaaatgctcagtaacagtccaagaagggattcccttcttgctaggggccttgtttctgcttgtgttctgatgccatcctctctcctcagcactgccccccaggtgttgagtaccagctctccagcccaacaggcagaaaatgaagccaaagccagctcttccatcttaatcgacgaatcagagcctaccacaaacatccaaattcggcttgcagacggcgggaggctggtgcagaaatttaaccacagccacaggatcagcgacatccgactcttcatcgtggatgcccggccagccatggctgccaccagctttatcctcatgactactttcccgaacaaagagctggctgatgagagccagaccctgaaggaagccaacctgctcaatgctgtcatcgtgcagcggttaacataaccgcccagccagctgcctggcctccctcctgtgtttcccatggccagtggccatgccccatggggatcgcccctcctgcccccttgtgcacacccagcagtccagtgcaacgtctcctccatagctctgggttcttagatcttggttggacgtttgttttctccttagttgcatttcctgggtttttgtgatgatcaatggactttaatgaaaaaaaaaataaaaacaaccaaaaaaattgaaggaatatcaccagcatgttgtacggaaactctcccactgaagcaggctttaattgctttaaaattatatttatcttggggcctgtgggaggaaacttccttccatcttctctgcataaaaacttgtggcacacaatgcttattcactagtgtgtcccacccgccagccccacagatgactggaggaaggaggggaaatgtgtagaaagaggcttcgccaccacttgttcccacgagaatatatcacttgcccagataaaactgggcggcagccagagttccctgaagtgggaagtcagagctacatgcacacagtgtcttcagaaggtgaaaataaatatttccctgtgctccttttactcaacccctggggtatctaatcttgccaggtcttggccagttgagattctgttccacctgcctgcctggccctttcctccattaccatccagactgctcgcctcctggggattctcaggggctccattatggcttgatttactccacgtgcagaagtcttgagtggacctaggaggtaggtgggatattttttttcactaggatacagctcatgccaacccatcctaagtgagttcagaatcagggtatcttgccctataagataaacagtcaaaatgccaccgagctgttcactagtgatgtgtggcaaatcaaatcaactgttgaagaaggggtgagttttctgtgctacaagcacctgtcactgttggtacttgcaggaggcttctgctgggtatgttttggaagtgagtgtcactacttggctttgcttagcaggttctgcttcacacttgttctttgacctgctgacttgtgacttgcagaaacataggcagtagtcctagcctggtaaagaccctccaccacccctataagtttgattgctatgcaggtttgggagaggaggcctattgggctcttggatggaaccctttcccgtattaaacaaaccagagacagaatcagtgctgactcaggatctcctggtttggaatcgtaatgtgcctcaatcctctttccaagcaggcctcaccagtctctttctctttcctgcttcacccctgcaatgagccaagaaccaacactacatccacctagaactgcagaagggcttgtggtttcaaccaagacccatcctgagcaagggacttggcttggtgcttttgatcccaaagttcccacaccggcagtggcctgctggggcaatggcatctgtcacggtgttttctccagcaggtggagattatggaacctacatatgggtctggaaaaactgtacactgttgtcaccttgaccattaaaaaccagaatgaggacaa

SEQ ID NO: 427776 - DNA, 3272 bp, Homo sapiens
tagattaggacccgcgggaaggttgtttaccgtaactaggggtaaggaggtacaaagaacaaggaagttaggctttgaaaatagagaacaaagaacaagtaagctgaacaagtaagttcctctttggagaggcaagagggcaaagaagctgaggacccagaagacaggattgtgcctaagaaagtggccttggagcagaggcccaaagaaagcggggagagcgccttgcccatcggtaagggaaaggtgctccaggcacagaagcagctaatgcaacggccctgaggcaaatgcaagataactggcaagttccaggaacagcaaggagggcaaggcgcctggagcagaggaagctagcggatcccttgatgagagggaggaactggcccatctctcatgggtcctgcaggcaggccatgagactgtcttttatgcggggcgagataacgaggcatggacgtgttgtgagcggaggcctagcctgttcaaggtctgaatttttacccctagaatgtaagaagcatgggagcagggactttgttttgctccctgccatatccacagccctagaaaaacgtcgggccattgatagctctcagtaaatgcttgacaagtaagtgaatgaacgaatgcacaattaatgaaatgagggctgcgtcaatgaataactgggaatctgactcctgcagggagccttcagcccacaggtgtatgtaagacccgccccgcctctcatccttcgggctcccacccccgccgttaggctgcggttcgcgccgcggtcgccagagggcgcggagcggcggggcttcccgcacggagggctttgcgtgaggcaccgcgtggggcggggctgcgggcgggctcccagctgctgggccctcatcggctgggcctcgtcgaccggcaagcggaacgcggcagcggggctgggcctgtgcggcggccgccggagcgctttggaaggcgcacggggcgaagatggcggcggagcgacaggaggcgctgagggagttcgtggcggtgacgggcgccgaggaggaccgggcccgcttctttctcgagtcggccggctgggacttgcagtgataatagagtgacatccttcagagacctcattcatgaccaagatgaagatgaggaggaagaggaaggccagaggtgccaaagagcatggagctgtagctgtggagcgagtgaccaagagccctggagagaccagtaaaccgagaccatttgcaggaggtggctaccgccttggggcagcaccagaggaagagtctgcctatgtggcaggagaaaagaggcagcattccagccaagatgttcatgtagtattgaaactctggaagagtggattcagcctggataatggagaactcagaagctaccaagacccatccaatgcccagtttctggagtctatccgcagaggggaggtgccagcagagcttcggaggctagctcacggtggacaggtgaacttggatatggaggaccatcgggacgaggactttgtgaagcccaaaggagccttcaaagccttcactggcgagggtcagaaactgggcagcactgccccccaggtgttgagtaccagctctccagcccaacaggcagaatgatgagagccagaccctgaaggaagccaacctgctcaatgctgtcatcgtgcagcggttaacataaccgcccagccagctgcctggcctccctcctgtgtttcccatggccagtggccatgccccatggggatcgcccctcctgcccccttgtgcacacccagcagtccagtgcaacgtctcctccatagctctgggttcttagatcttggttggacgtttgttttctccttagttgcatttcctgggtttttgtgatgatcaatggactttaatgaaaaaaaaaataaaaacaaccaaaaaaattgaaggaatatcaccagcatgttgtacggaaactctcccactgaagcaggctttaattgctttaaaattatatttatcttggggcctgtgggaggaaacttccttccatcttctctgcataaaaacttgtggcacacaatgcttattcactagtgtgtcccacccgccagccccacagatgactggaggaaggaggggaaatgtgtagaaagaggcttcgccaccacttgttcccacgagaatatatcacttgcccagataaaactgggcggcagccagagttccctgaagtgggaagtcagagctacatgcacacagtgtcttcagaaggtgaaaataaatatttccctgtgctccttttactcaacccctggggtatctaatcttgccaggtcttggccagttgagattctgttccacctgcctgcctggccctttcctccattaccatccagactgctcgcctcctggggattctcaggggctccattatggcttgatttactccacgtgcagaagtcttgagtggacctaggaggtaggtgggatattttttttcactaggatacagctcatgccaacccatcctaagtgagttcagaatcagggtatcttgccctataagataaacagtcaaaatgccaccgagctgttcactagtgatgtgtggcaaatcaaatcaactgttgaagaaggggtgagttttctgtgctacaagcacctgtcactgttggtacttgcaggaggcttctgctgggtatgttttggaagtgagtgtcactacttggctttgcttagcaggttctgcttcacacttgttctttgacctgctgacttgtgacttgcagaaacataggcagtagtcctagcctggtaaagaccctccaccacccctataagtttgattgctatgcaggtttgggagaggaggcctattgggctcttggatggaaccctttcccgtattaaacaaaccagagacagaatcagtgctgactcaggatctcctggtttggaatcgtaatgtgcctcaatcctctttccaagcaggcctcaccagtctctttctctttcctgcttcacccctgcaatgagccaagaaccaacactacatccacctagaactgcagaagggcttgtggtttcaaccaagacccatcctgagcaagggacttggcttggtgcttttgatcccaaagttcccacaccggcagtggcctgctggggcaatggcatctgtcacggtgttttctccagcaggtggagattatggaacctacatatgggtctggaaaaactgtacactgttgtcaccttgaccattaaaaaccagaatgaggacaa

SEQ ID NO: 427777 - DNA, 2658 bp, Homo sapiens
  misc_feature (535)..(535): n is a, c, g, or t
taagcgagtgacccatcccagtgatgtgagttatttgtctcagtttcatttcactcattaagctcagcacactgctgcccattcccagggtggacagcccatgcagaggctttgctaggtgaaaaagcttggtttgctaaaagtcacaggcagaatcctgcaggtccatgcccttagatgtgccaaattgtaagttgcatagattttaggggtttggggcaaaaaggaaacttatgtttaagtgctctagggaaggaggcattgtttccaggtggtttcattgtcatatgatctccaggttcagaaggcaggtagtgtctggagaaacgattcctggccctgagaagttgaccattaatttctgacagatagtttaagtgcctcctgtgacatacaaaagagacacacactgtccttgtgaaattcatgagctgcaggaggagacactaatcagatcatcccagaaacgtggaaggagggccagggatggagccaaggagctaaggagggctttcctgaggaggtggcattgganccgaggcctgagttgtgattaggattacagaaaggggatcaggcaggggagcctctggaaagaaggacccaaatgtgggaagagagtatggcctgatgaactagaagcgggcagaagagaacgaggggaaagagggtggtataaaattaggtccttgggaacacagtagggttgttggtgtttatctcaaggaaaatggaaacaacagtgaaggactcttggcaaggaagggacttggtcccacatgcctgagcgtagctttcgctgttctgtggagaaagtcaggaaaggggatttgcgaggtgtttagctttccacagggcaggggtatggacagcagaggatggcactgctcaccgcttccccaactcctgcaggatcagcgacatccgactcttcatcgtggatgcccggccagccatggctgccaccagctttatcctcatgactactttcccgaacaaagagctggctgatgagagccagaccctgaaggaagccaacctgctcaatgctgtcatcgtgcagcggttaacataaccgcccagccagctgcctggcctccctcctgtgtttcccatggccagtggccatgccccatggggatcgcccctcctgcccccttgtgcacacccagcagtccagtgcaacgtctcctccatagctctgggttcttagatcttggttggacgtttgttttctccttagttgcatttcctgggtttttgtgatgatcaatggactttaatgaaaaaaaaaataaaaacaaccaaaaaaattgaaggaatatcaccagcatgttgtacggaaactctcccactgaagcaggctttaattgctttaaaattatatttatcttggggcctgtgggaggaaacttccttccatcttctctgcataaaaacttgtggcacacaatgcttattcactagtgtgtcccacccgccagccccacagatgactggaggaaggaggggaaatgtgtagaaagaggcttcgccaccacttgttcccacgagaatatatcacttgcccagataaaactgggcggcagccagagttccctgaagtgggaagtcagagctacatgcacacagtgtcttcagaaggtgaaaataaatatttccctgtgctccttttactcaacccctggggtatctaatcttgccaggtcttggccagttgagattctgttccacctgcctgcctggccctttcctccattaccatccagactgctcgcctcctggggattctcaggggctccattatggcttgatttactccacgtgcagaagtcttgagtggacctaggaggtaggtgggatattttttttcactaggatacagctcatgccaacccatcctaagtgagttcagaatcagggtatcttgccctataagataaacagtcaaaatgccaccgagctgttcactagtgatgtgtggcaaatcaaatcaactgttgaagaaggggtgagttttctgtgctacaagcacctgtcactgttggtacttgcaggaggcttctgctgggtatgttttggaagtgagtgtcactacttggctttgcttagcaggttctgcttcacacttgttctttgacctgctgacttgtgacttgcagaaacataggcagtagtcctagcctggtaaagaccctccaccacccctataagtttgattgctatgcaggtttgggagaggaggcctattgggctcttggatggaaccctttcccgtattaaacaaaccagagacagaatcagtgctgactcaggatctcctggtttggaatcgtaatgtgcctcaatcctctttccaagcaggcctcaccagtctctttctctttcctgcttcacccctgcaatgagccaagaaccaacactacatccacctagaactgcagaagggcttgtggtttcaaccaagacccatcctgagcaagggacttggcttggtgcttttgatcccaaagttcccacaccggcagtggcctgctggggcaatggcatctgtcacggtgttttctccagcaggtggagattatggaacctacatatgggtctggaaaaactgtacactgttgtcaccttgaccattaaaaaccagaatgaggacaa

SEQ ID NO: 427778 - DNA, 1561 bp, Homo sapiens
tagattaggacccgcgggaaggttgtttaccgtaactaggggtaaggaggtacaaagaacaaggaagttaggctttgaaaatagagaacaaagaacaagtaagctgaacaagtaagttcctctttggagaggcaagagggcaaagaagctgaggacccagaagacaggattgtgcctaagaaagtggccttggagcagaggcccaaagaaagcggggagagcgccttgcccatcggtaagggaaaggtgctccaggcacagaagcagctaatgcaacggccctgaggcaaatgcaagataactggcaagttccaggaacagcaaggagggcaaggcgcctggagcagaggaagctagcggatcccttgatgagagggaggaactggcccatctctcatgggtcctgcaggcaggccatgagactgtcttttatgcggggcgagataacgaggcatggacgtgttgtgagcggaggcctagcctgttcaaggtctgaatttttacccctagaatgtaagaagcatgggagcagggactttgttttgctccctgccatatccacagccctagaaaaacgtcgggccattgatagctctcagtaaatgcttgacaagtaagtgaatgaacgaatgcacaattaatgaaatgagggctgcgtcaatgaataactgggaatctgactcctgcagggagccttcagcccacaggtgtatgtaagacccgccccgcctctcatccttcgggctcccacccccgccgttaggctgcggttcgcgccgcggtcgccagagggcgcggagcggcggggcttcccgcacggagggctttgcgtgaggcaccgcgtggggcggggctgcgggcgggctcccagctgctgggccctcatcggctgggcctcgtcgaccggcaagcggaacgcggcagcggggctgggcctgtgcggcggccgccggagcgctttggaaggcgcacggggcgaagatggcggcggagcgacaggaggcgctgagggagttcgtggcggtgacgggcgccgaggaggaccgggcccgcttctttctcgagtcggccggctgggacttgcagatcgcgctagcgagcttttatgaggacggaggggatgaagacattgtgaccatttcgcaggcaacccccagttcagtgtccagaggcacagcccccagtgataatagagtgacatccttcagagacctcattcatgaccaagatgaagatgaggaggaagaggaaggccagaggttttatgctgggggctcagagagaagtggacagcagattgttggccctcccaggaagaaaagtcccaacgagctggtggatgatctctttaaaggtgccaaagagcatggagctgtagctgtggagcgagtgaccaagagcctgtgcacacccagcagtccagtgcaacgtctcctccatagctctgggttcttagatcttggttggacgtttgttttctccttagttgcatttcctgggtttttgtgatgatcaatggactttaatgaaaaaaaaaataaaaacaaccaaaaaaattgaa

SEQ ID NO: 427779 - DNA, 3584 bp, Homo sapiens
tagattaggacccgcgggaaggttgtttaccgtaactaggggtaaggaggtacaaagaacaaggaagttaggctttgaaaatagagaacaaagaacaagtaagctgaacaagtaagttcctctttggagaggcaagagggcaaagaagctgaggacccagaagacaggattgtgcctaagaaagtggccttggagcagaggcccaaagaaagcggggagagcgccttgcccatcggtaagggaaaggtgctccaggcacagaagcagctaatgcaacggccctgaggcaaatgcaagataactggcaagttccaggaacagcaaggagggcaaggcgcctggagcagaggaagctagcggatcccttgatgagagggaggaactggcccatctctcatgggtcctgcaggcaggccatgagactgtcttttatgcggggcgagataacgaggcatggacgtgttgtgagcggaggcctagcctgttcaaggtctgaatttttacccctagaatgtaagaagcatgggagcagggactttgttttgctccctgccatatccacagccctagaaaaacgtcgggccattgatagctctcagtaaatgcttgacaagtaagtgaatgaacgaatgcacaattaatgaaatgagggctgcgtcaatgaataactgggaatctgactcctgcagggagccttcagcccacaggtgtatgtaagacccgccccgcctctcatccttcgggctcccacccccgccgttaggctgcggttcgcgccgcggtcgccagagggcgcggagcggcggggcttcccgcacggagggctttgcgtgaggcaccgcgtggggcggggctgcgggcgggctcccagctgctgggccctcatcggctgggcctcgtcgaccggcaagcggaacgcggcagcggggctgggcctgtgcggcggccgccggagcgctttggaaggcgcacggggcgaagatggcggcggagcgacaggaggcgctgagggagttcgtggcggtgacgggcgccgaggaggaccgggcccgcttctttctcgagtcggccggctgggacttgcagatcgcgctagcgagcttttatgaggacggaggggatgaagacattgtgaccatttcgcaggcaacccccagttcagtgtccagaggcacagcccccagtgataatagagtgacatccttcagagacctcattcatgaccaagatgaagatgaggaggaagaggaaggccagaggttttatgctgggggctcagagagaagtggacagcagattgttggccctcccaggaagaaaagtcccaacgagctggtggatgatctctttaaaggtgccaaagagcatggagctgtagctgtggagcgagtgaccaagagccctggagagaccagtaaaccgagagttcatgtagtattgaaactctggaagagtggattcagcctggataatggagaactcagaagctaccaagacccatccaatgcccagtttctggagtctatccgcagaggggaggtgccagcagagcttcggaggctagctcacggtggacaggtgaacttggatatggaggaccatcgggacgaggactttgtgaagcccaaaggagccttcaaagccttcactggcgagggtcagaaactgggcagcactgccccccaggtgttgagtaccagctctccagcccaacaggcagaaaatgaagccaaagccagctcttccatcttaatcgacgaatcagagcctaccacaaacatccaaattcggcttgcagacggcgggaggctggtgcagaaatttaaccacagccacaggatcagcgacatccgactcttcatcgtggatgcccggccagccatggctgccaccagctttatcctcatgactactttcccgaacaaagagctggctgatgagagccagaccctgaaggaagccaacctgctcaatgctgtcatcgtgcagcggttaacataaccgcccagccagctgcctggcctccctcctgtgtttcccatggccagtggccatgccccatggggatcgcccctcctgcccccttgtgcacacccagcagtccagtgcaacgtctcctccatagctctgggttcttagatcttggttggacgtttgttttctccttagttgcatttcctgggtttttgtgatgatcaatggactttaatgaaaaaaaaaataaaaacaaccaaaaaaattgaaggaatatcaccagcatgttgtacggaaactctcccactgaagcaggctttaattgctttaaaattatatttatcttggggcctgtgggaggaaacttccttccatcttctctgcataaaaacttgtggcacacaatgcttattcactagtgtgtcccacccgccagccccacagatgactggaggaaggaggggaaatgtgtagaaagaggcttcgccaccacttgttcccacgagaatatatcacttgcccagataaaactgggcggcagccagagttccctgaagtgggaagtcagagctacatgcacacagtgtcttcagaaggtgaaaataaatatttccctgtgctccttttactcaacccctggggtatctaatcttgccaggtcttggccagttgagattctgttccacctgcctgcctggccctttcctccattaccatccagactgctcgcctcctggggattctcaggggctccattatggcttgatttactccacgtgcagaagtcttgagtggacctaggaggtaggtgggatattttttttcactaggatacagctcatgccaacccatcctaagtgagttcagaatcagggtatcttgccctataagataaacagtcaaaatgccaccgagctgttcactagtgatgtgtggcaaatcaaatcaactgttgaagaaggggtgagttttctgtgctacaagcacctgtcactgttggtacttgcaggaggcttctgctgggtatgttttggaagtgagtgtcactacttggctttgcttagcaggttctgcttcacacttgttctttgacctgctgacttgtgacttgcagaaacataggcagtagtcctagcctggtaaagaccctccaccacccctataagtttgattgctatgcaggtttgggagaggaggcctattgggctcttggatggaaccctttcccgtattaaacaaaccagagacagaatcagtgctgactcaggatctcctggtttggaatcgtaatgtgcctcaatcctctttccaagcaggcctcaccagtctctttctctttcctgcttcacccctgcaatgagccaagaaccaacactacatccacctagaactgcagaagggcttgtggtttcaaccaagacccatcctgagcaagggacttggcttggtgcttttgatcccaaagttcccacaccggcagtggcctgctggggcaatggcatctgtcacggtgttttctccagcaggtggagattatggaacctacatatgggtctggaaaaactgtacactgttgtcaccttgaccattaaaaaccagaatgaggacaa

SEQ ID NO: 427780 - DNA, 1483 bp, Homo sapiens
tagattaggacccgcgggaaggttgtttaccgtaactaggggtaaggaggtacaaagaacaaggaagttaggctttgaaaatagagaacaaagaacaagtaagctgaacaagtaagttcctctttggagaggcaagagggcaaagaagctgaggacccagaagacaggattgtgcctaagaaagtggccttggagcagaggcccaaagaaagcggggagagcgccttgcccatcggtaagggaaaggtgctccaggcacagaagcagctaatgcaacggccctgaggcaaatgcaagataactggcaagttccaggaacagcaaggagggcaaggcgcctggagcagaggaagctagcggatcccttgatgagagggaggaactggcccatctctcatgggtcctgcaggcaggccatgagactgtcttttatgcggggcgagataacgaggcatggacgtgttgtgagcggaggcctagcctgttcaaggtctgaatttttacccctagaatgtaagaagcatgggagcagggactttgttttgctccctgccatatccacagccctagaaaaacgtcgggccattgatagctctcagtaaatgcttgacaagtaagtgaatgaacgaatgcacaattaatgaaatgagggctgcgtcaatgaataactgggaatctgactcctgcagggagccttcagcccacaggtgtatgtaagacccgccccgcctctcatccttcgggctcccacccccgccgttaggctgcggttcgcgccgcggtcgccagagggcgcggagcggcggggcttcccgcacggagggctttgcgtgaggcaccgcgtggggcggggctgcgggcgggctcccagctgctgggccctcatcggctgggcctcgtcgaccggcaagcggaacgcggcagcggggctgggcctgtgcggcggccgccggagcgctttggaaggcgcacggggcgaagatggcggcggagcgacaggaggcgctgagggagttcgtggcggtgacgggcgccgaggaggaccgggcccgcttctttctcgagtcggccggctgggacttgcagatcgcgctagcgagcttttatgaggacggaggggatgaagacattgtgaccatttcgcagcaggagaatggcgtgaacccggggggcggagcttgcagtgagtcgagattgcgccactgcactccagcctgggcgacagagcaagactctgtctcaaaaaaaaaaaaaaaaaaatggaaggtaggtaaacttttctaatttgggcacaggggggtaaattgggggggatttaaggggacatttttccagggggcctagggctaaaattaggtcatgggggtgtgcttaaatattatattaattactattaaagattaccaggagcaaggacggtaagggtgcaaatttctataaaatttccaaattaaagggtgtttaccagtggtttcaagggggg

SEQ ID NO: 427781 - DNA, 3614 bp, Homo sapiens
  misc_feature (3223)..(3224): n is a, c, g, or t
  misc_feature (3227)..(3227): n is a, c, g, or t
  misc_feature (3229)..(3230): n is a, c, g, or t
  misc_feature (3232)..(3233): n is a, c, g, or t
tagattaggacccgcgggaaggttgtttaccgtaactaggggtaaggaggtacaaagaacaaggaagttaggctttgaaaatagagaacaaagaacaagtaagctgaacaagtaagttcctctttggagaggcaagagggcaaagaagctgaggacccagaagacaggattgtgcctaagaaagtggccttggagcagaggcccaaagaaagcggggagagcgccttgcccatcggtaagggaaaggtgctccaggcacagaagcagctaatgcaacggccctgaggcaaatgcaagataactggcaagttccaggaacagcaaggagggcaaggcgcctggagcagaggaagctagcggatcccttgatgagagggaggaactggcccatctctcatgggtcctgcaggcaggccatgagactgtcttttatgcggggcgagataacgaggcatggacgtgttgtgagcggaggcctagcctgttcaaggtctgaatttttacccctagaatgtaagaagcatgggagcagggactttgttttgctccctgccatatccacagccctagaaaaacgtcgggccattgatagctctcagtaaatgcttgacaagtaagtgaatgaacgaatgcacaattaatgaaatgagggctgcgtcaatgaataactgggaatctgactcctgcagggagccttcagcccacaggtgtatgtaagacccgccccgcctctcatccttcgggctcccacccccgccgttaggctgcggttcgcgccgcggtcgccagagggcgcggagcggcggggcttcccgcacggagggctttgcgtgaggcaccgcgtggggcggggctgcgggcgggctcccagctgctgggccctcatcggctgggcctcgtcgaccggcaagcggaacgcggcagcggggctgggcctgtgcggcggccgccggagcgctttggaaggcgcacggggcgaagatggcggcggagcgacaggaggcgctgagggagttcgtggcggtgacgggcgccgaggaggaccgggcccgcttctttctcgagtcggccggctgggacttgcagatcgcgctagcgagcttttatgaggacggaggggatgaagacattgtgaccatttcgcaggcaacccccagttcagtgtccagaggcacagcccccagtgataatagagtgacatccttcagagacctcattcatgaccaagatgaagatgaggaggaagaggaaggccagaggttttatgctgggggctcagagagaagtggacagcagattgttggccctcccaggaagaaaagtcccaacgagctggtggatgatctctttaaaggtgccaaagagcatggagctgtagctgtggagcgagtgaccaagagccctggagagaccagtaaaccgagaccatttgcaggaggtggctaccgccttggggcagcaccagaggaagagtctgcctatgtggcaggagaaaagaggcagcattccagccaagatgttcatgtagtattgaaactctggaagagtggattcagcctggataatggagaactcagaagctaccaagacccatccaatgcccagtttctggagtctatccgcagaggggaggtgccagcagagcttcggaggctagctcacggtggacaggtgaacttggatatggaggaccatcgggacgaggactttgtgaagcccaaaggagccttcaaagccttcactggcgagggtcagaaactgggcagcactgccccccaggtgttgagtaccagctctccagcccaacaggcagaaaatgaagccaaagccagctcttccatcttaatcgacgaatcagagcctaccacaaacatccaaattcggcttgcagacggcgggaggctggtgcagaaatttaaccacagccacaggatcagcgacatccgactcttcatcgtggatgcccggccagccatggctgccaccagctttatcctcatgactactttcccgaacaaagagctggctgatgagagccagaccctgaaggaagccaacctgctcaatgctgtcatcgtgcagcggttaacataaccgcccagccagctgcctggcctccctcctgtgtttcccatggccagtggccatgccccatggggatcgcccctcctgcccccttgtgcacacccagcagtccagtgcaacgtctcctccatagctctgggttcttagatcttggttggacgtttgttttctccttagttgcatttcctgggtttttgtgatgatcaatggactttaatgaaaaaaaaaataaaaacaaccaaaaaaattgaaggaatatcaccagcatgttgtacggaaactctcccactgaagcaggctttaattgctttaaaattatatttatcttggggcctgtgggaggaaacttccttccatcttctctgcataaaaacttgtggcacacaatgcttattcactagtgtgtcccacccgccagccccacagatgactggaggaaggaggggaaatgtgtagaaagaggcttcgccaccacttgttcccacgagaatatatcacttgcccagataaaactgggcggcagccagagttccctgaagtgggaagtcagagctacatgcacacagtgtcttcagaaggtgaaaataaatatttccctgtgctccttttactcaacccctggggtatctaatcttgccaggtcttggccagttgagattctgttccacctgcctgcctggccctttcctccattaccatccagactgctcgcctcctggggattctcaggggctccattatggcttgatttactccacgtgcagaagtcttgagtggacctaggaggtaggtgggatattttttttcactaggatacagctcatgccaacccatcctaagtgagttcagaatcagggtatcttgccctataagataaacagtcaaaatgccaccgagctgttcactagtgatgtgtggcaaatcaaatcaactgttgaagaaggggtgagttttctgtgctacaagcacctgtcactgttggtacttgcagcagtccagtgcaacgtctcctccatagctctgggttcttagatcttggttggacgtttgttttctccttagttgcatttcctgggtttttgtgatgatcaatggactttaatgaaaaaaaaaataaaaacaaccaaaaaaattgaannaanannannaaaaaaaaaaaaaaaaaaaaaaaaaaaaaaaaaaaaaaaaaaaaaaaaaaaaaaaaaaaaaaaaaaaaaaaaaaaaaaaaaaaaaaaaaaaaaaaaaaccggcaaaatttttgccaaaatttgcaaaagaaaaatttttttaaaaaaaaaaaaaaaaaaaaaaaaaaaaaaaaaaaaaaaaaaaaaaaaacttgggttttaaaacaaaaacccctttaaaggaatttggttcaaaagggatttgggtattaaaaaaaaatttttttttgaaaaaacatagggggaatttttaaaaactttaaaaaaaaatttgtaggggggcttttccatttaaaagaaatgggaaaacccaaggttttaaaaaagaaaagggggccccct

SEQ ID NO: 427782 - DNA, 3484 bp, Homo sapiens
tagattaggacccgcgggaaggttgtttaccgtaactaggggtaaggaggtacaaagaacaaggaagttaggctttgaaaatagagaacaaagaacaagtaagctgaacaagtaagttcctctttggagaggcaagagggcaaagaagctgaggacccagaagacaggattgtgcctaagaaagtggccttggagcagaggcccaaagaaagcggggagagcgccttgcccatcggtaagggaaaggtgctccaggcacagaagcagctaatgcaacggccctgaggcaaatgcaagataactggcaagttccaggaacagcaaggagggcaaggcgcctggagcagaggaagctagcggatcccttgatgagagggaggaactggcccatctctcatgggtcctgcaggcaggccatgagactgtcttttatgcggggcgagataacgaggcatggacgtgttgtgagcggaggcctagcctgttcaaggtctgaatttttacccctagaatgtaagaagcatgggagcagggactttgttttgctccctgccatatccacagccctagaaaaacgtcgggccattgatagctctcagtaaatgcttgacaagtaagtgaatgaacgaatgcacaattaatgaaatgagggctgcgtcaatgaataactgggaatctgactcctgcagggagccttcagcccacaggtgtatgtaagacccgccccgcctctcatccttcgggctcccacccccgccgttaggctgcggttcgcgccgcggtcgccagagggcgcggagcggcggggcttcccgcacggagggctttgcgtgaggcaccgcgtggggcggggctgcgggcgggctcccagctgctgggccctcatcggctgggcctcgtcgaccggcaagcggaacgcggcagcggggctgggcctgtgcggcggccgccggagcgctttggaaggcgcacggggcgaagatggcggcggagcgacaggaggcgctgagggagttcgtggcggtgacgggcgccgaggaggaccgggcccgcttctttctcgagtcggccggctgggacttgcagtgataatagagtgacatccttcagagacctcattcatgaccaagatgaagatgaggaggaagaggaaggccagaggtgccaaagagcatggagctgtagctgtggagcgagtgaccaagagccctggagagaccagtaaaccgagaccatttgcaggaggtggctaccgccttggggcagcaccagaggaagagtctgcctatgtggcaggagaaaagaggcagcattccagccaagatgttcatgtagtattgaaactctggaagagtggattcagcctggataatggagaactcagaagctaccaagacccatccaatgcccagtttctggagtctatccgcagaggggaggtgccagcagagcttcggaggctagctcacggtggacaggtgaacttggatatggaggaccatcgggacgaggactttgtgaagcccaaaggagccttcaaagccttcactggcgagggtcagaaactgggcagcactgccccccaggtgttgagtaccagctctccagcccaacaggcagaaaatgaagccaaagccagctcttccatcttaatcgacgaatcagagcctaccacaaacatccaaattcggcttgcagacggcgggaggctggtgcagaaatttaaccacagccacaggatcagcgacatccgactcttcatcgtggatgcccggccagccatggctgccaccagctttatcctcatgactactttcccgaacaaagagctggctgatgagagccagaccctgaaggaagccaacctgctcaatgctgtcatcgtgcagcggttaacataaccgcccagccagctgcctggcctccctcctgtgtttcccatggccagtggccatgccccatggggatcgcccctcctgcccccttgtgcacacccagcagtccagtgcaacgtctcctccatagctctgggttcttagatcttggttggacgtttgttttctccttagttgcatttcctgggtttttgtgatgatcaatggactttaatgaaaaaaaaaataaaaacaaccaaaaaaattgaaggaatatcaccagcatgttgtacggaaactctcccactgaagcaggctttaattgctttaaaattatatttatcttggggcctgtgggaggaaacttccttccatcttctctgcataaaaacttgtggcacacaatgcttattcactagtgtgtcccacccgccagccccacagatgactggaggaaggaggggaaatgtgtagaaagaggcttcgccaccacttgttcccacgagaatatatcacttgcccagataaaactgggcggcagccagagttccctgaagtgggaagtcagagctacatgcacacagtgtcttcagaaggtgaaaataaatatttccctgtgctccttttactcaacccctggggtatctaatcttgccaggtcttggccagttgagattctgttccacctgcctgcctggccctttcctccattaccatccagactgctcgcctcctggggattctcaggggctccattatggcttgatttactccacgtgcagaagtcttgagtggacctaggaggtaggtgggatattttttttcactaggatacagctcatgccaacccatcctaagtgagttcagaatcagggtatcttgccctataagataaacagtcaaaatgccaccgagctgttcactagtgatgtgtggcaaatcaaatcaactgttgaagaaggggtgagttttctgtgctacaagcacctgtcactgttggtacttgcaggaggcttctgctgggtatgttttggaagtgagtgtcactacttggctttgcttagcaggttctgcttcacacttgttctttgacctgctgacttgtgacttgcagaaacataggcagtagtcctagcctggtaaagaccctccaccacccctataagtttgattgctatgcaggtttgggagaggaggcctattgggctcttggatggaaccctttcccgtattaaacaaaccagagacagaatcagtgctgactcaggatctcctggtttggaatcgtaatgtgcctcaatcctctttccaagcaggcctcaccagtctctttctctttcctgcttcacccctgcaatgagccaagaaccaacactacatccacctagaactgcagaagggcttgtggtttcaaccaagacccatcctgagcaagggacttggcttggtgcttttgatcccaaagttcccacaccggcagtggcctgctggggcaatggcatctgtcacggtgttttctccagcaggtggagattatggaacctacatatgggtctggaaaaactgtacactgttgtcaccttgaccattaaaaaccagaatgaggacaa

SEQ ID NO: 427783 - DNA, 3623 bp, Homo sapiens
tagattaggacccgcgggaaggttgtttaccgtaactaggggtaaggaggtacaaagaacaaggaagttaggctttgaaaatagagaacaaagaacaagtaagctgaacaagtaagttcctctttggagaggcaagagggcaaagaagctgaggacccagaagacaggattgtgcctaagaaagtggccttggagcagaggcccaaagaaagcggggagagcgccttgcccatcggtaagggaaaggtgctccaggcacagaagcagctaatgcaacggccctgaggcaaatgcaagataactggcaagttccaggaacagcaaggagggcaaggcgcctggagcagaggaagctagcggatcccttgatgagagggaggaactggcccatctctcatgggtcctgcaggcaggccatgagactgtcttttatgcggggcgagataacgaggcatggacgtgttgtgagcggaggcctagcctgttcaaggtctgaatttttacccctagaatgtaagaagcatgggagcagggactttgttttgctccctgccatatccacagccctagaaaaacgtcgggccattgatagctctcagtaaatgcttgacaagtaagtgaatgaacgaatgcacaattaatgaaatgagggctgcgtcaatgaataactgggaatctgactcctgcagggagccttcagcccacaggtgtatgtaagacccgccccgcctctcatccttcgggctcccacccccgccgttaggctgcggttcgcgccgcggtcgccagagggcgcggagcggcggggcttcccgcacggagggctttgcgtgaggcaccgcgtggggcggggctgcgggcgggctcccagctgctgggccctcatcggctgggcctcgtcgaccggcaagcggaacgcggcagcggggctgggcctgtgcggcggccgccggagcgctttggaaggcgcacggggcgaagatggcggcggagcgacaggaggcgctgagggagttcgtggcggtgacgggcgccgaggaggaccgggcccgcttctttctcgagtcggccggctgggacttgcagatcgcgctagcgagcttttatgaggacggaggggatgaagacattgtgaccatttcgcaggcaacccccagttcagtgtccagaggcacagcccccagtgataatagagtgacatccttcagagacctcattcatgaccaagatgaagatgaggaggaagaggaaggccagaggttttatgctgggggctcagagagaagtggacagcagattgttggccctcccaggaagaaaagtcccaacgagctggtggatgatctctttaaaggtgccaaagagcatggagctgtagctgtggagcgagtgaccaagagccctggagagaccagtaaaccgagaccatttgcaggaggtggctaccgccttggggcagcaccagaggaagagtctgcctatgtggcaggagaaaagaggcagcattccagccaagatgttcatgtagtattgaaactctggaagagtggattcagcctggataatggagaactcagaagctaccaagacccatccaatgcccagtttctggagtctatccgcagaggggaggtgccagcagagcttcggaggctagctcacggtggacaggtgaacttggatatggaggaccatcgggacgaggactttgtgaagcccaaaggagccttcaaagccttcactggcgagggtcagaaactgggcagcactgccccccaggtgttgagtaccagctctccagcccaacaggcagaaaacatccaaattcggcttgcagacggcgggaggctggtgcagaaatttaaccacagccacaggatcagcgacatccgactcttcatcgtggatgcccggccagccatggctgccaccagctttatcctcatgactactttcccgaacaaagagctggctgatgagagccagaccctgaaggaagccaacctgctcaatgctgtcatcgtgcagcggttaacataaccgcccagccagctgcctggcctccctcctgtgtttcccatggccagtggccatgccccatggggatcgcccctcctgcccccttgtgcacacccagcagtccagtgcaacgtctcctccatagctctgggttcttagatcttggttggacgtttgttttctccttagttgcatttcctgggtttttgtgatgatcaatggactttaatgaaaaaaaaaataaaaacaaccaaaaaaattgaaggaatatcaccagcatgttgtacggaaactctcccactgaagcaggctttaattgctttaaaattatatttatcttggggcctgtgggaggaaacttccttccatcttctctgcataaaaacttgtggcacacaatgcttattcactagtgtgtcccacccgccagccccacagatgactggaggaaggaggggaaatgtgtagaaagaggcttcgccaccacttgttcccacgagaatatatcacttgcccagataaaactgggcggcagccagagttccctgaagtgggaagtcagagctacatgcacacagtgtcttcagaaggtgaaaataaatatttccctgtgctccttttactcaacccctggggtatctaatcttgccaggtcttggccagttgagattctgttccacctgcctgcctggccctttcctccattaccatccagactgctcgcctcctggggattctcaggggctccattatggcttgatttactccacgtgcagaagtcttgagtggacctaggaggtaggtgggatattttttttcactaggatacagctcatgccaacccatcctaagtgagttcagaatcagggtatcttgccctataagataaacagtcaaaatgccaccgagctgttcactagtgatgtgtggcaaatcaaatcaactgttgaagaaggggtgagttttctgtgctacaagcacctgtcactgttggtacttgcaggaggcttctgctgggtatgttttggaagtgagtgtcactacttggctttgcttagcaggttctgcttcacacttgttctttgacctgctgacttgtgacttgcagaaacataggcagtagtcctagcctggtaaagaccctccaccacccctataagtttgattgctatgcaggtttgggagaggaggcctattgggctcttggatggaaccctttcccgtattaaacaaaccagagacagaatcagtgctgactcaggatctcctggtttggaatcgtaatgtgcctcaatcctctttccaagcaggcctcaccagtctctttctctttcctgcttcacccctgcaatgagccaagaaccaacactacatccacctagaactgcagaagggcttgtggtttcaaccaagacccatcctgagcaagggacttggcttggtgcttttgatcccaaagttcccacaccggcagtggcctgctggggcaatggcatctgtcacggtgttttctccagcaggtggagattatggaacctacatatgggtctggaaaaactgtacactgttgtcaccttgaccattaaaaaccagaatgaggacaa

SEQ ID NO: 427784 - DNA, 3996 bp, Homo sapiens
tagattaggacccgcgggaaggttgtttaccgtaactaggggtaaggaggtacaaagaacaaggaagttaggctttgaaaatagagaacaaagaacaagtaagctgaacaagtaagttcctctttggagaggcaagagggcaaagaagctgaggacccagaagacaggattgtgcctaagaaagtggccttggagcagaggcccaaagaaagcggggagagcgccttgcccatcggtaagggaaaggtgctccaggcacagaagcagctaatgcaacggccctgaggcaaatgcaagataactggcaagttccaggaacagcaaggagggcaaggcgcctggagcagaggaagctagcggatcccttgatgagagggaggaactggcccatctctcatgggtcctgcaggcaggccatgagactgtcttttatgcggggcgagataacgaggcatggacgtgttgtgagcggaggcctagcctgttcaaggtctgaatttttacccctagaatgtaagaagcatgggagcagggactttgttttgctccctgccatatccacagccctagaaaaacgtcgggccattgatagctctcagtaaatgcttgacaagtaagtgaatgaacgaatgcacaattaatgaaatgagggctgcgtcaatgaataactgggaatctgactcctgcagggagccttcagcccacaggtgtatgtaagacccgccccgcctctcatccttcgggctcccacccccgccgttaggctgcggttcgcgccgcggtcgccagagggcgcggagcggcggggcttcccgcacggagggctttgcgtgaggcaccgcgtggggcggggctgcgggcgggctcccagctgctgggccctcatcggctgggcctcgtcgaccggcaagcggaacgcggcagcggggctgggcctgtgcggcggccgccggagcgctttggaaggcgcacggggcgaagatggcggcggagcgacaggaggcgctgagggagttcgtggcggtgacgggcgccgaggaggaccgggcccgcttctttctcgagtcggccggctgggacttgcagatcgcgctagcgagcttttatgaggacggaggggatgaagacattgtgaccatttcgcaggcaacccccagttcagtgtccagaggcacagcccccagtgataatagagtgacatccttcagagacctcattcatgaccaagatgaagatgaggaggaagaggaaggccagaggttttatgctgggggctcagagagaagtggacagcagattgttggccctcccaggaagaaaagtcccaacgagctggtggatgatctctttaaaggtgccaaagagcatggagctgtagctgtggagcgagtgaccaagagccctggagagaccagtaaaccgagaccatttgcaggaggtggctaccgccttggggcagcaccagaggaagagtctgcctatgtggcaggagaaaagaggcagcattccagccaagatgttcatgtagtattgaaactctggaagagtggattcagcctggataatggagaactcagaagctaccaagacccatccaatgcccagtttctggagtctatccgcagaggggaggtgccagcagagcttcggaggctagctcacggtggacaggtgaacttggatatggaggaccatcgggacgaggactttgtgaagcccaaaggagccttcaaagccttcactggcgagggtcagaaactgggcaggctgtcctgctttcctcccttcaagcccttgttcagttgaagacaccaaggaggaaaaaggccgagtaacttgcccacattactcaggagcggtggagctagcaataacgtatgaaatatatgactcagggtttgaagtgaattctgctggacctgtaagttccataagggcacgattttccctgtctgggtcaatagatcagcagcaccaaacaatgccaggcgcattgcaaatgctcagtaacagtccaagaagggattcccttcttgctaggggccttgtttctgcttgtgttctgatgccatcctctctcctcagcactgccccccaggtgttgagtaccagctctccagcccaacaggcagaaaatgaagccaaagccagctcttccatcttaatcgacgaatcagagcctaccacaaacatccaaattcggcttgcagacggcgggaggctggtgcagaaatttaaccacagccacaggatcagcgacatccgactcttcatcgtggatgcccggccagccatggctgccaccagctttatcctcatgactactttcccgaacaaagagctggctgatgagagccagaccctgaaggaagccaacctgctcaatgctgtcatcgtgcagcggttaacataaccgcccagccagctgcctggcctccctcctgtgtttcccatggccagtggccatgccccatggggatcgcccctcctgcccccttgtgcacacccagcagtccagtgcaacgtctcctccatagctctgggttcttagatcttggttggacgtttgttttctccttagttgcatttcctgggtttttgtgatgatcaatggactttaatgaaaaaaaaaataaaaacaaccaaaaaaattgaaggaatatcaccagcatgttgtacggaaactctcccactgaagcaggctttaattgctttaaaattatatttatcttggggcctgtgggaggaaacttccttccatcttctctgcataaaaacttgtggcacacaatgcttattcactagtgtgtcccacccgccagccccacagatgactggaggaaggaggggaaatgtgtagaaagaggcttcgccaccacttgttcccacgagaatatatcacttgcccagataaaactgggcggcagccagagttccctgaagtgggaagtcagagctacatgcacacagtgtcttcagaaggtgaaaataaatatttccctgtgctccttttactcaacccctggggtatctaatcttgccaggtcttggccagttgagattctgttccacctgcctgcctggccctttcctccattaccatccagactgctcgcctcctggggattctcaggggctccattatggcttgatttactccacgtgcagaagtcttgagtggacctaggaggtaggtgggatattttttttcactaggatacagctcatgccaacccatcctaagtgagttcagaatcagggtatcttgccctataagataaacagtcaaaatgccaccgagctgttcactagtgatgtgtggcaaatcaaatcaactgttgaagaaggggtgagttttctgtgctacaagcacctgtcactgttggtacttgcaggaggcttctgctgggtatgttttggaagtgagtgtcactacttggctttgcttagcaggttctgcttcacacttgttctttgacctgctgacttgtgacttgcagaaacataggcagtagtcctagcctggtaaagaccctccaccacccctataagtttgattgctatgcaggtttgggagaggaggcctattgggctcttggatggaaccctttcccgtattaaacaaaccagagacagaatcagtgctgactcaggatctcctggtttggaatcgtaatgtgcctcaatcctctttccaagcaggcctcaccagtctctttctctttcctgcttcacccctgcaatgagccaagaaccaacactacatccacctagaactgcagaagggcttgtggtttcaaccaagacccatcctgagcaagggacttggcttggtgcttttgatcccaaagttcccacaccggcagtggcctgctggggcaatggcatctgtcacggtgttttctccagcaggtggagattatggaacctacatatgggtctggaaaaactgtacactgttgtcaccttgaccattaaaaaccagaatgaggacaa

SEQ ID NO: 427785 - DNA, 3650 bp, Homo sapiens
tagattaggacccgcgggaaggttgtttaccgtaactaggggtaaggaggtacaaagaacaaggaagttaggctttgaaaatagagaacaaagaacaagtaagctgaacaagtaagttcctctttggagaggcaagagggcaaagaagctgaggacccagaagacaggattgtgcctaagaaagtggccttggagcagaggcccaaagaaagcggggagagcgccttgcccatcggtaagggaaaggtgctccaggcacagaagcagctaatgcaacggccctgaggcaaatgcaagataactggcaagttccaggaacagcaaggagggcaaggcgcctggagcagaggaagctagcggatcccttgatgagagggaggaactggcccatctctcatgggtcctgcaggcaggccatgagactgtcttttatgcggggcgagataacgaggcatggacgtgttgtgagcggaggcctagcctgttcaaggtctgaatttttacccctagaatgtaagaagcatgggagcagggactttgttttgctccctgccatatccacagccctagaaaaacgtcgggccattgatagctctcagtaaatgcttgacaagtaagtgaatgaacgaatgcacaattaatgaaatgagggctgcgtcaatgaataactgggaatctgactcctgcagggagccttcagcccacaggtgtatgtaagacccgccccgcctctcatccttcgggctcccacccccgccgttaggctgcggttcgcgccgcggtcgccagagggcgcggagcggcggggcttcccgcacggagggctttgcgtgaggcaccgcgtggggcggggctgcgggcgggctcccagctgctgggccctcatcggctgggcctcgtcgaccggcaagcggaacgcggcagcggggctgggcctgtgcggcggccgccggagcgctttggaaggcgcacggggcgaagatggcggcggagcgacaggaggcgctgagggagttcgtggcggtgacgggcgccgaggaggaccgggcccgcttctttctcgagtcggccggctgggacttgcagatcgcgctagcgagcttttatgaggacggaggggatgaagacattgtgaccatttcgcaggcaacccccagttcagtgtccagaggcacagcccccagtgataatagagtgacatccttcagagacctcattcatgaccaagatgaagatgaggaggaagaggaaggccagaggttttatgctgggggctcagagagaagtggacagcagattgttggccctcccaggaagaaaagtcccaacgagctggtggatgatctctttaaaggtgccaaagagcatggagctgtagctgtggagcgagtgaccaagagccctggagagaccagtaaaccgagaccatttgcaggaggtggctaccgccttggggcagcaccagaggaagagtctgcctatgtggcaggagaaaagaggcagcattccagccaagatagtggattcagcctggataatggagaactcagaagctaccaagacccatccaatgcccagtttctggagtctatccgcagaggggaggtgccagcagagcttcggaggctagctcacggtggacaggtgaacttggatatggaggaccatcgggacgaggactttgtgaagcccaaaggagccttcaaagccttcactggcgagggtcagaaactgggcagcactgccccccaggtgttgagtaccagctctccagcccaacaggcagaaaatgaagccaaagccagctcttccatcttaatcgacgaatcagagcctaccacaaacatccaaattcggcttgcagacggcgggaggctggtgcagaaatttaaccacagccacaggatcagcgacatccgactcttcatcgtggatgcccggccagccatggctgccaccagctttatcctcatgactactttcccgaacaaagagctggctgatgagagccagaccctgaaggaagccaacctgctcaatgctgtcatcgtgcagcggttaacataaccgcccagccagctgcctggcctccctcctgtgtttcccatggccagtggccatgccccatggggatcgcccctcctgcccccttgtgcacacccagcagtccagtgcaacgtctcctccatagctctgggttcttagatcttggttggacgtttgttttctccttagttgcatttcctgggtttttgtgatgatcaatggactttaatgaaaaaaaaaataaaaacaaccaaaaaaattgaaggaatatcaccagcatgttgtacggaaactctcccactgaagcaggctttaattgctttaaaattatatttatcttggggcctgtgggaggaaacttccttccatcttctctgcataaaaacttgtggcacacaatgcttattcactagtgtgtcccacccgccagccccacagatgactggaggaaggaggggaaatgtgtagaaagaggcttcgccaccacttgttcccacgagaatatatcacttgcccagataaaactgggcggcagccagagttccctgaagtgggaagtcagagctacatgcacacagtgtcttcagaaggtgaaaataaatatttccctgtgctccttttactcaacccctggggtatctaatcttgccaggtcttggccagttgagattctgttccacctgcctgcctggccctttcctccattaccatccagactgctcgcctcctggggattctcaggggctccattatggcttgatttactccacgtgcagaagtcttgagtggacctaggaggtaggtgggatattttttttcactaggatacagctcatgccaacccatcctaagtgagttcagaatcagggtatcttgccctataagataaacagtcaaaatgccaccgagctgttcactagtgatgtgtggcaaatcaaatcaactgttgaagaaggggtgagttttctgtgctacaagcacctgtcactgttggtacttgcaggaggcttctgctgggtatgttttggaagtgagtgtcactacttggctttgcttagcaggttctgcttcacacttgttctttgacctgctgacttgtgacttgcagaaacataggcagtagtcctagcctggtaaagaccctccaccacccctataagtttgattgctatgcaggtttgggagaggaggcctattgggctcttggatggaaccctttcccgtattaaacaaaccagagacagaatcagtgctgactcaggatctcctggtttggaatcgtaatgtgcctcaatcctctttccaagcaggcctcaccagtctctttctctttcctgcttcacccctgcaatgagccaagaaccaacactacatccacctagaactgcagaagggcttgtggtttcaaccaagacccatcctgagcaagggacttggcttggtgcttttgatcccaaagttcccacaccggcagtggcctgctggggcaatggcatctgtcacggtgttttctccagcaggtggagattatggaacctacatatgggtctggaaaaactgtacactgttgtcaccttgaccattaaaaaccagaatgaggacaa

SEQ ID NO: 427786 - DNA, 2904 bp, Homo sapiens
tagattaggacccgcgggaaggttgtttaccgtaactaggggtaaggaggtacaaagaacaaggaagttaggctttgaaaatagagaacaaagaacaagtaagctgaacaagtaagttcctctttggagaggcaagagggcaaagaagctgaggacccagaagacaggattgtgcctaagaaagtggccttggagcagaggcccaaagaaagcggggagagcgccttgcccatcggtaagggaaaggtgctccaggcacagaagcagctaatgcaacggccctgaggcaaatgcaagataactggcaagttccaggaacagcaaggagggcaaggcgcctggagcagaggaagctagcggatcccttgatgagagggaggaactggcccatctctcatgggtcctgcaggcaggccatgagactgtcttttatgcggggcgagataacgaggcatggacgtgttgtgagcggaggcctagcctgttcaaggtctgaatttttacccctagaatgtaagaagcatgggagcagggactttgttttgctccctgccatatccacagccctagaaaaacgtcgggccattgatagctctcagtaaatgcttgacaagtaagtgaatgaacgaatgcacaattaatgaaatgagggctgcgtcaatgaataactgggaatctgactcctgcagggagccttcagcccacaggtgtatgtaagacccgccccgcctctcatccttcgggctcccacccccgccgttaggctgcggttcgcgccgcggtcgccagagggcgcggagcggcggggcttcccgcacggagggctttgcgtgaggcaccgcgtggggcggggctgcgggcgggctcccagctgctgggccctcatcggctgggcctcgtcgaccggcaagcggaacgcggcagcggggctgggcctgtgcggcggccgccggagcgctttggaaggcgcacggggcgaagatggcggcggagcgacaggaggcgctgagggagttccagctctccagcccaacaggcagaaaatgaagccaaagccagctcttccatcttaatcgacgaatcagagcctaccacaaacatccaaattcggcttgcagacggcgggaggctggtgcagaaatttaaccacagccacaggatcagcgacatccgactcttcatcgtggatgcccggccagccatggctgccaccagctttatcctcatgactactttcccgaacaaagagctggctgatgagagccagaccctgaaggaagccaacctgctcaatgctgtcatcgtgcagcggttaacataaccgcccagccagctgcctggcctccctcctgtgtttcccatggccagtggccatgccccatggggatcgcccctcctgcccccttgtgcacacccagcagtccagtgcaacgtctcctccatagctctgggttcttagatcttggttggacgtttgttttctccttagttgcatttcctgggtttttgtgatgatcaatggactttaatgaaaaaaaaaataaaaacaaccaaaaaaattgaaggaatatcaccagcatgttgtacggaaactctcccactgaagcaggctttaattgctttaaaattatatttatcttggggcctgtgggaggaaacttccttccatcttctctgcataaaaacttgtggcacacaatgcttattcactagtgtgtcccacccgccagccccacagatgactggaggaaggaggggaaatgtgtagaaagaggcttcgccaccacttgttcccacgagaatatatcacttgcccagataaaactgggcggcagccagagttccctgaagtgggaagtcagagctacatgcacacagtgtcttcagaaggtgaaaataaatatttccctgtgctccttttactcaacccctggggtatctaatcttgccaggtcttggccagttgagattctgttccacctgcctgcctggccctttcctccattaccatccagactgctcgcctcctggggattctcaggggctccattatggcttgatttactccacgtgcagaagtcttgagtggacctaggaggtaggtgggatattttttttcactaggatacagctcatgccaacccatcctaagtgagttcagaatcagggtatcttgccctataagataaacagtcaaaatgccaccgagctgttcactagtgatgtgtggcaaatcaaatcaactgttgaagaaggggtgagttttctgtgctacaagcacctgtcactgttggtacttgcaggaggcttctgctgggtatgttttggaagtgagtgtcactacttggctttgcttagcaggttctgcttcacacttgttctttgacctgctgacttgtgacttgcagaaacataggcagtagtcctagcctggtaaagaccctccaccacccctataagtttgattgctatgcaggtttgggagaggaggcctattgggctcttggatggaaccctttcccgtattaaacaaaccagagacagaatcagtgctgactcaggatctcctggtttggaatcgtaatgtgcctcaatcctctttccaagcaggcctcaccagtctctttctctttcctgcttcacccctgcaatgagccaagaaccaacactacatccacctagaactgcagaagggcttgtggtttcaaccaagacccatcctgagcaagggacttggcttggtgcttttgatcccaaagttcccacaccggcagtggcctgctggggcaatggcatctgtcacggtgttttctccagcaggtggagattatggaacctacatatgggtctggaaaaactgtacactgttgtcaccttgaccattaaaaaccagaatgaggacaa

SEQ ID NO: 427787 - DNA, 2538 bp, Homo sapiens
gaacaagaatgaacgccagcctcatttcatgggttttggttctccacaggatctgcctcggtctgtcagacattcctaaggaaaattgtataataactatttcgggaatgcagttatctcatcatggtcagtctttggggaagtgggctgagaaattacatgtgttctattctctattttcattcctattgtgaccttcacaccgactcaaaaccttccttttagatacttctggatataaaaatatatgttaattttggggtttcacactcctgagtgaaaggcagtgtcatcaagtacgtgaatgcccagctcctaaatgtctttctcgttctcctcccacccagtcacgtcctccaggcagtgaccttcctttatttcacattccgcttacttccttgacccctcagcatttcagacctgaaaggacactggtactgttgtccttgtcggggcctgtggctttgcctctcattccctggtgaatgtcaggaaatagagggctgagactaatttttataggttctcaatttttcttgcttggggacaagctgttgacttagctctgaataggagtaataaggaggcagtgggccaggctgcatgacaactggttttcaggcccatataaaaaagtactaactttattatctcaagccatgcctggcctattgcaaagcccagtgtgggtgtcttggggcttgtatttgagattggagcttctctgacctccagtaccctttcctcaggggccacagtgtgtgtcacatgaatggcaaggttttatgctgggggctcagagagaagtggacagcagattgttggccctcccaggaagaaaagtcccaacgagctggtggatgatctctttaaaggtgccaaagagcatggagctgtagctgtggagcgagtgaccaagagccctggagagaccagtaaaccgagaccatttgcaggaggtggctaccgccttggggcagcaccagaggaagagtctgcctatgtggcaggagaaaagaggcagcattccagccaagattgtgcacacccagcagtccagtgcaacgtctcctccatagctctgggttcttagatcttggttggacgtttgttttctccttagttgcatttcctgggtttttgtgatgatcaatggactttaatgaaaaaaaaaataaaaacaaccaaaaaaattgaaggaatatcaccagcatgttgtacggaaactctcccactgaagcaggctttaattgctttaaaattatatttatcttggggcctgtgggaggaaacttccttccatcttctctgcataaaaacttgtggcacacaatgcttattcactagtgtgtcccacccgccagccccacagatgactggaggaaggaggggaaatgtgtagaaagaggcttcgccaccacttgttcccacgagaatatatcacttgcccagataaaactgggcggcagccagagttccctgaagtgggaagtcagagctacatgcacacagtgtcttcagaaggtgaaaataaatatttccctgtgctccttttactcaacccctggggtatctaatcttgccaggtcttggccagttgagattctgttccacctgcctgcctggccctttcctccattaccatccagactgctcgcctcctggggattctcaggggctccattatggcttgatttactccacgtgcagaagtcttgagtggacctaggaggtaggtgggatattttttttcactaggatacagctcatgccaacccatcctaagtgagttcagaatcagggtatcttgccctataagataaacagtcaaaatgccaccgagctgttcactagtgatgtgtggcaaatcaaatcaactgttgaagaaggggtgagttttctgtgctacaagcacctgtcactgttggtacttgcaggaggcttctgctgggtatgttttggaagtgagtgtcactacttggctttgcttagcaggttctgcttcacacttgttctttgacctgctgacttgtgacttgcagaaacataggcagtagtcctagcctggtaaagaccctccaccacccctataagtttgattgctatgcaggtttgggagaggaggcctattgggctcttggatggaaccctttcccgtattaaacaaaccagagacagaatcagtgctgactcaggatctcctggtttggaatcgtaatgtgcctcaatcctctttccaagcaggcctcaccagtctctttctctttcctgcttcacccctgcaatgagccaagaaccaacactacatccacctagaactgcagaagggcttgtggtttcaaccaagacccatcctgagcaagggacttggcttggtgcttttgatcccaaagttcccacaccggcagtggcctgctggggcaatggcatctgtcacggtgttttctccagcaggtggagattatggaacctacatatgggtctggaaaaactgtacactgttgtcaccttgaccattaaaaaccagaatgaggacaa

SEQ ID NO: 427788 - DNA, 2214 bp, Homo sapiens
tagattaggacccgcgggaaggttgtttaccgtaactaggggtaaggaggtacaaagaacaaggaagttaggctttgaaaatagagaacaaagaacaagtaagctgaacaagtaagttcctctttggagaggcaagagggcaaagaagctgaggacccagaagacaggattgtgcctaagaaagtggccttggagcagaggcccaaagaaagcggggagagcgccttgcccatcggtaagggaaaggtgctccaggcacagaagcagctaatgcaacggccctgaggcaaatgcaagataactggcaagttccaggaacagcaaggagggcaaggcgcctggagcagaggaagctagcggatcccttgatgagagggaggaactggcccatctctcatgggtcctgcaggcaggccatgagactgtcttttatgcggggcgagataacgaggcatggacgtgttgtgagcggaggcctagcctgttcaaggtctgaatttttacccctagaatgtaagaagcatgggagcagggactttgttttgctccctgccatatccacagccctagaaaaacgtcgggccattgatagctctcagtaaatgcttgacaagtaagtgaatgaacgaatgcacaattaatgaaatgagggctgcgtcaatgaataactgggaatctgactcctgcagggagccttcagcccacaggtgtatgtaagacccgccccgcctctcatccttcgggctcccacccccgccgttaggctgcggttcgcgccgcggtcgccagagggcgcggagcggcggggcttcccgcacggagggctttgcgtgaggcaccgcgtggggcggggctgcgggcgggctcccagctgctgggccctcatcggctgggcctcgtcgaccggcaagcggaacgcggcagcggggctgggcctgtgcggcggccgccggagcgctttggaaggcgcacggggcgaagatggcggcggagcgacaggaggcgctgagggagttcgtggcggtgacgggcgccgaggaggaccgggcccgcttctttctcgagtcggccggctgggacttgcagatcgcgctagcgagcttttatgaggacggaggggatgaagacattgtgaccatttcgcaccagagttccctgaagtgggaagtcagagctacatgcacacagtgtcttcagaaggtgaaaataaatatttccctgtgctccttttactcaacccctggggtatctaatcttgccaggtcttggccagttgagattctgttccacctgcctgcctggccctttcctccattaccatccagactgctcgcctcctggggattctcaggggctccattatggcttgatttactccacgtgcagaagtcttgagtggacctaggaggtaggtgggatattttttttcactaggatacagctcatgccaacccatcctaagtgagttcagaatcagggtatcttgccctataagataaacagtcaaaatgccaccgagctgttcactagtgatgtgtggcaaatcaaatcaactgttgaagaaggggtgagttttctgtgctacaagcacctgtcactgttggtacttgcaggaggcttctgctgggtatgttttggaagtgagtgtcactacttggctttgcttagcaggttctgcttcacacttgttctttgacctgctgacttgtgacttgcagaaacataggcagtagtcctagcctggtaaagaccctccaccacccctataagtttgattgctatgcaggtttgggagaggaggcctattgggctcttggatggaaccctttcccgtattaaacaaaccagagacagaatcagtgctgactcaggatctcctggtttggaatcgtaatgtgcctcaatcctctttccaagcaggcctcaccagtctctttctctttcctgcttcacccctgcaatgagccaagaaccaacactacatccacctagaactgcagaagggcttgtggtttcaaccaagacccatcctgagcaagggacttggcttggtgcttttgatcccaaagttcccacaccggcagtggcctgctggggcaatggcatctgtcacggtgttttctccagcaggtggagattatggaacctacatatgggtctggaaaaactgtacactgttgtcaccttgaccattaaaaaccagaatgaggacaa

SEQ ID NO: 427789 - DNA, 2043 bp, Homo sapiens
tgcactgtctggtcaagagcagtgtccatgtgcgtttctgtggcagcagtgcacgtggggtgggtggggggtgcgtacggtggggcttgtaggttaagatgtctctgcggtggtgttgtggggctggaggccgagccaggcacggcagctggccctctccaggcgcatggaggaattctccctttgccgttccaaggatgccgccgcctcctaccggggctcccgggggggtcagccaacactacaaagggcagcgagtcctcagggcgcccgggagccaccagtctgctctcgggctctactcagactagcgccaacagtctccgcggacagactcgcatcagccgccctggggctcggcctcctcccataggctcctcttcctctctttcattcaagtcttcaaactttgaaaaaaatatgagcttttgccaaataagacgggatagtttatggagttttctgaggcgcattgaactctggtcagcccctcgagcgtgggctcggccatcagcaggcccggtgggttggccgggctggccctcccaggctgcctttctctctggtcgcggcctggcccgccccggcctccaccgccgcaattcatgctggtgccgcgcccgcagccccactcctggtatgcctgagattctccaggggccaagccggtcctccttcccggcccactcttccagggccaggacgctcccgcggagccagcccatcgtggctgggggtcccaggggctggaggcctgcctggttagcctctgtttcccagacattgactcgaggcgcctccagtcctctcaaccccctgactttcaagtcctttcaagtccttgtgccctgaccaagttatgaggaaaagagggctgagggcctggaggtgggctcgcaccccctcgaacccacctagatgtctcctcctccccagcctatgagttcagacttggggggctccatctgtccctccctgaggtccctcatcttgtccctgctctgattctgtcagcagatcctgaacactccttggtggggacccatgcctccaaggctgcccccaatgccagctgtcctggggaaactccccagaactctcggggaaaggcccgagaaccttcggaggaagcctccgggactcctcgccacctgctctgtttctctcccggccccactgccttcaggtatcaggaagagggcaggcccctgtgccccctctccccttcccagggcggccaacaatactccaccatggggcgcttcctttcttctctggaaactaagacattggactgaaggaactggcctgaggggggctgaccgggggcccgtgctgctgggagctctacgcacaagaggccgccggggtcacggacaggaacctcagcccagggtgctggcctttctccttcgcaggagtcccccaaaatccacacagcgactcgagcagcccttcctgccgtttccaaggcctccggaagcaccaacccagttctcagttacctcctctggccggaaggcctcacgttgtcctccagagctgctctgggcccagggctggctccgtgaccacctgatggacgtgctgggcagcatgggctcccaaggcagcatccccagctgctctcccaccccaccccagctgcccggcggctgggcccacgagggctctggggacacttccataggaaaggggcctggcactttgtgattgccacgtgtttcctgttaagccgcctgcccccagtgcaaatctctgtgttttgctctctcctgaacaaaaatgtaaaccgacgccggaaagcaaatggtatcgaatacctttcttgcccataagggtttttacaaagaacgtgtctcactaggaactaggacactcatcggcccgagaccaactcctggataaaaggaataaggagaatcgtgtttgtaacgagttacaggattgtttctttcctggattttaaacttttgttaaattgtgaaattatggaggagttttatagaaaaaaaaagtgaaataaagtcagatgggaaagca

SEQ ID NO: 427790 - DNA, 2103 bp, Homo sapiens
tgcactgtctggtcaagagcagtgtccatgtgcgtttctgtggcagcagtgcacgtggggtgggtggggggtgcgtacggtggggcttgtaggttaagatgtctctgcggtggtgttgtggggctggaggccgagccaggcacggcagctggccctctccaggcgcatggaggaattctccctttgccgttccaaggatgccgccgcctcctaccggggctcccgggggggtcagccaacactacaaagggcagcgagtcctcagggcgcccgggagccaccagtctgctctcgggctctactcagactagcgccaacagtctccgcggacagactcgcatcagccgccctggggctcggcctcctcccataggctcctcttcctctctttcattcaagtcttcaaactttgaaaaaaatatgagcttttgccaaataagacgggatagtttatggagttttctgaggcgcattgaactctggtcagcccctcgagcgtgggctcggccatcagcaggcccggtgggttggccgggctggccctcccaggctgcctttctctctggtcgcggcctggcccgccccggcctccaccgccgcaattcatgctggtgccgcgcccgcagccccactcctggtatgcctgagattctccaggggccaagccggtcctccttcccggcccactcttccagggccaggacgctcccgcggagccagcccatcgtggctgggggtcccaggggctggaggcctgcctggttagcctctgtttcccagacattgactcgaggcgcctccagtcctctcaaccccctgactttcaagtcctttcaagtccttgtgccctgaccaagttatgaggaaaagagggctgagggcctggaggtgggctcgcaccccctcgaacccacctagatgtctcctcctccccagcctatgagttcagacttggggggctccatctgtccctccctgaggtccctcatcttgtccctgctctgattctgtcagcagatcctgaacactccttggtggggacccatgcctccaaggctgcccccaatgccagctgtcctggggaaactccccagaactctcggggaaaggcccgagaaccttcggaggaagcctccgggactcctcgccacctgctctgtttctctcccggccccactgccttcaggtatcaggaagagggcaggcccctgtgccccctctccccttcccagggcggccaacaatactccaccatggggcgcttcctttcttctctggaaactaagacattggactgaaggaactggcctgaggggggctgaccgggggcccgtgctgctgggagctctacgcacaagaggccgccggggtcacggacaggaacctcagcccagggtgctggcctttctccttcgcaggagtcccccaaaatccacacagcgactcgagcagccttccactcagccagaggagggtcgggctcccccgcctgctctcggtggtggcgtctggcccttcctgccgtttccaaggcctccggaagcaccaacccagttctcagttacctcctctggccggaaggcctcacgttgtcctccagagctgctctgggcccagggctggctccgtgaccacctgatggacgtgctgggcagcatgggctcccaaggcagcatccccagctgctctcccaccccaccccagctgcccggcggctgggcccacgagggctctggggacacttccataggaaaggggcctggcactttgtgattgccacgtgtttcctgttaagccgcctgcccccagtgcaaatctctgtgttttgctctctcctgaacaaaaatgtaaaccgacgccggaaagcaaatggtatcgaatacctttcttgcccataagggtttttacaaagaacgtgtctcactaggaactaggacactcatcggcccgagaccaactcctggataaaaggaataaggagaatcgtgtttgtaacgagttacaggattgtttctttcctggattttaaacttttgttaaattgtgaaattatggaggagttttatagaaaaaaaaagtgaaataaagtcagatgggaaagca

SEQ ID NO: 427791 - DNA, 2604 bp, Homo sapiens
  misc_feature (2430)..(2430): n is a, c, g, or t
tgcactgtctggtcaagagcagtgtccatgtgcgtttctgtggcagcagtgcacgtggggtgggtggggggtgcgtacggtggggcttgtaggttaagatgtctctgcggtggtgttgtggggctggaggccgagccaggcacggcagctggccctctccaggcgcatggaggaattctccctttgccgttccaaggatgccgccgcctcctaccggggctcccgggggggtcagccaacactacaaagggcagcgagtcctcagggcgcccgggagccaccagtctgctctcgggctctactcagactagcgccaacagtctccgcggacagactcgcatcagccgccctggggctcggcctcctcccataggctcctcttcctctctttcattcaagtcttcaaactttgaaaaaaatatgagcttttgccaaataagacgggatagtttatggagttttctgaggcgcattgaactctggtcagcccctcgagcgtgggctcggccatcagcaggcccggtgggttggccgggctggccctcccaggctgcctttctctctggtcgcggcctggcccgccccggcctccaccgccgcaattcatgctggtgccgcgcccgcagccccactcctggtatgcctgagattctccaggggccaagccggtcctccttcccggcccactcttccagggccaggacgctcccgcggagccagcccatcgtggctgggggtcccaggggctggaggcctgcctggttagcctctgtttcccagacattgactcgaggcgcctccagtcctctcaaccccctgactttcaagtcctttcaagtccttgtgccctgaccaagttatgaggaaaagagggctgagggcctggaggtgggctcgcaccccctcgaacccacctagatgtctcctcctccccagcctatgagttcagacttggggggctccatctgtccctccctgaggtccctcatcttgtccctgctctgattctgtcagcagatcctgaacactccttggtggggacccatgcctccaaggctgcccccaatgccagctgtcctggggaaactccccagaactctcggggaaaggcccgagaaccttcggaggaagcctccgggactcctcgccacctgctctgtttctctcccggccccactgccttcaggtatcaggaagagggcaggcccctgtgccccctctccccttcccagggcggccaacaatactccaccatggggcgcttcctttcttctctggaaactaagacattggactgaaggaactggcctgaggggggctgaccgggggcccgtgctgctgggagctctacgcacaagaggccgccggggtcacggacaggaacctcagcccagggtgctggcctttctccttcgcaggagtcccccaaaatccacacagcgactcgagcagccttccactcagccagaggagggtcgggctcccccgcctgctctcggtggtggcgtctggcccttcctgccgtttccaaggcctccggaagcaccaacccagttctcagttacctcctctggccggaaggcctcacgttgtcctccagagctgctctgggcccagggctggctccgtgaccacctgatggacgtgctgggcagcatgggctcccaaggcagcatccccagctgctctcccaccccaccccagctgcccggcggctgggcccacgagggctctggggacacttccataggaaaggggcctggcactttgtgattgccacgtgtttcctgttaagccgcctgcccccagtgcaaatctctgtgttttgctctctcctgaacaaaaatgtaaaccgacgccggaaagcaaatggtatcgaatacctttcttgcccataagggtttttacaaagaacgtgtctcactaggaactaggacactcatcggcccgagaccaactcctggataaaaggaataaggagaatcgtgtttgtaacgagttacaggattgtttctttcctggattttaaacttttgttaaattgtgaaattatggaggagttttatagaaaaaaaaagtgaaataaagtcagatgggaaagcaaaaaaaaaaaaaaaaaaaaaaaaaaaaaaaaaaaaaaaaaaaaaaaaaaaaaaaaaagcgggcggggcacgacaataaaaaatccccgcgggggcgccgccgaaatcaaccgacacgacgcctattgtgaacaacgagcaggggccccaacaagggggagcagctaaataaaaagcacagaacgagcacgaccccccccatcattatacacacaacgctagatagagatgggaaacaaaccgccgtcaagccagtgcaacatctttgggaggaagagcgaacaccccacacactggtgcgggtgggtgagcacccaattgaaggggngcaacacaccatccccacagaagagagagttaatcgacccccccggaagggagaagacacaacaacacacaccgcgtggtagataaagggtggatacacacacacagcagccaaaatgatccgagcatgaagaagaattgatgcgactaccactagcattatattgaacgacaa

SEQ ID NO: 427792 - DNA, 2297 bp, Homo sapiens
cgcgggatctcgagctgggatcgccctcctgggcttcggtgcgatcggcggcgggaggttccctgggaaccaggtggtcgaagggctgagctgtgtggccagacaagaggtccctgccctcccccagtgagccctgctgttcccgtgggagccatgaagctgaacgagaggagtgtagcccactatgcactcagcgactccccagcggaccacatgggcttcctgcgcacctgggggggcccagggaccccaccgacccccagtggcactggccgaagatgctggtttgtcctcaagggcaacctgctattctcctttgagagtcgcgagggccgggccccactgagcctggtggtgctggaaggctgcacagtggaactggccgaggctcccgtgcccgaggagtttgcctttgccatctgctttgatgcccctggagtgcgcccacacctgctggccgcagaagggccggcggcccaggaggcctgggtgaaggtgctgtcccgggcaagctttggctacatgcgcctggtggtacgcgagttggagagccagttgcaggacgcacgccagagcctggctttgcaacgccgctcatcctggaagtctgttgccagccgctgtaagccccaggctcctaaccaccgagctgcgggcctggagaatggccactgcctctccaaggacagcagccctgtgggcttggttgaagaagcgggcagcaggtctgcagggtgggggttggctgagtgggagctgcagggccctgccagcctcctcctaggcaaggggcagagccctgtgtcccctgagacctcctgcttctctaccctgcatgactggtatggccaggagatcgtggagctgcggcagtgttggcagaagagggcccaggggagccactcaaaatgtgaggaacaggataggccctaagtctgggccctttgagtcaggaaaccagggccagttctttttcaggagttaaatgtttacccatttccaaggttgcgttttgggaggggacatgggttctctccttcctgctatttaggcattctccaggttcgagatccacccgtgtgtctggaagggactgcgggaccattccttccatcctctttatttcctgaggtccagagaaggaaggagacttagcagccacagagcaagaccccaatctcctgactgcactggcctgactgccccctcccaggggatgttaatgaaatgaaggaagtggggaatgtcacccgagactgtcacaggcttgccatacctttggcctacacaccgggctctagagccataatttccaacctggggagtctcctgtgcacttaaatccgaggtaggctgcagtatcggcttgaagctctgacactgtcagagaaagtggatttattgtgtcataggagtttctgggacccagctcttcctgagaggggtgggaagattggggatgggatcctcactcagcagtctgggtagggccctttgaggcagagggtcttcggccagtgaagagagatttattctgctcagagtgctggggtcccatcctttctccctggctgccctgttaacagatggtgctggaccttgccccggaaggtcttgtagcttttttacgtcaacgaaatgccctcctgtactctgtcttcagcagccaactcctggagctgccaagtgaggggttaaagaagaggtggggaggcagtgtggctccctgggaaaagtctgttgctttggttctcagtcctgggtattctaggagcttggacacgggattgcgtttcctgtgctaaaattctctctcctggctgggctccggtaaactgaagctgctcgagaaatcacctgggaactctcatagccgtttgtcacccagggtgtacttgccaggacctctccttgctactcttcccaaagtcgggaggcaaagcggctgggtcaccagagcctgaccatactgacgctccagggggaagacgcagaggccgggaagagacaccccctcccaaacacataaaacttgccccttcctagcctcggctcccctcactggggccttgggcaggaccgacccgcatccaactaggcctaaggggtaggctctgagcctcttacccctaagaggcggagatgcgcccaaggcgggcgcccggcctgttccccagccctgcctggaagccccgcagccactgcattttgtttaaacacagatagcacgggcctttctcttattgctacagtgttttgtacacggttaaaacactagtaaagctttttcgttatta

SEQ ID NO: 427793 - DNA, 1219 bp, Homo sapiens
ttggattggattggattggattggattggattggtggattggattggattggattggattggattggattggtggattggattggattggattggattggattggattggtggattggattggattggattggattggattggattggtggattggattggattggattggattggattggattggtggattggattggattggattggattggattggattggtggattggattggattggattggattggattggattggtggattggattggattggattggattggattggattggtggattggattggattggattggattggattggattggtggattggattggattggattggattggattggattggtggattggattggattggattggattggattggattggtggattggattggattggattggattggattggattggtggattggattggattggattggattggattggattggtggattggattggattggattggattggattggattggtggattggattggattggattggattggattggattggtggattggattggattggattggattggattggattggtggattggattggattggattggattggattggattggtggattggattggattggattggattggattggattggtggattggattggattggattggatgggattgcgtttcctgtgctaaaattctctctcctggctgggctccggtaaactgaagctgctcgagaaatcacctgggaactctcatagccgtttgtcacccagggtgtacttgccaggacctctccttgctactcttcccaaagtcgggaggcaaagcggctgggtcaccagagcctgaccatactgacgctccagggggaagacgcagaggccgggaagagacaccccctcccaaacacataaaacttgccccttcctagcctcggctcccctcactggggccttgggcaggaccgacccgcatccaactaggcctaaggggtaggctctgagcctcttacccctaagaggcggagatgcgcccaaggcgggcgcccggcctgttccccagccctgcctggaagccccgcagccactgcattttgtttaaacacagatagcacgggcctttctcttattgctacagtgttttgtacacggttaaaacactagtaaagctttttcgttatta

SEQ ID NO: 427794 - DNA, 3909 bp, Homo sapiens
caggcatcggtgtcgcctcgcagggaacagttgggtggcttccagcttatgccaggagtctcctcctcacccgcacatcgcggggctaggatgggatgtcgtggctgccaaatcctccgaggcaactcctgcctgggacggcctaccacaggatgggcctgagaatccggagcgcaggctcgggccgctaggacaccttcccccgcccgcggacccagccttccagcatcaccggggttcgcggaggagaaagaggaaaggcgtttggcctgccaaggccgccgtagcgagggggcggggcccggaagagcaggatggcggcgcgggacagtgacagcgaagaagatctggtcagctatgggaccgggctggagcctctggaagaaggtgaaagaccaaagaaaccaatccctcttcaggatcagactgtcagagatgaaaaaggaaggtataaacgattccacggggcctttagtggaggtttctctgctggatacttcaatactgttggctcaaaagaaggatggacaccctctacctttgtgtcttcacgacagaacagagcagacaaatctgttcttggtcctgaagattttatggatgaagaggatcttagtgaatttgggatagcacctaaagcgattgtcaccacagacgattttgcctccaaaaccaaagacagaatacgagaaaaggctaggcagttggccgctgctactgcccctattcctggagccaccctccttgatgacctcataacgccagcaaaattatctgttggtttcgaattgctaagaaaaatgggttggaaagaaggacaaggagttggtcctcgagtaaagagacggccacgccgacagaaacctgatcctggagtcaaaatctatggctgtgcattaccccctggaagctcggaaggatctgagggtgaagatgatgactacttgcctgataatgtgacctttgcacccaaagatgtcacacctgtggatttcacacctaaagataatgtgcatggtctagcttacaagggcctggatccccaccaggcactgtttggaacttcgggagaacattttaatcttttcagtggtggttctgagagagctggcgatcttggagaaattggactgaataaaggaagaaaattgggaatttcaggccaggcttttggtgtaggtgccctggaagaggaagatgatgatatctatgccacagaaactctatccaagtatgacactgttctgaaggacgaggagcctggagacggactctatggctggacagcacccaggcagtataaaaaccagaaagaatcagagaaagaccttcggtacgttggcaaaattttggatggattttccttggcttctaaacctttatcttctaagaaaatctatccacctccagagctgccaagagactatcgaccagtgcattatttcagacccatggtggccgccacctccgagaactcacacttactgcaggtattatcagagtcagctggaaaggcaacgcctgacccagggacacacagtaagcaccaactgaatgcctccaaacgggctgagttgcttggagagacgcctattcaaggttcagctacttcagtgttagaatttctgtcccaaaaagacaaagagagaatcaaagaaatgaagcaggcaactgacctgaaagcagctcagctcaaggccaggagtctggcccagaacgctcagagcagcagagcccagctctcccctgcagcggctgctgggcactgctcttggaacatggcattaggtggtgggacggccaccttaaaagccagcaacttcaagcctttcgccaaagatccggaaaagcaaaagcgatacgacgagttcttagtacacatgaaacagggtcagaaagatgctctggaacgctgtctggaccccagcatgacagagtgggagcgaggccgtgagcgggatgagtttgcccgggcggccctgctgtacgcatcttcccattcgaccttgtcctccaggttcactcacgccaaggaggaggatgactcagatcaggttgaagtccctcgagaccaagagaatgatgtcggggataagcagtcggctgtgaagatgaagatgtttgggaagctcacccgagacacgtttgagtggcaccctgacaagcttctatgtaagagatttaatgtccctgacccttatccagattcaactttagttggcttaccaagagtgaagcgtgacaagtactcagtcttcaactttctgacgctcccagagacagcttccttgcccaccactcaagcatcaagtgaaaaagtatcacagcaccgaggtcccgacaaatcaagaaaaccatccagatgggatacctctaaacacgaaaagaaagaagattccattagtgaatttttaagtttggctagatcaaaagccgagccacctaaacaacagtccagccccttagtaaacaaagaggaagagcatgcaccagaattatccgcaaatcagaccgtcaacaaagatgtggacgcacaggctgaaggagaagggagccgcccatccatggacttattcagggccatctttgccagttcctcagatgaaaagtcctcatcctccgaggatgagcaaggtgacagtgaagatgatcaggcaggctctggggaggccaacttccaaagctcccaagacactgacttgggggaaacatcatctgtggctcacgctcttgtgccagcaccccaggagccgccaccttccttcccgatacaaaagatgcagatagatgaaagagaagagttcggcccgcggctgcctcccgtcttctgccccaatgctcgtcagacacttgaggttcctcaaaaagagaaacataaaaagaacaaagacaagcacaaggccaagaaagagcacaggcggaagaaagagaagaaaaagaaacacaggaagcacaaacacaaaggcaagcaaaagaataaaaaaccagagaaaagtagtagctccgagagttccgacagcagcgacagccagagtgacgaggaaaccgcagacgtgtcgccccaggagctgctgagacggctgaaaagtcttccactaagaaggcagtaattgaatgctgccctggctcgtcctagaatcatttctcctccatgatggaagcccagtgattgttcagttaacgcattgtacagagtgtatttatatgtaaattcctgctgtaaaataatttttaaaaccttgacatttcaaagactgccttgaaaggtcgcagaaattgatttctatttttaatttcagttagtatcgggggaaaaaaatccagactgaacagtttaattaaagtggaatttttctattttcttcttgatttttaaaaaaatttcctgggacgttaaaaaagaagttaaaagtgaaggcttctctctggttttgtgatgaagacagcctggactcactgaaggacaagcgtgtgagaaggggcggttgcggcccctcctgccgttttttgggagtgaagctcttccctctctgggtggctgggttactgttggtgcccaggaagccccatgggagggcagagccagggcctggcagggggcctcagcctctcagggtagatgtcactaaagtgtctgagacaggcagggaaaccaggcaggagaatgtgcacccacagcctgggttacacggctgcagctccctgctctgaggccacctcatgtgtaccaaggagacctttttgaaaaataaagtgcagaccaggtgtgatggctaatgcctgtaatcccagagctttgggaggccgaggcgggaggattgcttgagcccaggaattccagaccagcctgggccacatagagacccctgtctccacaaaaaataaagtattgagcatttgtattttaca

SEQ ID NO: 427795 - DNA, 3650 bp, Homo sapiens
caggcatcggtgtcgcctcgcagggaacagttgggtggcttccagcttatgccaggagtctcctcctcacccgcacatcgcggggctaggatgggatgtcgtggctgccaaatcctccgaggcaactcctgcctgggacggcctaccacaggatgggcctgagaatccggagcgcaggctcgggccgctaggacaccttcccccgcccgcggacccagccttccagcatcaccggggttcgcggaggagaaagaggaaaggcgtttggcctgccaaggccgccgtagcgagggggcggggcccggaagagcaggatggcggcgcgggacagtgacagcgaagaagatctggtcagctatgggaccgggctggagcctctggaagaaggtgaaagaccaaagaaaccaatccctcttcaggatcagactgtcagagatgaaaaaggaaggtataaacgattccacggggcctttagtggaggtttctctgctggatacttcaatactgttggctcaaaagaaggatggacaccctctacctttgtgtcttcacgacagaacagagcagacaaatctgttcttggtcctgaagattttatggatgaagagatcctggagtcaaaatctatggctgtgcattaccccctggaagctcggaaggatctgagggtgaagatgatgactacttgcctgataatgtgacctttgcacccaaagatgtcacacctgtggatttcacacctaaagataatgtgcatggtctagcttacaagggcctggatccccaccaggcactgtttggaacttcgggagaacattttaatcttttcagtggtggttctgagagagctggcgatcttggagaaattggactgaataaaggaagaaaattgggaatttcaggccaggcttttggtgtaggtgccctggaagaggaagatgatgatatctatgccacagaaactctatccaagtatgacactgttctgaaggacgaggagcctggagacggactctatggctggacagcacccaggcagtataaaaaccagaaagaatcagagaaagaccttcggtacgttggcaaaattttggatggattttccttggcttctaaacctttatcttctaagaaaatctatccacctccagagctgccaagagactatcgaccagtgcattatttcagacccatggtggccgccacctccgagaactcacacttactgcaggtattatcagagtcagctggaaaggcaacgcctgacccagggacacacagtaagcaccaactgaatgcctccaaacgggctgagttgcttggagagacgcctattcaaggttcagctacttcagtgttagaatttctgtcccaaaaagacaaagagagaatcaaagaaatgaagcaggcaactgacctgaaagcagctcagctcaaggccaggagtctggcccagaacgctcagagcagcagagcccagctctcccctgcagcggctgctgggcactgctcttggaacatggcattaggtggtgggacggccaccttaaaagccagcaacttcaagcctttcgccaaagatccggaaaagcaaaagcgatacgacgagttcttagtacacatgaaacagggtcagaaagatgctctggaacgctgtctggaccccagcatgacagagtgggagcgaggccgtgagcgggatgagtttgcccgggcggccctgctgtacgcatcttcccattcgaccttgtcctccaggttcactcacgccaaggaggaggatgactcagatcaggttgaagtccctcgagaccaagagaatgatgtcggggataagcagtcggctgtgaagatgaagatgtttgggaagctcacccgagacacgtttgagtggcaccctgacaagcttctatgtaagagatttaatgtccctgacccttatccagattcaactttagttggcttaccaagagtgaagcgtgacaagtactcagtcttcaactttctgacgctcccagagacagcttccttgcccaccactcaagcatcaagtgaaaaagtatcacagcaccgaggtcccgacaaatcaagaaaaccatccagatgggatacctctaaacacgaaaagaaagaagattccattagtgaatttttaagtttggctagatcaaaagccgagccacctaaacaacagtccagccccttagtaaacaaagaggaagagcatgcaccagaattatccgcaaatcagaccgtcaacaaagatgtggacgcacaggctgaaggagaagggagccgcccatccatggacttattcagggccatctttgccagttcctcagatgaaaagtcctcatcctccgaggatgagcaaggtgacagtgaagatgatcaggcaggctctggggaggccaacttccaaagctcccaagacactgacttgggggaaacatcatctgtggctcacgctcttgtgccagcaccccaggagccgccaccttccttcccgatacaaaagatgcagatagatgaaagagaagagttcggcccgcggctgcctcccgtcttctgccccaatgctcgtcagacacttgaggttcctcaaaaagagaaacataaaaagaacaaagacaagcacaaggccaagaaagagcacaggcggaagaaagagaagaaaaagaaacacaggaagcacaaacacaaaggcaagcaaaagaataaaaaaccagagaaaagtagtagctccgagagttccgacagcagcgacagccagagtgacgaggaaaccgcagacgtgtcgccccaggagctgctgagacggctgaaaagtcttccactaagaaggcagtaattgaatgctgccctggctcgtcctagaatcatttctcctccatgatggaagcccagtgattgttcagttaacgcattgtacagagtgtatttatatgtaaattcctgctgtaaaataatttttaaaaccttgacatttcaaagactgccttgaaaggtcgcagaaattgatttctatttttaatttcagttagtatcgggggaaaaaaatccagactgaacagtttaattaaagtggaatttttctattttcttcttgatttttaaaaaaatttcctgggacgttaaaaaagaagttaaaagtgaaggcttctctctggttttgtgatgaagacagcctggactcactgaaggacaagcgtgtgagaaggggcggttgcggcccctcctgccgttttttgggagtgaagctcttccctctctgggtggctgggttactgttggtgcccaggaagccccatgggagggcagagccagggcctggcagggggcctcagcctctcagggtagatgtcactaaagtgtctgagacaggcagggaaaccaggcaggagaatgtgcacccacagcctgggttacacggctgcagctccctgctctgaggccacctcatgtgtaccaaggagacctttttgaaaaataaagtgcagaccaggtgtgatggctaatgcctgtaatcccagagctttgggaggccgaggcgggaggattgcttgagcccaggaattccagaccagcctgggccacatagagacccctgtctccacaaaaaataaagtattgagcatttgtattttaca

SEQ ID NO: 427796 - DNA, 2272 bp, Homo sapiens
caggcatcggtgtcgcctcgcagggaacagttgggtggcttccagcttatgccaggagtctcctcctcacccgcacatcgcggggctaggatgggatgtcgtggctgccaaatcctccgaggcaactcctgcctgggacggcctaccacaggatgggcctgagaatccggagcgcaggctcgggccgctaggacaccttcccccgcccgcggacccagccttccagcatcaccggggttcgcggaggagaaagaggaaaggcgtttggcctgccaaggccgccgtagcgagggggcggggcccggaagagcaggatggcggcgcgggacagtgacagcgaagaagatctggtcagctatgggaccgggctggagcctctggaagaaggtgaaagaccaaagaaaccaatccctcttcaggatcagactgtcagagatgaaaaaggaaggtataaacgattccacggggcctttagtggaggtttctctgctggatacttcaatactgttggctcaaaagaaggatggacaccctctacctttgtgtcttcacgacagaacagagcagacaaatctgttcttggtcctgaagattttatggatgaagaggatcttagtgaatttgggatagcacctaaagcgattgtcaccacagacgattttgcctccaaaaccaaagacagaatacgagaaaaggctaggcagttggccgctgctactgcccctattcctggagccaccctccttgatgacctcataacgccagcaaaattatctgttggtttcgaattgctaagaaaaatgggttggaaagaaggacaaggagttggtcctcgagtaaagagacggccacgccgacagaaacctgatcctggagtcaaaatctatggctgtgcattaccccctggaagctcggaaggatctgagggtgaagatgatgactacttgcctgataatgtgacctttgcacccaaagatgtcacacctgtggatttcacacctaaagataatgtgcatggtctagcttacaagggcctggatccccaccaggcactgtttggaacttcgggagaacattttaatcttttcagtggtggttctgagagagctggcgatcttggagaaattggactgaataaaggaagaaaattgggaatttcaggccaggcttttggtgtaggtgccctggaagaggaagatgatgatatctatgccacagaaactctatccaagtatgacactgttctgaaggacgaggagcctggagacggactctatggctggacagcacccaggcagtataaaaaccagaaagaatcagagaaagaccttcggtacgttggcaaaattttggatggattttccttggcttctaaacctttatcttctaagaaaatctatccacctccagagctgccaagagactatcgaccagtgcattatttcagacccatggtggccgccacctccgagaactcacacttactgcaggtattatcagagtcagctggaaaggcaacgcctgacccagggacacacagtaagcaccaactgaatgcctccaaacgggctgagttgcttggagagacgcctattcaaggttcagctacttcagtgttagaatttctgtcccaaaaagacaaagagagaatcaaagaaatgaagcaggcaactgacctgaaagcagctcagctcaaggccaggagtctggcccagaacgctcagagcagcagagcccagctctcccctgcagcggctgctgggcactgctcttggaacatggcattaggtggtgggacggccaccttaaaagccagcaacttcaagcctttcgccaaagatccggaaaagcaaaagcgatacgacgagttcttagtacacatgaaacagggtcagaaagatgctctggaacgctgtctggaccccagcatgacagagtgggagcgaggccgtgagcgggatgagtttgcccgggcggccctgctgtacgcatcttcccattcgaccttgtcctccaggttcactcacgccaaggaggaggatgactcagatcaggttgaagtccctcgagaccaagagaatgatgtcggggataagcagtcggctgtgaagatgaagatgtttgggaagctcacccgagacacgtttgagtggcaccctgacaagcttctatgtaagagatttaatgtccctgacccttatccagagtaagttggataaacctttacatcagtacaaaatgtattcttgatattaaagctaattttcccctt

SEQ ID NO: 427797 - DNA, 194 bp, Homo sapiens
caccccaggagccgccaccttccttcccgatacaaaagatgcagatagatgaaagagaagagttcggcccgcggctgcctcccgtcttctgccccagtgagtgcagagccctttggttcgcccatttttatcagtgtgtgattgccctgagatggggacagtgtgacttagagccgaccaaacatacgtgcttg

SEQ ID NO: 427798 - DNA, 2136 bp, Homo sapiens
tgggaggctgatgcaggagaattgcttgaacctgggaggcggaggttgcagtgagccaagattgtgccattgcactctagcctgggtgacaaggcgagactcaatctcaagagaaaaaaaaacaaaacaaaaagatagcatatgtggtcaaaccagagactgtcagaaactttaggtatatttttatcagtggagcttttccttaatggaaatccattttgaaagttaaattcttgtccttatcataataaggaaaatctcatgggacctaaaatcagtcacccagattctcgaactgctttgagaagtgaaagcatcttaggagactttttagtcatgcagaagaggtggaaaacttgagatggaaagcttttcaggaggtggattttgtcctactggttgttactaaaatgattcttttttcaattcccagttcaactttagttggcttaccaagagtgaagcgtgacaagtactcagtcttcaactttctgacgctcccagagacagcttccttgcccaccactcaagcatcaagtgaaaaagtatcacagcaccgaggtcccgacaaatcaagaaaaccatccagatgggatacctctaaacacgaaaagaaagaagattccattagtgaatttttaagtttggctagatcaaaagccgagccacctaaacaacagtccagccccttagtaaacaaagaggaagagcatgcaccagaattatccgcaaatcagaccgtcaacaaagatgtggacgcacaggctgaaggagaagggagccgcccatccatggacttattcagggccatctttgccagttcctcagatgaaaagtcctcatcctccgaggatgagcaaggtgacagtgaagatgatcaggcaggctctggggaggccaacttccaaagctcccaagacactgacttgggggaaacatcatctgtggctcacgctcttgtgccagcaccccaggagccgccaccttccttcccgatacaaaagatgcagatagatgaaagagaagagttcggcccgcggctgcctcccgtcttctgccccaatgctcgtcagacacttgaggttcctcaaaaagagaaacataaaaagaacaaagacaagcacaaggccaagaaagagcacaggcggaagaaagagaagaaaaagaaacacaggaagcacaaacacaaaggcaagcaaaagaataaaaaaccagagaaaagtagtagctccgagagttccgacagcagcgacagccagagtgacgaggaaaccgcagacgtgtcgccccaggagctgctgagacggctgaaaagtcttccactaagaaggcagtaattgaatgctgccctggctcgtcctagaatcatttctcctccatgatggaagcccagtgattgttcagttaacgcattgtacagagtgtatttatatgtaaattcctgctgtaaaataatttttaaaaccttgacatttcaaagactgccttgaaaggtcgcagaaattgatttctatttttaatttcagttagtatcgggggaaaaaaatccagactgaacagtttaattaaagtggaatttttctattttcttcttgatttttaaaaaaatttcctgggacgttaaaaaagaagttaaaagtgaaggcttctctctggttttgtgatgaagacagcctggactcactgaaggacaagcgtgtgagaaggggcggttgcggcccctcctgccgttttttgggagtgaagctcttccctctctgggtggctgggttactgttggtgcccaggaagccccatgggagggcagagccagggcctggcagggggcctcagcctctcagggtagatgtcactaaagtgtctgagacaggcagggaaaccaggcaggagaatgtgcacccacagcctgggttacacggctgcagctccctgctctgaggccacctcatgtgtaccaaggagacctttttgaaaaataaagtgcagaccaggtgtgatggctaatgcctgtaatcccagagctttgggaggccgaggcgggaggattgcttgagcccaggaattccagaccagcctgggccacatagagacccctgtctccacaaaaaataaagtattgagcatttgtattttaca

SEQ ID NO: 427799 - DNA, 1179 bp, Homo sapiens
  misc_feature (17)..(17): n is a, c, g, or t
gggacttttattttctnttagaggggaaaaagtgtcccagttctctcctacagaaaaaatactttcagtatgttttgataaaactgttgctttgtcatgagttagtcaattgtatcaggttttccaagacctttaccagtaaattatgtttctgtatgtaaaataaccccttattagagagacagtgttatatgtatttacaaaattatataagttccattgggattgtattgattttgtattttcccaaaatagtactttgaattgatagtcctttatgcaatgtcttagcaatagtctctataatgcccatccaggagaagtgggtagtaattcttcatcatgaaaatgatatattacatatttagtatcttccctttgcagtattgcacttttgtttaactagaatacacctatgagatagccaaagtttcaaacacagttatcttagtttaccggtggagtatttcaacaccaaccacatttcccttcctccctctaattctacccacatgatctttattccttcctttcgccaattaaaaaaaaaaaaaaggaaaaaaaatctgtagatcttgtcactaaaatctaatttatatcaaatttatgagagaaagtattttcctaattatggtcaaataaatttggttaacatcctagtgattctctttctatataataaggcaattacagttttcaaagcattaagtctaacataactttaaacattctcttaggtttcaagacacttctatttaatattcattggggaaaagttgtccagctatcagctaagaaaacacatgcaaatatggttgtgtaaagttaagggttataaggaaaaaaaaatcagtagaattacataatactaaagttgcagttgaaagaatatccaagtatgtgttggtagttactaaaagaattatagctgttattgccttgtatttatagcccttgtttcaggttttatgattcaagtcttagtccaatctttcttttggacatttgcaatatttaccagttgtgttttgtgtagtctgaatttgctttctgtagttgagcaaacgtcttaaaaagtcatttgtaatttattaaattactttctatgatgttctatagagcaaatggaagtttaattattttttattaaacatattctttgactaccaaaaaaaaaag

SEQ ID NO: 427800 - DNA, 882 bp, Homo sapiens
ttttgttttctccttaacaccaacaccaaaaagtataaagtcacagaaactacttgagatgatattgcttcttaattttagagaaaacataatgctgcaggaaaactgactttacatttgatagaatatgtcttcagttttattatacttatttatgtaaatttattccatttcattccatagatacttatatgagcgaattgatggcagagtcagaggaaatcttcggcaagctgctatagatagatttagtaaacctgattcagatagatttgtttttctcctgtgtacccgagctggtgggttgggcatcaacttaactgcagctgatacatgtataatttttgattctgattggaatcctcagaatgatcttcaggtaaataatttccttggctaacaaaaaatgcattttttaaaaaagtaaaattgtgtaactttttggtaatccacatcttttatttttatctggacaaactaatgtatgtttctctatgaaatatctgtgccaaataaaataggtgaagttattttaattgttatgataaaaactataatgacaaaaatttttacttttttatatgtctcactaacttatatgtcttactagcttataaaaaattatacctaattgagtacagtactttttgtttgtttatttagatatgaggtctcactatgttgcccaggctggtcttgaaccccaggactcaagcattcctcccatcttggcctccaaaagtgctgggtttacaggcacgcatcatcacgcctggcctgatatttttatagtttaaagaatattatgtaaacttgagagagacctaagctttaagaataatttatttgtaataaaattaaaatttcagaattttaatcctt

SEQ ID NO: 427801 - DNA, 8796 bp, Homo sapiens
gatatatggaagatttaaacaccattcattctttgtttttccacaaaggaccgtcctccttctaatatttggaagaaaatagatcaatccagggactataaaaatggcaatcaactcagggaatatcaactggaagggctcaactggctcttgttcaattggtacaatagacgaaactgcatcttagcagatgaaatgggtcttggcaaaactattcaatcaattacattcctctatgaaatccttctgactggtataagaggacctttcctgattattgctccactttctactattgcaaactgggagagagaatttcgtacgtggactgatattaacgttgtggtttatcatgggagcctgattagcagacaaatgatacagcaatacgagatgtacttcagggattcacaggggcgtatcattcgaggagcttacagattccaagccatcatcaccacttttgaaatgattcttggaggctgtggagagcttaatgcaattgaatggcgatgtgtgattattgatgaagcacataggttaaaaaataaaaattgtaaactcttagagggcctgaaactcatgaatctggaacacaaggtgcttttgactggcacccctctccaaaatacagttgaagaactatttagtcttcttcactttcttgaacccttaaggtttccttctgaatcaacatttatgcaagaatttggggatctgaaaacagaggaacaggtacagaaacttcaggctatcctgaaaccaatgatgttgagacgattaaaagaagatgtggaaaagaagttggcacctaaagaagaaaccatcattgaagtagaacttactaatattcaaaagaaatactaccgggctatcttggaaaagaacttttcttttttatccaaaggagcaggacaaactaatgtacctaacttggtcaataccatgatggagctcaggaaatgttgtaatcatccatatcttataaaaggtgctgaggagaaaatacttggagaatttagagatacttacaatccagctgcttctgattttcatcttcaagcaatgatccagtctgctggtaaattggtccttattgataaattgcttcccaaaatgaaagccggaggtcataaagtgctcatcttctctcaaatggttcgttgccttgacattctggaggactatctcatacataaaagatacttatatgagcgaattgatggcagagtcagaggaaatcttcggcaagctgctatagatagatttagtaaacctgattcagatagatttgtttttctcctgtgtacccgagctggtgggttgggcatcaacttaactgcagctgatacatgtataatttttgattctgattggaatcctcagaatgatcttcaggcccaagctcgttgccacagaattggtcagaacaaagcagttaaagtctacagactggtaactcgtaactcatatgagagagagatgtttgaccgagccagtttgaaactgggcctagataaagctgtgttacagagcatgagtggaagagaaagtaatgttggtggtattcagcagctttccaaaaaggaaatagaagatctgcttcgaagaggtgcttatggtgctattatggaggaagaagatgaaggctctaaattctgcgaagaggatatcgatcagattttactacgtcgtacaaaaactattacaattgaatcagaaggacgtgggtcaacatttgccaaggcgagttttgtggcatctggaaaccggacagatatttctttagatgatcccaacttctggcaaaaatgggctaaaaaggcagaaatagatatagaggccatcagtggcagaaacagcttggttattgacactccaagaattaggaagcaaacaagaccttttagtgccacaaaagatgaattggctgaattatctgaagctgaaagtgaaggagatgaaaagcccaaactccggagaccctgtgaccgttccaatggctatggaagaactgaatgctttagagttgagaaaaacctgctagtttatgggtggggccgatggagagagattctatctcatggccgtttcaaaaggcagctaaatgaacacgatgtagagataatttgccgagctctcttagcatattgccttgttcactaccgaggagatgagaagattaaaggtttcatatgggatctcattactccaactgaagatggacagacacgagagctacagaatcatctaggcctatcagctcctgtacccaggggtcgaaaagggaagaaagtaaaaactcaaacaagctcatttgatatacaaaaagcagaatggcttcgaaaatataatcccgagcagctccttcaagatgaaggctacaaaaaacatataaaacaccactgtaataaggttttgcttcgtgtgagaatgctgtattatctaaagcaagaagttattggaaatgagtgtcagaaagtatttgatggagttgatgcaagtgacattgatgtttgggtaccagaaccagaccactcagaagttcctgctgagtggtgggattttgatgctgataagtcactccttattggagtttttaaacatggatatgaaaaatataacactattcgagcagacccagcattatgcttcttggaaagagtgggaaaacctgatgagaaagcagttgctgctgaacagagagcgaatgattatatggatggggatgtggaagatccagaatacaaacctgccccagccatctttaaagatgatatagaggatgatgtttcctcaccaggagatcttgttatagcagatggagatggtcaactgatggagggtgataaagtatattggcctactcaatcagctttaaccacacgtttgaggcgtctcatcactgcataccagcgtactaataaaaacagacaaattcagcagatacaaccgactttctcggtgcctaccagtgtaatgcagcctatttatgaggaagccactcttaatcctaaaatggcagccaagatagaaagacagcaaagatggacaagaagagaagaagctgacttttatagggttgtatctacatttggagtggtttttgaccctgacagaggccaatttgattggacaaaatttagagctatggctaggctacataagaaaactgatgatagtttggaaaaatatttgtacgcattcatgtccatgtgtcggagggtttgtcgtcttccttccaaagaagaattggtggatccaaatatttttatccagcccatcacagaagaacgtgcttctaggactttgtatcgcattgaacttctaaggaaagtacgggaacaggcccttcgacatccacagttgtttgaacgcttgaagctttgccatccaaatccagatttaccagtctggtgggaatgtggccctcatgatagggatttgcttattggtgctgccaaacacggggtgagccgaacagactatcacattcttcgtgatcctgaactctcatttatggcagctcagaggaactacagtcaaagtaagatggctcattcaaggacttctaccccacttctacagcaatatcaagtagcactttctgcttctcctcttacctctctacctaggctcctagatgctaaaggtattattctagaggagatgaaagttaaaagtgaaaaccttaaagaggagcctcagtcttctgaagaagaatctatgtcttctgtggaaaccaggacactaataaaatctgagcctgtaagtccaaagaatggtgttttaccacaggctactggagaccagaaatctggtggaaaatgtgaaacagacagacgcatggttgcagccagaacagaacccctaactccaaacccagcttctaagaaaccaagagtccacaaaaggggatcagaatctagttctgattctgactcagattctgagagatcatcttgttcttccagatcatcttcttcctcatcatcctcttcttgctcccactctcgatcaggctctagttcttcttcatcttcatcttgttcttcagcatcttcttcatcctcttcctccacctcttcctcctcctcctcctcttcatcttcatcagaagaaagtgacagtgatgaagaagaagcccaaaaacgagaaagtactactcacatgaaagcctatgatgaagaaagcgtcgcgtcactgagcactacccaggatgagactcaggatagttttcagatgaacaatgggacaccagagtctgcttatatcttacaaggtggatatatgctggcagcctcgtattggccaaaggatcgtgtgatgatcaataggttggacagtatttgtcaaacagttctgaaaggaaagtggccttcagctagaagaagttatgatgctaacacagtggcttctttctataccacaaaactgctggacagccctggagcagctacagaatacagcgagcccagtgtacccactcccccaggtgccggtgttaaagaagaacatgatcagtcaacacagatgtcaaaggaaggtggtttgaagttgacatttcagaagcaagggcttgctcagaaaagaccatttgatggtgaagacggtgctctggggcagcagcagtacctcactcggcttcgagagcttcaaagtgcatcagagaccagcctcgtcaatttcccaaaatccataccagtatcaggtacttccattcaaccaacccttggtgccaatggtgtgatattagacaaccagcctatagtcaaaaaaaggcgaggaaggaggaagaatgtagaaggtgttgacatcttcttttttaacagaaataaaccacctaatcatgtttctttaggcttaacctcctcacagatttccacagggataaatccagcactatcctatactcaacctcaaggaattcctgatacagaaagtccagttccagttattaatcttaaagatggaacgagacttgcaggagatgatgcaccaaagagaaaggatttggaaaaatggcttaaggagcacccgggttatgtggaagatttgggagcttttattcctagaatgcagcttcatgagggaagacccaaacaaaaaagacaccgttgcagaaaccccaataaactagatgtgaatagtctcactggagaagaacgtgttcaactgattaacagaagaaatgctagaaaggttggaggtgcatttgctccccctttgaaagatttatgtagattcctaaaagaaaattcagaatatggagtagctcctgaatggggagatgttgttaagcaatctggatttcttccagaaagcatgtatgaacgtattctcactggtcccgttgtgagagaggaagtaagcaggcgggggagacggcctaaaagtggaattgcaaaggccacagcagcagcagctgctgcatctgccaccagtgtttcaggcaatcctttgttagccaatggactacttccaggtgtggatctcacaactcttcaggccttacaacaaaacctacaaaacttgcagtcactgcaagtaactgctgggttgatgggaatgcctaccggccttccttctggaggagaagctaaaaacatggctgctatgttccccatgctgctgtcaggaatggctggattaccaaatctgttgggcatgggaggactcctgacaaagcctacggaatctgggacagaagacaaaaagggaagtgactctaaggagtcagaaggaaaaacagaaaggacagagagccaaagttcagagaatggtggagaaaactctgtgtcaagttctccttccacatcctctactgctgcattaaatacagctgcagctgccaacccattagctcttaacccactattactatctaatatactttatccagggatgcttctcactccaggccttaatcttcatattccaactttgtcccagtccaatacttttgatgtacaaaacaaaaacagtgacttaggctcgtctaagtctgtagaagtaaaagaagaagattccagaattaaagatcaggaagacaaaggaggaactgaaccaagtcctctcaatgaaaacagcacagatgagggttcagagaaagctgatgcttcatctggatctgatagtacatcgtcgtcatctgaggattcagattctagtaatgaagactgattcccagactctgcacttaaaatatgaactgattttggattttttctttaataattaattgtaaataccccagtgttgagtgcatcaataacttactgaccgaacatttcagttatttgtttagaagtgcaaactgctttcagagactttttgcatgtaatatttcttaagattcataagtttctgaactcgtatgtactatcaaatacataaaggtgtaaaattacaacaaaaggcattataattttgttgggggttaattttatgaaaattatgctcaataagagttgtatatttaatatatttgcagtgaacacagaatactttatgcatattactgatttaatttgaatatagttttacagcctccttgacacctataatttacagatcaaaactcagcaataatttgggcagctaatgaatgtcatgaaagctgtagaatctacatcaccatccattgctttaattacatgaaaatgctctagtgttgtgatgcactgctgatgtttccaattcaggtacaagtatgttttaaagaagaaataagtttcccaatcagccaatttaactggctacctgttacctcagctgagttagtttaggaagtttacattcgtttctaattctatacttgttttcaggggttttttaaacacatcctatatatcatgtcaatctggcaagaaatatgacttgctttttgctgagcttaattcagatatcagtaaaattaagtcataaaataatcatgtgtcatgtgactttggcaccctatagacatacttagttttaacttttcaaagtttggcctcctattagaaataatcatgtctcagatgagtaatgtctgtttccagggttcagaaaaggcaaactcatgaaatgccactgaaaagaactttcaacacagcatacttcatgtaaaagaaattgtttgtttgctttctttgtgtagatttctatttgtgttttatgtcatggaaatattccagaattaacagataatagtggtaaagtaatatgcagatagtctaaattcattttgagtttctaggtgtaagcagactaaatgttgcccagaatcagtgttgggttatcagtttatattaaatatactgagttgcccgttttgaaaatgcactttgaataatctcaaaaagatgtacaagttatacctgtaaaccacaaaagtgaagcctgaggcttctgttcaatttcatagactcctttaccatgtaaaatttgtctgatatttgatttgtgatacaatttctcctgctaaagctgctattattctgacaaggtagaggtccaggttcacctttatatatatttaaaacaattagtactgaattggacataaaaatattgacattctaaggagagatatatgttagcatttttctggtactcaaataagttagtagtaaagtctgcaagggcataaatttagggggaaaaagtgtcccagttctctcctacagaaaaaatactttcagtatgttttgataaaactgttgctttgtcatgagttagtcaattgtatcaggttttccaagacctttaccagtaaattatgtttctgtatgtaaaataaccccttattagagagacagtgttatatgtatttacaaaattatataagttccattgggattgtattgattttgtattttcccaaaatagtactttgaattgatagtcctttatgcaatgtcttagcaatagtctctataatgcccatccaggagaagtgggtagtaattcttcatcatgaaaatgatatattacatatttagtatcttccctttgcagtattgcacttttgtttaactagaatacacctatgagatagccaaagtttcaaacacagttatcttagtttaccggtggagtatttcaacaccaaccacatttcccttcctccctctaattctacccacatgatctttattccttcctttcgccaattaaaaaaaaaaaaaaggaaaaaaaatctgtagatcttgtcactaaaatctaatttatatcaaatttatgagagaaagtattttcctaattatggtcaaataaatttggttaacatcctagtgattctctttctatataataaggcaattacagttttcaaagcattaagtctaacataactttaaacattctcttaggtttcaagacacttctatttaatattcattggggaaaagttgtccagctatcagctaagaaaacacatgcaaatatggttgtgtaaagttaagggttataaggaaaaaaaaatcagtagaattacataatactaaagttgcagttgaaagaatatccaagtatgtgttggtagttactaaaagaattatagctgttattgccttgtatttatagcccttgtttcaggttttatgattcaagtcttagtccaatctttcttttggacatttgcaatatttaccagttgtgttttgtgtagtctgaatttgctttctgtagttgagcaaacgtcttaaaaagtcatttgtaatttattaaattactttctatgatgttctatagagcaaatggaagtttaattattttttattaaacatattctttgactaccaaaaaaaaaag

SEQ ID NO: 427802 - DNA, 4828 bp, Homo sapiens
gatatatggaagatttaaacaccattcattctttgtttttccacaaaggaccgtcctccttctaatatttggaagaaaatagatcaatccagggactataaaaatggcaatcaactcagggaatatcaactggaagggctcaactggctcttgttcaattggtacaatagacgaaactgcatcttagcagatgaaatgggtcttggcaaaactattcaatcaattacattcctctatgaaatccttctgactggtataagaggacctttcctgattattgctccactttctactattgcaaactgggagagagaatttcgtacgtggactgatattaacgttgtggtttatcatgggagcctgattagcagacaaatgatacagcaatacgagatgtacttcagggattcacaggggcgtatcattcgaggagcttacagattccaagccatcatcaccacttttgaaatgattcttggaggctgtggagagcttaatgcaattgaatggcgatgtgtgattattgatgaagcacataggttaaaaaataaaaattgtaaactcttagagggcctgaaactcatgaatctggaacacaaggtgcttttgactggcacccctctccaaaatacagttgaagaactatttagtcttcttcactttcttgaacccttaaggtttccttctgaatcaacatttatgcaagaatttggggatctgaaaacagaggaacaggtacagaaacttcaggctatcctgaaaccaatgatgttgagacgattaaaagaagatgtggaaaagaagttggcacctaaagaagaaaccatcattgaagtagaacttactaatattcaaaagaaatactaccgggctatcttggaaaagaacttttcttttttatccaaaggagcaggacaaactaatgtacctaacttggtcaataccatgatggagctcaggaaatgttgtaatcatccatatcttataaaaggtgctgaggagaaaatacttggagaatttagagatacttacaatccagctgcttctgattttcatcttcaagcaatgatccagtctgctggtaaattggtccttattgataaattgcttcccaaaatgaaagccggaggtcataaagtgctcatcttctctcaaatggttcgttgccttgacattctggaggactatctcatacataaaagatacttatatgagcgaattgatggcagagtcagaggaaatcttcggcaagctgctatagatagatttagtaaacctgattcagatagatttgtttttctcctgtgtacccgagctggtgggttgggcatcaacttaactgcagctgatacatgtataatttttgattctgattggaatcctcagaatgatcttcaggcccaagctcgttgccacagaattggtcagaacaaagcagttaaagtctacagactggtaactcgtaactcatatgagagagagatgtttgaccgagccagtttgaaactgggcctagataaagctgtgttacagagcatgagtggaagagaaagtaatgttggtggtattcagcagctttccaaaaaggaaatagaagatctgcttcgaagaggtgcttatggtgctattatggaggaagaagatgaaggctctaaattctgcgaagaggatatcgatcagattttactacgtcgtacaaaaactattacaattgaatcagaaggacgtgggtcaacatttgccaaggcgagttttgtggcatctggaaaccggacagatatttctttagatgatcccaacttctggcaaaaatgggctaaaaaggcagaaatagatatagaggccatcagtggcagaaacagcttggttattgacactccaagaattaggaagcaaacaagaccttttagtgccacaaaagatgaattggctgaattatctgaagctgaaagtgaaggagatgaaaagcccaaactccggagaccctgtgaccgttccaatggctatggaagaactgaatgctttagagttgagaaaaacctgctagtttatgggtggggccgatggagagagattctatctcatggccgtttcaaaaggcagctaaatgaacacgatgtagagataatttgccgagctctcttagcatattgccttgttcactaccgaggagatgagaagattaaaggtttcatatgggatctcattactccaactgaagatggacagacacgagagctacagaatcatctaggcctatcagctcctgtacccaggggtcgaaaagggaagaaagtaaaaactcaaacaagctcatttgatatacaaaaagcagaatggcttcgaaaatataatcccgagcagctccttcaagatgaaggctacaaaaaacatataaaacaccactgtaataaggttttgcttcgtgtgagaatgctgtattatctaaagcaagaagttattggaaatgagtgtcagaaagtatttgatggagttgatgcaagtgacattgatgtttgggtaccagaaccagaccactcagaagttcctgctgagtggtgggattttgatgctgataagtcactccttattggagtttttaaacatggatatgaaaaatataacactattcgagcagacccagcattatgcttcttggaaagagtgggaaaacctgatgagaaagcagttgctgctgaacagagagcgaatgattatatggatggggatgtggaagatccagaatacaaacctgccccagccatctttaaagatgatatagaggatgatgtttcctcaccaggagatcttgttatagcagatggagatggtcaactgatggagggtgataaagtatattggcctactcaatcagctttaaccacacgtttgaggcgtctcatcactgcataccagcgtactaataaaaacagacaaattcagcagatacaaccgactttctcggtgcctaccagtgtaatgcagcctatttatgaggaagccactcttaatcctaaaatggcagccaagatagaaagacagcaaagatggacaagaagagaagaagctgacttttatagggttgtatctacatttggagtggtttttgaccctgacagaggccaatttgattggacaaaatttagagctatggctaggctacataagaaaactgatgatagtttggaaaaatatttgtacgcattcatgtccatgtgtcggagggtttgtcgtcttccttccaaagaagaattggtggatccaaatatttttatccagcccatcacagaagaacgtgcttctaggactttgtatcgcattgaacttctaaggaaagtacgggaacaggcccttcgacatccacagttgtttgaacgcttgaagctttgccatccaaatccagatttaccagtctggtgggaatgtggccctcatgatagggatttgcttattggtgctgccaaacacggggtgagccgaacagactatcacattcttcgtgatcctgaactctcatttatggcagctcagaggaactacagtcaaagtaagatggctcattcaaggacttctaccccacttctacagcaatatcaagtagcactttctgcttctcctcttacctctctacctaggctcctagatgctaaaggtattattctagaggagatgaaagttaaaagtgaaaaccttaaagaggagcctcagtcttctgaagaagaatctatgtcttctgtggaaaccaggacactaataaaatctgagcctgtaagtccaaagaatggtgttttaccacaggctactggagaccagaaatctggtggaaaatgtgaaacagacagacgcatggttgcagccagaacagaacccctaactccaaacccagcttctaagaaaccaagagtccacaaaaggggatcagaatctagttctgattctgactcagattctgagagatcatcttgttcttccagatcatcttcttcctcatcatcctcttcttgctcccactctcgatcaggctctagttcttcttcatcttcatcttgttcttcagcatcttcttcatcctcttcctccacctcttcctcctcctcctcctcttcatcttcatcagaagaaagtgacagtgatgaagaagaagcccaaaaacgagaaagtactactcacatgaaagcctatgatgaagaaagcgtcgcgtcactgagcactacccaggatgagactcaggatagttttcagatgaacaatgggacaccagagtctgcttatatcttacaaggtggatatatgctggcagcctcgtattggccaaaggatcgtgtgatgatcaataggttggacagtatttgtcaaacagttctgaaaggaaagtggccttcagctagaagaagttatgatgctaacacagtggcttctttctataccacaaaactgctggacagccctggagcagctacagaatacagcgagcccagtgtacccactcccccaggtgccggtgttaaagaagaacatgatcagtcaacacagatgtcaaaggtgaagaagcatgtacgagaaaaggagtttacagtgaaaatcaaagacgaaggtggtttgaagttgacatttcagaagcaagggcttgctcagaaaagaccatttgatggtgaagacggtgctctggggcagcagcagtacctcactcggcttcgagagcttcaaagtgcatcttcttcatcctcttcctccacctcttcctcctcctcctcctcttcatcttcatcagaagaaagtgacagtgatgaagaatgaagcccatacgataaagtactatgtcacatgt

SEQ ID NO: 427803 - DNA, 1901 bp, Homo sapiens
gatatatggaagatttaaacaccattcattctttgtttttccacaaaggaccgtcctccttctaatatttggaagaaaatagatcaatccagggactataaaaatggcaatcaactcagggaatatcaactggaagggctcaactggctcttgttcaattggtacaatagacgaaactgcatcttagcagatgaaatgggtcttggcaaaactattcaatcaattacattcctctatgaaatccttctgactggtataagaggacctttcctgattattgctccactttctactattgcaaactgggagagagaatttcgtacgtggactgatattaacgttgtggtttatcatgggagcctgattagcagacaaatgatacagcaatacgagatgtacttcagggattcacaggggcgtatcattcgaggagcttacagattccaagccatcatcaccacttttgaaatgattcttggaggctgtggagagcttaatgcaattgaatggcgatgtgtgattattgatgaagcacataggttaaaaaataaaaattgtaaactcttagagggcctgaaactcatgaatctggaacacaaggtgcttttgactggcacccctctccaaaatacagttgaagaactatttagtcttcttcactttcttgaacccttaaggtttccttctgaatcaacatttatgcaagaatttggggatctgaaaacagaggaacaggtacagaaacttcaggctatcctgaaaccaatgatgttgagacgattaaaagaagatgtggaaaagaagttggcacctaaagaagaaaccatcattgaagtagaacttactaatattcaaaagaaatactaccgggctatcttggaaaagaacttttcttttttatccaaaggagcaggacaaactaatgtacctaacttggtcaataccatgatggagctcaggaaatgttgtaatcatccatatcttataaaaggtgctgaggagaaaatacttggagaatttagagatacttacaatccagctgcttctgattttcatcttcaagcaatgatccagtctgctggtaaattggtccttattgataaattgcttcccaaaatgaaagccggaggtcataaagtgctcatcttctctcaaatggttcgttgccttgacattctggaggactatctcatacataaaagatacttatatgagcgaattgatggcagagtcagaggaaatcttcggcaagctgctatagatagatttagtaaacctgattcagatagatttgtttttctcctgtgtacccgagctggtgggttgggcatcaacttaactgcagctgatacatgtataatttttgattctgattggaatcctcagaatgatcttcaggtaaataatttccttggctaacaaaaaatgcattttttaaaaaagtaaaattgtgtaactttttggtaatccacatcttttatttttatctggacaaactaatgtatgtttctctatgaaatatctgtgccaaataaaataggtgaagttattttaattgttatgataaaaactataatgacaaaaatttttacttttttatatgtctcactaacttatatgtcttactagcttataaaaaattatacctaattgagtacagtactttttgtttgtttatttagatatgaggtctcactatgttgcccaggctggtcttgaaccccaggactcaagcattcctcccatcttggcctccaaaagtgctgggtttacaggcacgcatcatcacgcctggcctgatatttttatagtttaaagaatattatgtaaacttgagagagacctaagctttaagaataatttatttgtaataaaattaaaatttcagaattttaatcctt

SEQ ID NO: 427804 - DNA, 1632 bp, Homo sapiens
gatatatggaagatttaaacaccattcattctttgtttttccacaaaggaccgtcctccttctaatatttggaagaaaatagatcaatccagggactataaaaatggcaatcaactcagggaatatcaactggaagggctcaactggctcttgttcaattggtacaatagacgaaactgcatcttagcagatgaaatgggtcttggcaaaactattcaatcaattacattcctctatgaaatccttctgactggtataagaggacctttcctgattattgctccactttctactattgcaaactgggagagagaatttcgtacgtggactgatattaacgttgtggtttatcatgggagcctgattagcagacaaatgatacagcaatacgagatgtacttcagggattcacaggggcgtatcattcgaggagcttacagattccaagccatcatcaccacttttgaaatgattcttggaggctgtggagagcttaatgcaattgaatggcgatgtgtgattattgatgaagcacataggttaaaaaataaaaattgtaaactcttagagggcctgaaactcatgaatctggaacacaaggtgcttttgactggcacccctctccaaaatacagttgaagaactatttagtcttcttcactttcttgaacccttaaggtttccttctgaatcaacatttatgcaagaatttggggatctgaaaacagaggaacaggtacagaaacttcaggctatcctgaaaccaatgatgttgagacgattaaaagaagatgtggaaaagaagttggcacctaaagaagaaaccatcattgaagtagaacttactaatattcaaaagaaatactaccgggctatcttggaaaagaacttttcttttttatccaaaggagcaggacaaactaatgtacctaacttggtcaataccatgatggagctcaggaaatgttgtaatcatccatatcttataaaaggtgctgaggagaaaatacttggagaatttagagatacttacaatccagctgcttctgattttcatcttcaagcaatgatccagtctgctggtaaattggtccttattgataaattgcttcccaaaatgaaagccggaggtcataaagtgctcatcttctctcaaatggttcgttgccttgacattctggaggactatctcatacataaaagatacttatatgagcgaattgatggcagagtcagaggaaatcttcggcaagctgctatagatagatttagtaaacctgattcagatagatttgtttttctcctgtgtacccgagctggtgggttgggcatcaacttaactgcagctgatacatgtataatttttgattctgattggaatcctcagaatgatcttcaggcccaagctcgttgccacagaattggtcagaacaaagcagttaaagtctacagactggtaactcgtaactcatatgagagagagatgtttgaccgagccagtttgaaactgggcctagataaagctgtgttacagagcatgagtggaagagaaagtaatgttggtggtgtatgtatagtttctttttcacttgagatttttgtgtgtttttgcatttgattttacctccaatag

SEQ ID NO: 427805 - DNA, 441 bp, Homo sapiens
caaaaagcagaatggcttcgaaaatataatcccgagcagctccttcaagatgaaggctacaaaaaacatataaaacaccactgtaataagtaggtatagggtattttaaacacaactctttaaatgtttactgttctgaatttattaatactctttaagcttgctgattttgagtacagagacagcatggtctagggccaatcctaatcctaattttacaaggtatcctacaagcaaatcatgatacctcttgtgtcattgttctcaccaacagataagtaaaactggcctccaaatgagctcattatatcttacttgtatatgaaataatgatgattatgaagattttggagaagttctttatatatatggtagtaataagattcatttaatcagaagtaatatttcattattttaaaatctgtacacaaattccttcct

SEQ ID NO: 427806 - DNA, 288 bp, Homo sapiens
tttgaaatgattcttggaggctgtggagagcttaatgcaattgaatggcgatgtgtgattattgatgaagcacataggttaaaaaataaaaattgtaaactcttagagggcctgaaactcatgaatctggtaagtaacttaatattatcattatgacaattgagtttattagatgtatagtgaaaggttatagagttaatgctaaaaatttttctttttaattttagagtgtagtacatctgaatcttatctgtgataattgagattttttggggggccttaatttgt

SEQ ID NO: 427807 - DNA, 1862 bp, Homo sapiens
gatatatggaagatttaaacaccattcattctttgtttttccacaaaggaccgtcctccttctaatatttggaagaaaatagatcaatccagggactataaaaatggcaatcaactcagggaatatcaactggaagggctcaactggctcttgttcaattggtacaatagacgaaactgcatcttagcagatgaaatgggtcttggcaaaactattcaatcaattacattcctctatgaaatccttctgactggtataagaggacctttcctgattattgctccactttctactattgcaaactgggagagagaatttcgtacgtggactgatattaacgttgtggtttatcatgggagcctgattagcagacaaatgatacagcaatacgagatgtacttcagggattcacaggggcgtatcattcgaggagcttacagattccaagccatcatcaccacttttgaaatgattcttggaggctgtggagagcttaatgcaattgaatggcgatgtgtgattattgatgaagcacataggttaaaaaataaaaattgtaaactcttagagggcctgaaactcatgaatctggaacacaaggtgcttttgactggcacccctctccaaaatacagttgaagaactatttagtcttcttcactttcttgaacccttaaggtttccttctgaatcaacatttatgcaagaatttggggatctgaaaacagaggaacaggtacagaaacttcaggctatcctgaaaccaatgatgttgagacgattaaaagaagatgtggaaaagaagttggcacctaaagaagaaaccatcattgaagtagaacttactaatattcaaaagaaatactaccgggctatcttggaaaagaacttttcttttttatccaaaggagcaggacaaactaatgtacctaacttggtcaataccatgatggagctcaggaaatgttgtaatcatccatatcttataaaaggtgctgaggagaaaatacttggagaatttagagatacttacaatccagctgcttctgattttcatcttcaagcaatgatccagtctgctggtaaattggtccttattgataaattgcttcccaaaatgaaagccggaggtcataaagtgctcatcttctctcaaatggttcgttgccttgacattctggaggactatctcatacataaaaggtaaagcatactgaatttactgtgaattatgctaagtatatgctattaagatttgtgcagcactgtaatgtaaatgaactttactcatatctttctctttgctagattagaataatgcattcaaatttataagtaaagattgtttaggattatgtgttatattttcctaacctgcatatgttgcaatattagatgtgcctgaggagtccaattaagaaaagcttgcaaataaatatttgtttacccaggaatgggtttaaaaatgtacattttacttgattaataaaccttgtggatgaaactttaaatagatatatatttacaacagtcatcttcaaaattgaaaaaagtgattcaagaactttggatctatttcattgttataattagagccttaagttgtgggacttttattcttattatatactatataaaatttgttcatgctttaattttttctgatttgtttcaatgtgggttttttgttttgttttgtttattggtacatcacaataagatagtgttaaatattgtctaatcaggccgggcgcggtggctcacgtctgtaatcccagcactttgggagcctgaggcaggcggatcatgaggtcaggagatcaagaccatcgtggcttacacggtgaaacccacgtctctact

SEQ ID NO: 427808 - DNA, 8844 bp, Homo sapiens
gatatatggaagatttaaacaccattcattctttgtttttccacaaaggaccgtcctccttctaatatttggaagaaaatagatcaatccagggactataaaaatggcaatcaactcagggaatatcaactggaagggctcaactggctcttgttcaattggtacaatagacgaaactgcatcttagcagatgaaatgggtcttggcaaaactattcaatcaattacattcctctatgaaatccttctgactggtataagaggacctttcctgattattgctccactttctactattgcaaactgggagagagaatttcgtacgtggactgatattaacgttgtggtttatcatgggagcctgattagcagacaaatgatacagcaatacgagatgtacttcagggattcacaggggcgtatcattcgaggagcttacagattccaagccatcatcaccacttttgaaatgattcttggaggctgtggagagcttaatgcaattgaatggcgatgtgtgattattgatgaagcacataggttaaaaaataaaaattgtaaactcttagagggcctgaaactcatgaatctggaacacaaggtgcttttgactggcacccctctccaaaatacagttgaagaactatttagtcttcttcactttcttgaacccttaaggtttccttctgaatcaacatttatgcaagaatttggggatctgaaaacagaggaacaggtacagaaacttcaggctatcctgaaaccaatgatgttgagacgattaaaagaagatgtggaaaagaagttggcacctaaagaagaaaccatcattgaagtagaacttactaatattcaaaagaaatactaccgggctatcttggaaaagaacttttcttttttatccaaaggagcaggacaaactaatgtacctaacttggtcaataccatgatggagctcaggaaatgttgtaatcatccatatcttataaaaggtgctgaggagaaaatacttggagaatttagagatacttacaatccagctgcttctgattttcatcttcaagcaatgatccagtctgctggtaaattggtccttattgataaattgcttcccaaaatgaaagccggaggtcataaagtgctcatcttctctcaaatggttcgttgccttgacattctggaggactatctcatacataaaagatacttatatgagcgaattgatggcagagtcagaggaaatcttcggcaagctgctatagatagatttagtaaacctgattcagatagatttgtttttctcctgtgtacccgagctggtgggttgggcatcaacttaactgcagctgatacatgtataatttttgattctgattggaatcctcagaatgatcttcaggcccaagctcgttgccacagaattggtcagaacaaagcagttaaagtctacagactggtaactcgtaactcatatgagagagagatgtttgaccgagccagtttgaaactgggcctagataaagctgtgttacagagcatgagtggaagagaaagtaatgttggtggtattcagcagctttccaaaaaggaaatagaagatctgcttcgaagaggtgcttatggtgctattatggaggaagaagatgaaggctctaaattctgcgaagaggatatcgatcagattttactacgtcgtacaaaaactattacaattgaatcagaaggacgtgggtcaacatttgccaaggcgagttttgtggcatctggaaaccggacagatatttctttagatgatcccaacttctggcaaaaatgggctaaaaaggcagaaatagatatagaggccatcagtggcagaaacagcttggttattgacactccaagaattaggaagcaaacaagaccttttagtgccacaaaagatgaattggctgaattatctgaagctgaaagtgaaggagatgaaaagcccaaactccggagaccctgtgaccgttccaatggctatggaagaactgaatgctttagagttgagaaaaacctgctagtttatgggtggggccgatggagagagattctatctcatggccgtttcaaaaggcagctaaatgaacacgatgtagagataatttgccgagctctcttagcatattgccttgttcactaccgaggagatgagaagattaaaggtttcatatgggatctcattactccaactgaagatggacagacacgagagctacagaatcatctaggcctatcagctcctgtacccaggggtcgaaaagggaagaaagtaaaaactcaaacaagctcatttgatatacaaaaagcagaatggcttcgaaaatataatcccgagcagctccttcaagatgaaggctacaaaaaacatataaaacaccactgtaataaggttttgcttcgtgtgagaatgctgtattatctaaagcaagaagttattggaaatgagtgtcagaaagtatttgatggagttgatgcaagtgacattgatgtttgggtaccagaaccagaccactcagaagttcctgctgagtggtgggattttgatgctgataagtcactccttattggagtttttaaacatggatatgaaaaatataacactattcgagcagacccagcattatgcttcttggaaagagtgggaaaacctgatgagaaagcagttgctgctgaacagagagcgaatgattatatggatggggatgtggaagatccagaatacaaacctgccccagccatctttaaagatgatatagaggatgatgtttcctcaccaggagatcttgttatagcagatggagatggtcaactgatggagggtgataaagtatattggcctactcaatcagctttaaccacacgtttgaggcgtctcatcactgcataccagcgtactaataaaaacagacaaattcagcagatacaaccgactttctcggtgcctaccagtgtaatgcagcctatttatgaggaagccactcttaatcctaaaatggcagccaagatagaaagacagcaaagatggacaagaagagaagaagctgacttttatagggttgtatctacatttggagtggtttttgaccctgacagaggccaatttgattggacaaaatttagagctatggctaggctacataagaaaactgatgatagtttggaaaaatatttgtacgcattcatgtccatgtgtcggagggtttgtcgtcttccttccaaagaagaattggtggatccaaatatttttatccagcccatcacagaagaacgtgcttctaggactttgtatcgcattgaacttctaaggaaagtacgggaacaggcccttcgacatccacagttgtttgaacgcttgaagctttgccatccaaatccagatttaccagtctggtgggaatgtggccctcatgatagggatttgcttattggtgctgccaaacacggggtgagccgaacagactatcacattcttcgtgatcctgaactctcatttatggcagctcagaggaactacagtcaaagtaagatggctcattcaaggacttctaccccacttctacagcaatatcaagtagcactttctgcttctcctcttacctctctacctaggctcctagatgctaaaggtattattctagaggagatgaaagttaaaagtgaaaaccttaaagaggagcctcagtcttctgaagaagaatctatgtcttctgtggaaaccaggacactaataaaatctgagcctgtaagtccaaagaatggtgttttaccacaggctactggagaccagaaatctggtggaaaatgtgaaacagacagacgcatggttgcagccagaacagaacccctaactccaaacccagcttctaagaaaccaagagtccacaaaaggggatcagaatctagttctgattctgactcagattctgagagatcatcttgttcttccagatcatcttcttcctcatcatcctcttcttgctcccactctcgatcaggctctagttcttcttcatcttcatcttgttcttcagcatcttcttcatcctcttcctccacctcttcctcctcctcctcctcttcatcttcatcagaagaaagtgacagtgatgaagaagaagcccaaaaacgagaaagtactactcacatgaaagcctatgatgaagaaagcgtcgcgtcactgagcactacccaggatgagactcaggatagttttcagatgaacaatgggacaccagagtctgcttatatcttacaaggtggatatatgctggcagcctcgtattggccaaaggatcgtgtgatgatcaataggttggacagtatttgtcaaacagttctgaaaggaaagtggccttcagctagaagaagttatgatgctaacacagtggcttctttctataccacaaaactgctggacagccctggagcagctacagaatacagcgagcccagtgtacccactcccccaggtgccggtgttaaagaagaacatgatcagtcaacacagatgtcaaaggtgaagaagcatgtacgagaaaaggagtttacagtgaaaatcaaagacgaaggtggtttgaagttgacatttcagaagcaagggcttgctcagaaaagaccatttgatggtgaagacggtgctctggggcagcagcagtacctcactcggcttcgagagcttcaaagtgcatcagagaccagcctcgtcaatttcccaaaatccataccagtatcaggtacttccattcaaccaacccttggtgccaatggtgtgatattagacaaccagcctatagtcaaaaaaaggcgaggaaggaggaagaatgtagaaggtgttgacatcttcttttttaacagaaataaaccacctaatcatgtttctttaggcttaacctcctcacagatttccacagggataaatccagcactatcctatactcaacctcaaggaattcctgatacagaaagtccagttccagttattaatcttaaagatggaacgagacttgcaggagatgatgcaccaaagagaaaggatttggaaaaatggcttaaggagcacccgggttatgtggaagatttgggagcttttattcctagaatgcagcttcatgagggaagacccaaacaaaaaagacaccgttgcagaaaccccaataaactagatgtgaatagtctcactggagaagaacgtgttcaactgattaacagaagaaatgctagaaaggttggaggtgcatttgctccccctttgaaagatttatgtagattcctaaaagaaaattcagaatatggagtagctcctgaatggggagatgttgttaagcaatctggatttcttccagaaagcatgtatgaacgtattctcactggtcccgttgtgagagaggaagtaagcaggcgggggagacggcctaaaagtggaattgcaaaggccacagcagcagcagctgctgcatctgccaccagtgtttcaggcaatcctttgttagccaatggactacttccaggtgtggatctcacaactcttcaggccttacaacaaaacctacaaaacttgcagtcactgcaagtaactgctgggttgatgggaatgcctaccggccttccttctggaggagaagctaaaaacatggctgctatgttccccatgctgctgtcaggaatggctggattaccaaatctgttgggcatgggaggactcctgacaaagcctacggaatctgggacagaagacaaaaagggaagtgactctaaggagtcagaaggaaaaacagaaaggacagagagccaaagttcagagaatggtggagaaaactctgtgtcaagttctccttccacatcctctactgctgcattaaatacagctgcagctgccaacccattagctcttaacccactattactatctaatatactttatccagggatgcttctcactccaggccttaatcttcatattccaactttgtcccagtccaatacttttgatgtacaaaacaaaaacagtgacttaggctcgtctaagtctgtagaagtaaaagaagaagattccagaattaaagatcaggaagacaaaggaggaactgaaccaagtcctctcaatgaaaacagcacagatgagggttcagagaaagctgatgcttcatctggatctgatagtacatcgtcgtcatctgaggattcagattctagtaatgaagactgattcccagactctgcacttaaaatatgaactgattttggattttttctttaataattaattgtaaataccccagtgttgagtgcatcaataacttactgaccgaacatttcagttatttgtttagaagtgcaaactgctttcagagactttttgcatgtaatatttcttaagattcataagtttctgaactcgtatgtactatcaaatacataaaggtgtaaaattacaacaaaaggcattataattttgttgggggttaattttatgaaaattatgctcaataagagttgtatatttaatatatttgcagtgaacacagaatactttatgcatattactgatttaatttgaatatagttttacagcctccttgacacctataatttacagatcaaaactcagcaataatttgggcagctaatgaatgtcatgaaagctgtagaatctacatcaccatccattgctttaattacatgaaaatgctctagtgttgtgatgcactgctgatgtttccaattcaggtacaagtatgttttaaagaagaaataagtttcccaatcagccaatttaactggctacctgttacctcagctgagttagtttaggaagtttacattcgtttctaattctatacttgttttcaggggttttttaaacacatcctatatatcatgtcaatctggcaagaaatatgacttgctttttgctgagcttaattcagatatcagtaaaattaagtcataaaataatcatgtgtcatgtgactttggcaccctatagacatacttagttttaacttttcaaagtttggcctcctattagaaataatcatgtctcagatgagtaatgtctgtttccagggttcagaaaaggcaaactcatgaaatgccactgaaaagaactttcaacacagcatacttcatgtaaaagaaattgtttgtttgctttctttgtgtagatttctatttgtgttttatgtcatggaaatattccagaattaacagataatagtggtaaagtaatatgcagatagtctaaattcattttgagtttctaggtgtaagcagactaaatgttgcccagaatcagtgttgggttatcagtttatattaaatatactgagttgcccgttttgaaaatgcactttgaataatctcaaaaagatgtacaagttatacctgtaaaccacaaaagtgaagcctgaggcttctgttcaatttcatagactcctttaccatgtaaaatttgtctgatatttgatttgtgatacaatttctcctgctaaagctgctattattctgacaaggtagaggtccaggttcacctttatatatatttaaaacaattagtactgaattggacataaaaatattgacattctaaggagagatatatgttagcatttttctggtactcaaataagttagtagtaaagtctgcaagggcataaatttagggggaaaaagtgtcccagttctctcctacagaaaaaatactttcagtatgttttgataaaactgttgctttgtcatgagttagtcaattgtatcaggttttccaagacctttaccagtaaattatgtttctgtatgtaaaataaccccttattagagagacagtgttatatgtatttacaaaattatataagttccattgggattgtattgattttgtattttcccaaaatagtactttgaattgatagtcctttatgcaatgtcttagcaatagtctctataatgcccatccaggagaagtgggtagtaattcttcatcatgaaaatgatatattacatatttagtatcttccctttgcagtattgcacttttgtttaactagaatacacctatgagatagccaaagtttcaaacacagttatcttagtttaccggtggagtatttcaacaccaaccacatttcccttcctccctctaattctacccacatgatctttattccttcctttcgccaattaaaaaaaaaaaaaaggaaaaaaaatctgtagatcttgtcactaaaatctaatttatatcaaatttatgagagaaagtattttcctaattatggtcaaataaatttggttaacatcctagtgattctctttctatataataaggcaattacagttttcaaagcattaagtctaacataactttaaacattctcttaggtttcaagacacttctatttaatattcattggggaaaagttgtccagctatcagctaagaaaacacatgcaaatatggttgtgtaaagttaagggttataaggaaaaaaaaatcagtagaattacataatactaaagttgcagttgaaagaatatccaagtatgtgttggtagttactaaaagaattatagctgttattgccttgtatttatagcccttgtttcaggttttatgattcaagtcttagtccaatctttcttttggacatttgcaatatttaccagttgtgttttgtgtagtctgaatttgctttctgtagttgagcaaacgtcttaaaaagtcatttgtaatttattaaattactttctatgatgttctatagagcaaatggaagtttaattattttttattaaacatattctttgactaccaaaaaaaaaag

SEQ ID NO: 427809 - DNA, 1377 bp, Homo sapiens
gcggaagccgggattcgccctccggggagcgattggtcctcgggaggggcggggaggtggacgcgggtaccggcggtcgtcgggtcggcagcctttggtcagttggcagcggcaagcgcgctgcggttccggtggcgccatgtcgttctgcagcttcttcgggggcgaggttttccagaatcactttgaacctggcgtttacgtgtgtgccaagtgtggctatgagctgttctccagccgctcgaagtatgcacactcgtctccatggccggcgttcaccgagaccattcacgccgacagcgtggccaagcgtccggagcacaatagatctgaagccttgaaggtgtcctgtggcaagtgtggcaatgggttgggccacgagttcctgaacgacggccccaagccggggcagtcccgattctgaatattcagcagctcgctgaagtttgtccctaaaggcaaagaaacttctgcctcccagggtcactaggcgggcagcccacacccaccccagacggccaccacactgaggccacacgttggccattccaccttggagttggaaccctgggcgtcgagacaggaaggcagggcgcagtggttgaaacatcaggacactcccaaggccccggctctgaacaagaccttttcgtttcttggaaaagagactcatttgctgatggttcatgccttctgctgggacaggcctgggctgtgcagccacactgtcggctgacttagccccctgctcactctaggtgcctccaggaggtgagccctgggtgcagctggtctctgaatgacgttacaccctcaccttcttttcctggccctgtctctggactctcccctgtgaggcccaattccaagacagactctcgtcctcaccgaagcttaggcccacatctcccaggctgcttaggagacagaatggaaacggaggccgcccctgccagccgccctggccctggtcactgcatgatccgctctggtcaaacccttccaggccagccagagtggggatggtctgtgacctgctgggaaggcaggctgatggggcacacccttggcctctcgtccacgaggggagaaacctaaaccctgtttcacaatctgtgcggaagtagcttgcctcacttctgcttaggaaagcggctgttgctccataactctaaccagcacagggctgaggcctgcagtgcacacctgcagggaggcccttcccaaggtgtggtgactgtgccttactgtacatgctcggaggcctggccatataggagggtgggtgatgctgaaatcaccccccatcttaagtaattactttctggagtaatcaggtggaaatccatagacaaatgaaacattcaaaaaaaaaaa

SEQ ID NO: 427810 - DNA, 711 bp, Homo sapiens
gtggcctggaggccttttctctgggactgttctcttcctgcctggagagcagagcagtgcctgggtatccagcttagggcctcgttgggcagcagggaggaccacttgagaaaggagagggaccaggtggttgggccacatcagggcccctgccctctatgttcctgggggaactaggggggcgagggggagctccgtgtcctcattggactacccaggttccttcacgctgcacacacttgtagctgagtgtctgcatcaccaagcaaagatggaaatgttaggatatgccccgtcacggggctatgagaagaatcaaggagataattgtgaaaggtgactcccctggtctctggcacatctactaaacgcgtttacgtgtgtgccaagtgtggctatgagctgttctccagccgctcgaagtatgcacactcgtctccatggccggcgttcaccgagaccattcacgccgacagcgtggccaagcgtccggagcacaatagatctgaagccttgaagctccaggggcttagaggcgtctattccaggcctgttgcctctgccagggagctgccaccccaggctatcgggagagcctggccttctggtgcaaatgtgggaaacaggacaggtttcctgtacgggctccaggacaaaggtcaacctcttatgtcggcggtcagcttgggaaataggcgtgtgggaagaaac

SEQ ID NO: 427811 - DNA, 1314 bp, Homo sapiens
cctggggaaggagcacagcctaccctcggaacgggggcagcgctgtctttgcctgggttggtggatttgggagcttgaccccggaaaggcgggagctgatgactccacatttgcctctccttccaccacaggcgtttacgtgtgtgccaagtgtggctatgagctgttctccagccgctcgaagtatgcacactcgtctccatggccggcgttcaccgagaccattcacgccgacagcgtggccaagcgtccggagcacaatagatctgaagccttgaaggtgtcctgtggcaagtgtggcaatgggttgggccacgagttcctgaacgacggccccaagccggggcagtcccgattctgaatattcagcagctcgctgaagtttgtccctaaaggcaaagaaacttctgcctcccagggtcactaggcgggcagcccacacccaccccagacggccaccacactgaggccacacgttggccattccaccttggagttggaaccctgggcgtcgagacaggaaggcagggcgcagtggttgaaacatcaggacactcccaaggccccggctctgaacaagaccttttcgtttcttggaaaagagactcatttgctgatggttcatgccttctgctgggacaggcctgggctgtgcagccacactgtcggctgacttagccccctgctcactctaggtgcctccaggaggtgagccctgggtgcagctggtctctgaatgacgttacaccctcaccttcttttcctggccctgtctctggactctcccctgtgaggcccaattccaagacagactctcgtcctcaccgaagcttaggcccacatctcccaggctgcttaggagacagaatggaaacggaggccgcccctgccagccgccctggccctggtcactgcatgatccgctctggtcaaacccttccaggccagccagagtggggatggtctgtgacctgctgggaaggcaggctgatggggcacacccttggcctctcgtccacgaggggagaaacctaaaccctgtttcacaatctgtgcggaagtagcttgcctcacttctgcttaggaaagcggctgttgctccataactctaaccagcacagggctgaggcctgcagtgcacacctgcagggaggcccttcccaaggtgtggtgactgtgccttactgtacatgctcggaggcctggccatataggagggtgggtgatgctgaaatcaccccccatcttaagtaattactttctggagtaatcaggtggaaatccatagacaaatgaaacattcaaaaaaaaaaa

SEQ ID NO: 427812 - DNA, 1225 bp, Homo sapiens
accgtggcttgtgggttactggcttcaagatgccaaaagctttaataactggggttggcatgtgtggctatgagctgttctccagccgctcgaagtatgcacactcgtctccatggccggcgttcaccgagaccattcacgccgacagcgtggccaagcgtccggagcacaatagatctgaagccttgaaggtgtcctgtggcaagtgtggcaatgggttgggccacgagttcctgaacgacggccccaagccggggcagtcccgattctgaatattcagcagctcgctgaagtttgtccctaaaggcaaagaaacttctgcctcccagggtcactaggcgggcagcccacacccaccccagacggccaccacactgaggccacacgttggccattccaccttggagttggaaccctgggcgtcgagacaggaaggcagggcgcagtggttgaaacatcaggacactcccaaggccccggctctgaacaagaccttttcgtttcttggaaaagagactcatttgctgatggttcatgccttctgctgggacaggcctgggctgtgcagccacactgtcggctgacttagccccctgctcactctaggtgcctccaggaggtgagccctgggtgcagctggtctctgaatgacgttacaccctcaccttcttttcctggccctgtctctggactctcccctgtgaggcccaattccaagacagactctcgtcctcaccgaagcttaggcccacatctcccaggctgcttaggagacagaatggaaacggaggccgcccctgccagccgccctggccctggtcactgcatgatccgctctggtcaaacccttccaggccagccagagtggggatggtctgtgacctgctgggaaggcaggctgatggggcacacccttggcctctcgtccacgaggggagaaacctaaaccctgtttcacaatctgtgcggaagtagcttgcctcacttctgcttaggaaagcggctgttgctccataactctaaccagcacagggctgaggcctgcagtgcacacctgcagggaggcccttcccaaggtgtggtgactgtgccttactgtacatgctcggaggcctggccatataggagggtgggtgatgctgaaatcaccccccatcttaagtaattactttctggagtaatcaggtggaaatccatagacaaatgaaacattcaaaaaaaaaaa

SEQ ID NO: 427813 - DNA, 1301 bp, Homo sapiens
gcggaagccgggattcgccctccggggagcgattggtcctcgggaggggcggggaggtggacgcgggtaccggcggtcgtcgggtcggcagcctttggtcagttggcagcggcaagcgcgctgcggttccggtggcgccatgtcgttctgcagcttcttcgggggcgaggttttccagaatcactttgaacctggcgtttacgtgtgtgccaagtgtggctatgagctgttctccagccgctcgaagtatgcacactcgtctccatggccggcgttcaccgagaccattcacgccgacagcgtggccaagcgtccggagcacaatagatctgaagccttgaaggtgtcctgtggcaagtgtggcaatgggttgggccacgagttcctgaacgacggccccaagccggggcagtcccgattctgaatattcagcagctcgctgaagtttgtccctaaaggcaaagaaacttctgcctcccagggtcactaggcgggcagcccacacccaccccagacggccaccacactgaggccacacgttgtcccaaggccccggctctgaacaagaccttttcgtttcttggaaaagagactcatttgctgatggttcatgccttctgctgggacaggcctgggctgtgcagccacactgtcggctgacttagccccctgctcactctaggtgcctccaggaggtgagccctgggtgcagctggtctctgaatgacgttacaccctcaccttcttttcctggccctgtctctggactctcccctgtgaggcccaattccaagacagactctcgtcctcaccgaagcttaggcccacatctcccaggctgcttaggagacagaatggaaacggaggccgcccctgccagccgccctggccctggtcactgcatgatccgctctggtcaaacccttccaggccagccagagtggggatggtctgtgacctgctgggaaggcaggctgatggggcacacccttggcctctcgtccacgaggggagaaacctaaaccctgtttcacaatctgtgcggaagtagcttgcctcacttctgcttaggaaagcggctgttgctccataactctaaccagcacagggctgaggcctgcagtgcacacctgcagggaggcccttcccaaggtgtggtgactgtgccttactgtacatgctcggaggcctggccatataggagggtgggtgatgctgaaatcaccccccatcttaagtaattactttctggagtaatcaggtggaaatccatagacaaatgaaacattcaaaaaaaaaaa

SEQ ID NO: 427814 - DNA, 1701 bp, Homo sapiens
cggcatgtacaattaaggcacaggtcaccacaccttgggaaggggcccttcccccctggaaagggtttgttgccattgcaaaggccctcaaggcccctgtcctgttaagacttatgggagcaacaagcccgctttcctaagccagaaattgaggccaacctaccttcccgcacagaattggtgaaacaggttataggtttcttcccctcgtgacgagagcccaagtggtgtgccccatcagcctaggcgcttcccaagcaggtcacaagaccatccccactctggctggcctggaaggctttgaccagagcggatcatgcagtgacccagggaccagggcggctggcaggggcggcctccgtttccattctgtctcctaagcaagcactgggagatgtgggcctaagcattcggtgaggagcgagagtctgtcattggaattgggcctcacaggggagagtacacagagacaggcgaccaggaaaagaagcgatgagggctagtaacgtgcacctcagagacacagctcgcacccagggctcacctcctggaggcacctagagtgagacagggggctaagtcagccgacagtgtggctgcacagcccaggcctgtcccagcagaaggcatgaaccatcagcaaatgaccgtgctcttattcacaagaaacgaaaaggtcttatgttccagagccggggcccttgggagtgtcctgatgtttcaaccactgcgccctgccttcctgtctcgacgcccagggttccaactccaaggtggaatgcgcaaagaaacttctgcctcccagggtcactaggcgggcagcccacacccaccccagacggccaccacactgaggccacacgttggccattccaccttggagttggaaccctgggcgtcgagacaggaaggcagggcgcagtggttgaaacatcaggacactcccaaggccccggctctgaacaagaccttttcgtttcttggaaaagagactcatttgctgatggttcatgccttctgctgggacaggcctgggctgtgcagccacactgtcggctgacttagccccctgctcactctaggtgcctccaggaggtgagccctgggtgcagctggtctctgaatgacgttacaccctcaccttcttttcctggccctgtctctggactctcccctgtgaggcccaattccaagacagactctcgtcctcaccgaagcttaggcccacatctcccaggctgcttaggagacagaatggaaacggaggccgcccctgccagccgccctggccctggtcactgcatgatccgctctggtcaaacccttccaggccagccagagtggggatggtctgtgacctgctgggaaggcaggctgatggggcacacccttggcctctcgtccacgaggggagaaacctaaaccctgtttcacaatctgtgcggaagtagcttgcctcacttctgcttaggaaagcggctgttgctccataactctaaccagcacagggctgaggcctgcagtgcacacctgcagggaggcccttcccaaggtgtggtgactgtgccttactgtacatgctcggaggcctggccatataggagggtgggtgatgctgaaatcaccccccatcttaagtaattactttctggagtaatcaggtggaaatccatagacaaatgaaacattcaaaaaaaaaaa

SEQ ID NO: 427815 - DNA, 1199 bp, Homo sapiens
cctggggaaggagcacagcctaccctcggaacgggggcagcgctgtctttgcctgggttggtggatttgggagcttgaccccggaaaggcgggagctgatgactccacatttgcctctccttccaccacaggcgtttacgtgtgtgccaagtgtggctatgagctgttctccagccgctcgaagtatgcacactcgtctccatggccggcgttcaccgagaccattcacgccgacagcgtggccaagcgtccggagcacaatagatctgaagccttgaaggcaaagaaacttctgcctcccagggtcactaggcgggcagcccacacccaccccagacggccaccacactgaggccacacgttggccattccaccttggagttggaaccctgggcgtcgagacaggaaggcagggcgcagtggttgaaacatcaggacactcccaaggccccggctctgaacaagaccttttcgtttcttggaaaagagactcatttgctgatggttcatgccttctgctgggacaggcctgggctgtgcagccacactgtcggctgacttagccccctgctcactctaggtgcctccaggaggtgagccctgggtgcagctggtctctgaatgacgttacaccctcaccttcttttcctggccctgtctctggactctcccctgtgaggcccaattccaagacagactctcgtcctcaccgaagcttaggcccacatctcccaggctgcttaggagacagaatggaaacggaggccgcccctgccagccgccctggccctggtcactgcatgatccgctctggtcaaacccttccaggccagccagagtggggatggtctgtgacctgctgggaaggcaggctgatggggcacacccttggcctctcgtccacgaggggagaaacctaaaccctgtttcacaatctgtgcggaagtagcttgcctcacttctgcttaggaaagcggctgttgctccataactctaaccagcacagggctgaggcctgcagtgcacacctgcagggaggcccttcccaaggtgtggtgactgtgccttactgtacatgctcggaggcctggccatataggagggtgggtgatgctgaaatcaccccccatcttaagtaattactttctggagtaatcaggtggaaatccatagacaaatgaaacattcaaaaaaaaaaa

SEQ ID NO: 427816 - DNA, 1199 bp, Homo sapiens
gcggaagccgggattcgccctccggggagcgattggtcctcgggaggggcggggaggtggacgcgggtaccggcggtcgtcgggtcggcagcctttggtcagttggcagcggcaagcgcgctgcggttccggtggcgccatgtcgttctgcagcttcttcgggggcgaggttttccagaatcactttgaacctggcgtttacgtgtgtgccaagtgtggctatgagctgttctccagccgctcgaagtatgcacactcgtctccatggccggcgttcaccgagaccattcacgccgacagcgtggccaagcgtccggagcacaatagatctgaagccttgaaggtgtcctgtggcaagtgtggcaatgggttgggccacgagttcctgaacgacggccccaagccggggcagtcccgattctgaatattcagcagctcgctgaagtttgtccctaaaggcaaagaaacttctgcctcccagggtcactaggcgggcagcccacacccaccccagacggccaccacactgaggccacacgttggccattccaccttggagttggaaccctgctcactctaggtgcctccaggaggtgagccctgggtgcagctggtctctgaatgacgttacaccctcaccttcttttcctggccctgtctctggactctcccctgtgaggcccaattccaagacagactctcgtcctcaccgaagcttaggcccacatctcccaggctgcttaggagacagaatggaaacggaggccgcccctgccagccgccctggccctggtcactgcatgatccgctctggtcaaacccttccaggccagccagagtggggatggtctgtgacctgctgggaaggcaggctgatggggcacacccttggcctctcgtccacgaggggagaaacctaaaccctgtttcacaatctgtgcggaagtagcttgcctcacttctgcttaggaaagcggctgttgctccataactctaaccagcacagggctgaggcctgcagtgcacacctgcagggaggcccttcccaaggtgtggtgactgtgccttactgtacatgctcggaggcctggccatataggagggtgggtgatgctgaaatcaccccccatcttaagtaattactttctggagtaatcaggtggaaatccatagacaaatgaaacattcaaaaaaaaaaa

SEQ ID NO: 427817 - DNA, 993 bp, Homo sapiens
gacagcgtgaatcggtctcgcgtgaacgccggccatcgcagacgagtgtgcatacttcgagcggctggagaacagctcatagccacacttggcacacacgtaaacgccaggttcacaacagatctgaagccttgaaggtgtcctgtggcaagtgtggcaatgggttgggccacgagttcctgaacgacggccccaagccggggcagtcccgattctgaatattcagcagctcgctgaagtttgtccctaaaggcaaagaaacttctgcctcccagggtcactaggcgggcagcccacacccaccccagacggccaccacactgaggccacacgttggccattccaccttggagttggaaccctgctcactctaggtgcctccaggaggtgagccctgggtgcagctggtctctgaatgacgttacaccctcaccttcttttcctggccctgtctctggactctcccctgtgaggcccaattccaagacagactctcgtcctcaccgaagcttaggcccacatctcccaggctgcttaggagacagaatggaaacggaggccgcccctgccagccgccctggccctggtcactgcatgatccgctctggtcaaacccttccaggccagccagagtggggatggtctgtgacctgctgggaaggcaggctgatggggcacacccttggcctctcgtccacgaggggagaaacctaaaccctgtttcacaatctgtgcggaagtagcttgcctcacttctgcttaggaaagcggctgttgctccataactctaaccagcacagggctgaggcctgcagtgcacacctgcagggaggcccttcccaaggtgtggtgactgtgccttactgtacatgctcggaggcctggccatataggagggtgggtgatgctgaaatcaccccccatcttaagtaattactttctggagtaatcaggtggaaatccatagacaaatgaaacattcaaaaaaaaaaa

SEQ ID NO: 427818 - DNA, 3000 bp, Homo sapiens
cagtccgttcgactgagcctccccaggattacaggcgtgaaccagcacgcccggtggagactcaattataaggggctcacagataacatctaattcttacagaggagtaaactgaggcacaagtaagcaggagagccgtgattagaaacctaggtctaactcacagcccgtgagctttcctccaagccccgaggcttccccttaaaaaagccagcaaggggcgagactcggagggcagaacccacggagggcggaacccacagaggacagagcccgcgctcgcgagcacggccttgtccgaccccccgtgccgccggaggagcaagtctgtcttggaatgaatgatcgtcggaacggagcttgatcaaaccactcagcagtaggcgtcgcccactttcttattggttggttttggttctcaagagtaggaaagttaggtagtccgcgaggggtctgcgagctttgcggagcctcgcccccgagcgcgcggtttccctgccgctcagtcgaacggaatcctaggcgcggatctcgcgtttccggccggaaggcttctccagcctttcccggaagctgcgctcgctacccgggtaacgggtcccggctgtggaagctcccgcggcgccgcgatggacctcgaggagtcggaagagtttaaagaacgctgtactcagtgtgctgctgtctcatggggtcttactgatgaaggcaaatattattgcacttcttgccacaatgttacagagagatatcaggaagttacaaacactgatcttattcctaatacccaaataaaagccctcaaccgggggcttaaaaaaaaaaacaatactgaaaaaggctgggattggtatgtgtgtgaaggtttccagtatattctttatcaacaagcagaagccttaaagaaccttggagtaggcccagagttaaagaacgatgttttacataatttttggaagcgctaccttcagaagagcaagcaggcatattgtaagaacccagtttataccactggaaggaaacctacggtattagaagataatctaagtcattcagactgggctagtgagcctgagctgctaagtgatgtcagctgtcctccttttcttgaaagtggagcggagtctcagtctgacatccacactcgaaaacctttccccgtcagcaaagcatcacaatcagaaacgtctgtctgctctggatctctggatggagttgaatactcacaacgaaaggagaagggaatcgtgaagatgaccatgccacagacacttgccttctgttatctgtccttactttggcagagagaagcaataacactttcagatcttttgaggtttgttgaagaggaccatattccttacataaatgcttttcagcattttccagaacagatgaaattatatggacgtgacagaggaatctttggtatagagtcttggcctgactacgaggacatctataaaaaaacaatagaagttggaacatttttagatttgcctcgttttccagacataactgaagactgctatcttcatcccaacatactgtgtatgaaatacttgatggaagtcaacctccctgatgaaatgcatagcttaacttgccacgtggtaaaaatgactggaatgggagaagtggattttctgacatttgatcctatagctaaaatggcaaaagctgttaagtacgatgtacaagctgtagctatcattgtggtggtattgaaactgctctttctattggatgacagtttcgagtggtctttgtctaatcttgctgaaaagcataatgaaaagaacaaaaaagataagccatggtttgatttcagaaagtggtaccaaattatgaagaaagcttttgatgagaaaaaacaaaaatgggaagaagcaagggccaagtacctgtggaaaagtgaaaagccactctactactcatttgtcgacaaaccagtagcatataaaaaaagagaaatggtggtgaatctacagaaacaatttagcacactggtcgagtcaacagcaactgctggaaaaaaaagcccttcaagttttcagttcaactggactgaagaggacactgatagaacgtgtttccatggacacagccttcagggagtcctgaaagagaaaggccaatcactgctgactaagaattcattatattggcttagtacacagaaattctgcagatggtaataatgcttttagaaaaagtcacatataattgaagtagttgactgtataagagccagataggttttttgttggaattagaagctggtgagcttaaagtcacgaaaatcagaattatacattgagtcttgtgtaggagttctaggaaagctggtaaaaatcaagaaagaggatacagggcaattagcacaaactatcccctctagctaaattaacctgcagtgtggcaggcaagcaatagaagtggctgtaaatgctgatcaggagaatgtgctgtattttttagtacatatcacttctctgagtcagttacctttatcatgtctttctacctcttaatacttccttaagtatttcctaaaaataaggatattctcttaagtgaccacagtacagttatcaaactcaggaaacttaatactgatacgatacctttatctcacccacagtccatattccaattttctcattagacccccagtgtccttttatagcaggatcaagttcaggagtaggtatggcattgattgattttatctcttcggtctcctttaatctgattgtccctcagcctttctttgtctttcatgacattgagctgtatttttcagaaatgtcagtgatgttacacaatgtttctgagtatggttgtgatggttcctcatgtttagattcaggttctgcatccctggccaaaacaagtgccgtgtcctcctcagggtatcatttctcagggtatggcgtctgtagactggggcggggggcggggggtccatttgcccctcaggtgttaatagtgatcacc

SEQ ID NO: 427819 - DNA, 1036 bp, Homo sapiens
cagtccgttcgactgagcctccccaggattacaggcgtgaaccagcacgcccggtggagactcaattataaggggctcacagataacatctaattcttacagaggagtaaactgaggcacaagtaagcaggagagccgtgattagaaacctaggtctaactcacagcccgtgagctttcctccaagccccgaggcttccccttaaaaaagccagcaaggggcgagactcggagggcagaacccacggagggcggaacccacagaggacagagcccgcgctcgcgagcacggccttgtccgaccccccgtgccgccggaggagcaagtctgtcttggaatgaatgatcgtcggaacggagcttgatcaaaccactcagcagtaggcgtcgcccactttcttattggttggttttggttctcaagagtaggaaagttaggtagtccgcgaggggtctgcgagctttgcggagcctcgcccccgagcgcgcggtttccctgccgctcagtcgaacggaatcctaggcgcggatctcgcgtttccggccggaaggcttctccagcctttcccggaagctgcgctcgctacccgggtaacgggtcccggctgtggaagctcccgcggcgccgcgatggacctcgaggagtcggaagagtttaaagaacgctgtactcagtgtgctgctgtctcatggggtcttactgatgaaggcaaatattattgcacttcttgccacaatgttacagagagatatcaggaagttacaaacactgatcttattcctaatacccaaataaaagccctcaaccgggggcttaaaaaaaaaaacaatactgaaaaaggctgggattggtatgtgtgtgaaggtttccagtatattctttatcaacaagcagaagccttaaagaaccttggagtaggcccagagttaaaggaacgatgttttacataatttttggaagcgctaccttcctaccggtttagaacataatctgccattcagactgggctagggaccctgacctgctaccgatgtcc

SEQ ID NO: 427820 - DNA, 620 bp, Homo sapiens
ccgcatgcgcgcgcggctttggtaaagaggctggagtttctggctcggcgaggggcaggggtctcgctatgttgtccagactggtattgaactcctgggctcaggcgatcttcctgcctcagcctcgcaaagtgctgggattataggggtgatcccccgccctcggccaaatggcacacgctttgatggaagagtttaaagaacgctgtactcagtgtgctgctgtctcatggggtcttactgatgaaggcaaatattattgcacttcttgccacaatgttacagagagatatcaggaagttacaaacactgatcttattcctaatacccaaataaaagccctcaaccgggggcttaaaaaaaaaaacaatactgaaaaaggctgggattggtatgtgtgtgaaggtttccagtatattctttatcaacaagcagaagccttaaagaaccttggagtaggcccagagttaaagggaatgtcctgtgtgttattcacaatttgagaacaaaatcgtttggtgtatgtacataacgtccatcaggacttgagttccacagaatgcactttggacagcgatatgctaaaccagtcgttcacctgagtgcatcagaatcacctg

SEQ ID NO: 427821 - DNA, 635 bp, Homo sapiens
atatacaggatgctcagccagcacaaagctgtggtgagattgggcccaagtctccgactccagattccaaaccacattaaaaaaaaaaaaatcacctgcagactgcctatagctttaacagtctctgtctccccttcttcacatccttccggtggagaaaagttggtgaatattaagtaaatttgattcaatagactttttattttttggtaaagatgatggggtcttgctatgctgctcaggatggtcttgaactcgtgacctcaggtgatcctcccacctctgtctcccaaagtgctggagtacagtggtgtgaccttggctcactgcagctttgactccctggctcaaatgctcctcctgagcctgactagctgagaccacaggcatgtgccatcatatccagctaaattttttattttttgtagagacagaggtctcagtatgttgcctaggctagtcttgaaattctcggctcaagtgatcctcccacctcagcctcccaaagtgctgggattacaggtatgagccaccacgcctggctgactacaacttttaatattttttaatttttgcaactttttttttttttttgagacagagtctcactctgtcgcccaggctggagtgcagtg

SEQ ID NO: 427822 - DNA, 3617 bp, Homo sapiens
cagtccgttcgactgagcctccccaggattacaggcgtgaaccagcacgcccggtggagactcaattataaggggctcacagataacatctaattcttacagaggagtaaactgaggcacaagtaagcaggagagccgtgattagaaacctaggtctaactcacagcccgtgagctttcctccaagccccgaggcttccccttaaaaaagccagcaaggggcgagactcggagggcagaacccacggagggcggaacccacagaggacagagcccgcgctcgcgagcacggccttgtccgaccccccgtgccgccggaggagcaagtctgtcttggaatgaatgatcgtcggaacggagcttgatcaaaccactcagcagtaggcgtcgcccactttcttattggttggttttggttctcaagagtaggaaagttaggtagtccgcgaggggtctgcgagctttgcggagcctcgcccccgagcgcgcggtttccctgccgctcagtcgaacggaatcctaggcgcggatctcgcgtttccggccggaaggcttctccagcctttcccggaagctgcgctcgctacccgggtaacgggtcccggctgtggaagctcccgcggcgccgcgatggacctcgaggagtcggaagagtttaaagaacgctgtactcagtgtgctgctgtctcatggggtcttactgatgaaggcaaatattattgcacttcttgccacaatgttacagagagatatcaggaagttacaaacactgatcttattcctaatacccaaataaaagccctcaaccgggggcttaaaaaaaaaaacaatactgaaaaaggctgggattggtatgtgtgtgaaggtttccagtatattctttatcaacaagcagaagccttaaagaaccttggagtaggcccagagttaaagaacgatgttttacataatttttggaagcgctaccttcagaagagcaagcaggcatattgtaagaacccagtttataccactggaaggaaacctacggtattagaagataatctaagtcattcagactgggctagtgagcctgagctgctaagtgatgtcagctgtcctccttttcttgaaagtggagcggagtctcagtctgacatccacactcgaaaacctttccccgtcagcaaagcatcacaatcagaaacgtctgtctgctctggatctctggatggagttgaatactcacaacgaaaggagaagggaatcgtgaagatgaccatgccacagacacttgccttctgttatctgtccttactttggcagagagaagcaataacactttcagatcttttgaggtttgttgaagaggaccatattccttacataaatgcttttcagcattttccagaacagatgaaattatatggacgtgacagaggaatctttggtatagagtcttggcctgactacgaggacatctataaaaaaacaatagaagttggaacatttttagatttgcctcgttttccagacataactgaagactgctatcttcatcccaacatactgtgtatgaaatacttgatggaagtcaacctccctgatgaaatgcatagcttaacttgccacgtggtaaaaatgactggaatgggagaagtggattttctgacatttgatcctatagctaaaatggcaaaagctgttaagtacgatgtacaagctgtagctatcattgtggtggtattgaaactgctctttctattggatgacagtttcgagtggtctttgtctaatcttgctgaaaagcataatgaaaagaacaaaaaagataagccatggtttgatttcagaaagtggtaccaaattatgaagaaagcttttgatgagaaaaaacaaaaatgggaagaagcaagggccaagtacctgtggaaaagtgaaaagccactctactactcatttgtcgacaaaccagtagcatataaaaaaagagaaatggtggtgaatctacagaaacaatttagcacactggtcgagtcaacagcaactgctggaaaaaaaagcccttcaagttttcagttcaactggactgaagaggacactgatagaacgtgtttccatggacacagccttcagggagtcctgaaagagaaaggccaatcactgctgactaagaattcattatattggcttagtacacagaaattctgcagatgctattgtacacatgtgacaacctatgaagaatcaaattattctctgagttatcagtttatactaaatctcttctccttcctgctcagaataaagacttcccttctccatgaagaagtgagcttagttgagaagaaactttttgagaaaaaatacagtgtaaaaagaaagaaatcaagatccaagaaagtgagacgacattgagaaaatgaaatagaaactttctggaaaaatattttaatagtgataataacatcagattttaatataacattccagagaattgtggaaaatactgcatatatatgtatagactctgacacatatttacatatatatcaagtgtgcttagaaaaatgtatattatgatggggtcttgctatgctgctcaggatggtcttgaactcgtgacctcaggtgatcctcccacctctgtctcccaaagtgctggaattacagatgtgagccactgcgcccagcctggtttggtagtttcttaaaagtgaaaattagacctaccatgtgacccagccattccactactaggtgtctacccaagaaaaataaaagcatgtttccacacaaagacttgtatacaaatattcatagcaactttatttggaatagcaaaaaaaagggaaaacaacccaaacagccatcagcaggtgaatggataaacacatggtggatatccatacaatgaaacactgctcagctgtgaaaaaggaacaaactattgaaacaatatccctgttcaggagcaggatttggagaatataagaagcatatcttttataatttaaaaacttgctttctaagatttgaactgaaagatcttttttgaagatgagtgtcatggaattgacatgatttgaagtgttatggcacttcctttgaataaaaaaatcaaagttgctaacaagttccatgtacttaaaaatattgggacagagcgctcaaagctatgaaaagttttgggccacccatgaatatgagataagattaacaagagaggagaaggaagtgaaaaatatggctttccatgcatttccaattgtatgaattaccattgaaggctagtgatgaaatgttactctctaggagtcagtgttttcacatctaaaaatggtatcagtcatagaaaaagcttatctgtctactgccaaaaagggaagagggtaatagcacgtattgagcacctactgtatattcagatgaggtcctgccatacgaaattcagtccccactgttctgggggccatgcaatcgtctttagataataggtgtggggctaggggttccgctgtgaagttaccttccttcccagggtgctcagccagcacaaagctgtggtgagatttgggtccaggtctcagactccagattccaaaccacatttaaaaaaataaaatcatcacctgcaga

SEQ ID NO: 427823 - DNA, 3792 bp, Homo sapiens
cagtccgttcgactgagcctccccaggattacaggcgtgaaccagcacgcccggtggagactcaattataaggggctcacagataacatctaattcttacagaggagtaaactgaggcacaagtaagcaggagagccgtgattagaaacctaggtctaactcacagcccgtgagctttcctccaagccccgaggcttccccttaaaaaagccagcaaggggcgagactcggagggcagaacccacggagggcggaacccacagaggacagagcccgcgctcgcgagcacggccttgtccgaccccccgtgccgccggaggagcaagtctgtcttggaatgaatgatcgtcggaacggagcttgatcaaaccactcagcagtaggcgtcgcccactttcttattggttggttttggttctcaagagtaggaaagttaggtagtccgcgaggggtctgcgagctttgcggagcctcgcccccgagcgcgcggtttccctgccgctcagtcgaacggaatcctaggcgcggatctcgcgtttccggccggaaggcttctccagcctttcccggaagctgcgctcgctacccgggtaacgggtcccggctgtggaagctcccgcggcgccgcgatggacctcgaggagtcggaagagtttaaagaacgctgtactcagtgtgctgctgtctcatggggtcttactgatgaaggcaaatattattgcacttcttgccacaatgttacagagagatatcaggaagttacaaacactgatcttattcctaatacccaaataaaagccctcaaccgggggcttaaaaaaaaaaacaatactgaaaaaggctgggattggtatgtgtgtgaaggtttccagtatattctttatcaacaagcagaagccttaaagaaccttggagtaggcccagagttaaagaacgatgttttacataatttttggaagcgctaccttcagaagagcaagcaggcatattgtaagaacccagtttataccactggaaggaaacctacggtattagaagataatctaagtcattcagactgggctagtgagcctgagctgctaagtgatgtcagctgtcctccttttcttgaaagtggagcggagtctcagtctgacatccacactcgaaaacctttccccgtcagcaaagcatcacaatcagaaacgtctgtctgctctggatctctggatggagttgaatactcacaacgaaaggagaagggaatcgtgaagatgaccatgccacagacacttgccttctgttatctgtccttactttggcagagagaagcaataacactttcagatcttttgaggtttgttgaagaggaccatattccttacataaatgcttttcagcattttccagaacagatgaaattatatggacgtgacagaggaatctttggtatagagtcttggcctgactacgaggacatctataaaaaaacaatagaagttggaacatttttagatttgcctcgttttccagacataactgaagactgctatcttcatcccaacatactgtgtatgaaatacttgatggaagtcaacctccctgatgaaatgcatagcttaacttgccacgtggtaaaaatgactggaatgggagaagtggattttctgacatttgatcctatagctaaaatggcaaaagctgttaagtacgatgtacaagctgtagctatcattgtggtggtattgaaactgctctttctattggatgacagtttcgagtggtctttgtctaatcttgctgaaaagcataatgaaaagaacaaaaaagataagccatggtttgatttcagaaagtggtaccaaattatgaagaaagcttttgatgagaaaaaacaaaaatgggaagaagcaagggccaagtacctgtggaaaagtgaaaagccactctactactcatttgtcgacaaaccagtagcatataaaaaaagagaaatggtggtgaatctacagaaacaatttagcacactggtcgagtcaacagcaactgctggaaaaaaaagcccttcaagttttcagttcaactggactgaagaggacactgatagaacgtgtttccatggacacagccttcagggagtcctgaaagagaaaggccaatcactgctgactaagaattcattatattggcttagtacacagaaattctgcagatgctattgtacacatgtgacaacctatgaagaatcaaattattctctgagttatcagtttatactaaatctcttctccttcctgctcagaataaagacttcccttctccatgaagaagtgagcttagttgagaagaaactttttgagaaaaaatacagtgtaaaaagaaagaaatcaagatccaagaaagtgagacgacattgagaaaatgaaatagaaactttctggaaaaatattttaatagtgataataacatcagattttaatataacattccagagaattgtggaaaatactgcatatatatgtatagactctgacacatatttacatatatatcaagtgtgcttagaaaaatgtatattatgatggggtcttgctatgctgctcaggatggtcttgaactcgtgacctcaggtgatcctcccacctctgtctcccaaagtgctggaattacagatgtgagccactgcgcccagcctggtttggtagtttcttaaaagtgaaaattagacctaccatgtgacccagccattccactactaggtgtctacccaagaaaaataaaagcatgtttccacacaaagacttgtatacaaatattcatagcaactttatttggaatagcaaaaaaaagggaaaacaacccaaacagccatcagcaggtgaatggataaacacatggtggatatccatacaatgaaacactgctcagctgtgaaaaaggaacaaactattgaaacaatatccctgttcaggagcaggatttggagaatataagaagcatatcttttataatttaaaaacttgctttctaagatttgaactgaaagatcttttttgaagatgagtgtcatggaattgacatgatttgaagtgttatggcacttcctttgaataaaaaaatcaaagttgctaacaagttccatgtacttaaaaatattgggacagagcgctcaaagctatgaaaagttttgggccacccatgaatatgagataagattaacaagagaggagaaggaagtgaaaaatatggctttccatgcatttccaattgtatgaattaccattgaaggctagtgatgaaatgttactctctaggagtcagtgttttcacatctaaaaatggtatcagtcatagaaaaagcttatctgtctactgccaaaaagggaagagggtaatagcacgtattgagcacctactgtatattcagatgaggtcctgccatacgaaattcagtccccactgttctgggggccatgcaatcgtctttagataataggtgtggggctaggggttccgctgtgaagttaccttccttcccagggtgctcagccagcacaaagctgtggtgagatttgggtccaggtctcagactccagattccaaaccacatttaaaaaaataaaatcatcacctgcagactgcctatagctttgacagtctctgtgtctccctttcgtttgcatccttcgggtggagaaaggtttatgaatattttagtaaatttgattcaaaagacatttcttgattatcacattggttctcaaagtgtggtccctggaccagtgacatcagcattacctgggcactcattag

SEQ ID NO: 427824 - DNA, 2920 bp, Homo sapiens
cagtccgttcgactgagcctccccaggattacaggcgtgaaccagcacgcccggtggagactcaattataaggggctcacagataacatctaattcttacagaggagtaaactgaggcacaagtaagcaggagagccgtgattagaaacctaggtctaactcacagcccgtgagctttcctccaagccccgaggcttccccttaaaaaagccagcaaggggcgagactcggagggcagaacccacggagggcggaacccacagaggacagagcccgcgctcgcgagcacggccttgtccgaccccccgtgccgccggaggagcaagtctgtcttggaatgaatgatcgtcggaacggagcttgatcaaaccactcagcagtaggcgtcgcccactttcttattggttggttttggttctcaagagtaggaaagttaggtagtccgcgaggggtctgcgagctttgcggagcctcgcccccgagcgcgcggtttccctgccgctcagtcgaacggaatcctaggcgcggatctcgcgtttccggccggaaggcttctccagcctttcccggaagctgcgctcgctacccgggtaacgggtcccggctgtggaagctcccgcggcgccgcgatggacctcgaggagtcggaagagtttaaagaacgctgtactcagtgtgctgctgtctcatggggtcttactgatgaaggcaaatattattgcacttcttgccacaatgttacagagagatatcaggaagttacaaacactgatcttattcctaatacccaaataaaagccctcaaccgggggcttaaaaaaaaaaacaatactgaaaaaggctgggattggtatgtgtgtgaaggtttccagtatattctttatcaacaagcagaagccttaaagaaccttggagtaggcccagagttaaagaacgatgttttacataatttttggaagcgctaccttcagaagagcaagcaggcatattgtaagaacccagtttataccactggaaggaaacctacggtattagaagataatctaagtcattcagactgggctagtgagcctgagctgctaagtgatgtcagctgtcctccttttcttgaaagtggagcggagtctcagtctgacatccacactcgaaaacctttccccgtcagcaaagcatcacaatcagaaacgtctgtctgctctggatctctggatggagttgaatactcacaacgaaaggagaagggaatcgtgaagatgaccatgccacagacacttgccttctgttatctgtccttactttggcagagagaagcaataacactttcagatcttttgaggtttgttgaagaggaccatattccttacataaatgcttttcagcattttccagaacagatgaaattatatggacgtgacagaggaatctttggtatagagtcttggcctgactacgaggacatctataaaaaaacaatagaagttggaacatttttagatttgcctcgttttccagacataactgaagactgctatcttcatcccaacatactgtgtatgaaatacttgatggaagtcaacctccctgatgaaatgcatagcttaacttgccacgtggtaaaaatgactggaatgggagaagtggattttctgacatttgatcctatagctaaaatggcaaaagctgttaagtacgatgtacaagctgtagctatcattgtggtggtattgaaactgctctttctattggatgacagtttcgagtggtctttgtctaatcttgctgaaaagcataatgaaaagaacaaaaaagataagccatggtttgatttcagaaagtggtaccaaattatgaagaaagcttttgatgagaaaaaacaaaaatgggaagaagcaagggccaagtacctgtggaaaagtgaaaagccactctactactcatttgtcgacaaaccagtagcatataaaaaaagagaaatggtggtgaatctacagaaacaatttagcacactggtcgagtcaacagcaactgctggaaaaaaaagcccttcaagttttcagttcaactggactgaagaggacactgatagaacgtgtttccatggacacagccttcagggagtcctgaaagagaaaggccaatcactgctgactaagaattcattatattggcttagtacacagaaattctgcagatgctattgtacacatgtgacaacctatgaagaatcaaattattctctgagttatcagtttatactaaatctcttctccttcctgctcagaataaagacttcccttctccatgaagaagtgagcttagttgagaagaaactttttgagaaaaaatacagtgtaaaaagaaagaaatcaagatccaagaaagtgagacgacattgagaaaatgaaatagaaactttctggaaaaatattttaatagtgataataacatcagattttaatataacattccagagaattgtggaaaatactgcatatatatgtatagactctgacacatatttacatatatatcaagtgtgcttagaaaaatgtatattgtaaagcaggtgagcttcatttgattttatttttcagagtatgaacattctaagagaaagttaaaacaatagcaaattgtataattgtatccagaaatgtatactcatcgtattttaaagctaaatttattttttaaactagatcccttcattattctttatgccccagagtaaatcccagatggatcaaagatctaaacataatctttcatatgtaaaaatataaaagtattagtagaaaacaaatatgaatgctttgatgatcttggaatggcaaagtcaatttttgcagcatatggtggacaaagaaataatttctttaatgtatcaatagctcttgcaaagcaaaaggaaaaaagcaaa

SEQ ID NO: 427825 - DNA, 3463 bp, Homo sapiens
cagtccgttcgactgagcctccccaggattacaggcgtgaaccagcacgcccggtggagactcaattataaggggctcacagataacatctaattcttacagaggagtaaactgaggcacaagtaagcaggagagccgtgattagaaacctaggtctaactcacagcccgtgagctttcctccaagccccgaggcttccccttaaaaaagccagcaaggggcgagactcggagggcagaacccacggagggcggaacccacagaggacagagcccgcgctcgcgagcacggccttgtccgaccccccgtgccgccggaggagcaagtctgtcttggaatgaatgatcgtcggaacggagcttgatcaaaccactcagcagtaggcgtcgcccactttcttattggttggttttggttctcaagagtaggaaagttaggtagtccgcgaggggtctgcgagctttgcggagcctcgcccccgagcgcgcggtttccctgccgctcagtcgaacggaatcctaggcgcggatctcgcgtttccggccggaaggcttctccagcctttcccggaagctgcgctcgctacccgggtaacgggtcccggctgtggaagctcccgcggcgccgcgatggacctcgaggagtcggaagagtttaaagaacgctgtactcagtgtgctgctgtctcatggggtcttactgatgaaggcaaatattattgcacttcttgccacaatgttacagagagatatcaggaagttacaaacactgatcttattcctaatacccaaataaaagccctcaaccgggggcttaaaaaaaaaaacaatactgaaaaaggctgggattggtatgtgtgtgaaggtttccagtatattctttatcaacaagcagaagccttaaagaaccttggagtaggcccagagttaaagaacgatgttttacataatttttggaagcgctaccttcagaagagcaagcaggcatattgtaagaacccagtttataccactggaaggaaacctacggtattagaagataatctaagtcattcagactgggctagtgagcctgagctgctaagtgatgtcagctgtcctccttttcttgaaagtggagcggagtctcagtctgacatccacactcgaaaacctttccccgtcagcaaagcatcacaatcaggtttgttgaagaggaccatattccttacataaatgcttttcagcattttccagaacagatgaaattatatggacgtgacagaggaatctttggtatagagtcttggcctgactacgaggacatctataaaaaaacaatagaagttggaacatttttagatttgcctcgttttccagacataactgaagactgctatcttcatcccaacatactgtgtatgaaatacttgatggaagtcaacctccctgatgaaatgcatagcttaacttgccacgtggtaaaaatgactggaatgggagaagtggattttctgacatttgatcctatagctaaaatggcaaaagctgttaagtacgatgtacaagctgtagctatcattgtggtggtattgaaactgctctttctattggatgacagtttcgagtggtctttgtctaatcttgctgaaaagcataatgaaaagaacaaaaaagataagccatggtttgatttcagaaagtggtaccaaattatgaagaaagcttttgatgagaaaaaacaaaaatgggaagaagcaagggccaagtacctgtggaaaagtgaaaagccactctactactcatttgtcgacaaaccagtagcatataaaaaaagagaaatggtggtgaatctacagaaacaatttagcacactggtcgagtcaacagcaactgctggaaaaaaaagcccttcaagttttcagttcaactggactgaagaggacactgatagaacgtgtttccatggacacagccttcagggagtcctgaaagagaaaggccaatcactgctgactaagaattcattatattggcttagtacacagaaattctgcagatgctattgtacacatgtgacaacctatgaagaatcaaattattctctgagttatcagtttatactaaatctcttctccttcctgctcagaataaagacttcccttctccatgaagaagtgagcttagttgagaagaaactttttgagaaaaaatacagtgtaaaaagaaagaaatcaagatccaagaaagtgagacgacattgagaaaatgaaatagaaactttctggaaaaatattttaatagtgataataacatcagattttaatataacattccagagaattgtggaaaatactgcatatatatgtatagactctgacacatatttacatatatatcaagtgtgcttagaaaaatgtatattatgatggggtcttgctatgctgctcaggatggtcttgaactcgtgacctcaggtgatcctcccacctctgtctcccaaagtgctggaattacagatgtgagccactgcgcccagcctggtttggtagtttcttaaaagtgaaaattagacctaccatgtgacccagccattccactactaggtgtctacccaagaaaaataaaagcatgtttccacacaaagacttgtatacaaatattcatagcaactttatttggaatagcaaaaaaaagggaaaacaacccaaacagccatcagcaggtgaatggataaacacatggtggatatccatacaatgaaacactgctcagctgtgaaaaaggaacaaactattgaaacaatatccctgttcaggagcaggatttggagaatataagaagcatatcttttataatttaaaaacttgctttctaagatttgaactgaaagatcttttttgaagatgagtgtcatggaattgacatgatttgaagtgttatggcacttcctttgaataaaaaaatcaaagttgctaacaagttccatgtacttaaaaatattgggacagagcgctcaaagctatgaaaagttttgggccacccatgaatatgagataagattaacaagagaggagaaggaagtgaaaaatatggctttccatgcatttccaattgtatgaattaccattgaaggctagtgatgaaatgttactctctaggagtcagtgttttcacatctaaaaatggtatcagtcatagaaaaagcttatctgtctactgccaaaaagggaagagggtaatagcacgtattgagcacctactgtatattcagatgaggtcctgccatacgaaattcagtccccactgttctgggggccatgcaatcgtctttagataataggtgtggggctaggggttccgctgtgaagttaccttccttcccagggtgctcagccagcacaaagctgtggtgagatttgggtccaggtctcagactccagattccaaaccacatttaaaaaaataaaatcatcacctgcaga

SEQ ID NO: 427826 - DNA, 2371 bp, Homo sapiens
cagtccgttcgactgagcctccccaggattacaggcgtgaaccagcacgcccggtggagactcaattataaggggctcacagataacatctaattcttacagaggagtaaactgaggcacaagtaagcaggagagccgtgattagaaacctaggtctaactcacagcccgtgagctttcctccaagccccgaggcttccccttaaaaaagccagcaaggggcgagactcggagggcagaacccacggagggcggaacccacagaggacagagcccgcgctcgcgagcacggccttgtccgaccccccgtgccgccggaggagcaagtctgtcttggaatgaatgatcgtcggaacggagcttgatcaaaccactcagcagtaggcgtcgcccactttcttattggttggttttggttctcaagagtaggaaagttaggtagtccgcgaggggtctgcgagctttgcggagcctcgcccccgagcgcgcggtttccctgccgctcagtcgaacggaatcctaggcgcggatctcgcgtttccggccggaaggcttctccagcctttcccggaagctgcgctcgctacccgggtaacgggtcccggctgtggaagctcccgcggcgccgcgatggacctcgaggagtcggaagagtttaaagaacgctgtactcagtgtgctgctgtctcatggggtcttactgatgaaggcaaatattattgcacttcttgccacaatgttacagagagatatcaggaagttacaaacactgatcttattcctaatacccaaataaaagccctcaaccgggggcttaaaaaaaaaaacaatactgaaaaaggctgggattggtatgtgtgtgaaggtttccagtatattctttatcaacaagcagaagccttaaagaaccttggagtaggcccagagttaaagaacgatgttttacataatttttggaagcgctaccttcagaagagcaagcaggcatattgtaagaacccagtttataccactggaaggaaacctacggtattagaagataatctaagtcattcagactgggctagtgagcctgagctgctaagtgatgtcagctgtcctccttttcttgaaagtggagcggagtctcagtctgacatccacactcgaaaacctttccccgtcagcaaagcatcacaatcagaaacgtctgtctgctctggatctctggatggagttgaatactcacaacgaaaggagaagggaatcgtgaagatgaccatgccacagacacttgccttctgttatctgtccttactttggcagagagaagcaataacactttcagatcttttgaggtttgttgaagaggaccatattccttacataaatgcttttcagcattttccagaacagatgaaattatatggacgtgacagaggaatctttggtatagagtcttggcctgactacgaggacatctataaaaaaacaatagaagttggaacatttttagatttgcctcgttttccagacataactgaagactgctatcttcatcccaacatactgtgtatgaaatacttgatggaagtcaacctccctgatgaaatgcatagcttaacttgccacgtggtaaaaatgactggaatgggagaagtggattttctgacatttgatcctatagctaaaatggcaaaagctgttaagtacgatgtacaagctgtagctatcattgtggtggtattgaaactgctctttctattggatgacagtttcgagtggtctttgtctaatcttgctgaaaagcataatgaaaagaacaaaaaagataagccatggtttgatttcagaaagtggtaccaaattatgaagaaagcttttgatgagaaaaaacaaaaatgggaagaagcaagggccaagtatgttctccttcctggtttagatgcacctgccttacttctgtgtctgttactttacatttgaaagctgaagcttcatcagtatacacttatctacattgtgacttttttttctggaaatattagccctacactctaattaacttttctcttttttacattactattaatcaaagtttagatttgatgtggatttcaccagtgtttttattaatgtcctctttctgttccatgatccaatgcaggataccacagtatactttttataatttaactttttataatttgcatgagacttgcctatatttctaatactcctccctcttcccctttctcaaatttagtcatttctcatctatgcttcccaatattaaaaagattacaaatgttaccttgcaacatatgtaattggaatgttcccccaaaataaagatccctgtgaaaattaaaacaaaggaaagcagatagcaa

SEQ ID NO: 427827 - DNA, 1334 bp, Homo sapiens
ccgtgcccagcctaatttttgtaactttttataatgagacttacacagtgatttaaattatatacaggatgctcagccagcacaaagctgtggtgagatttgggcccaagtctccgactccagattccaaaccacattaaaaaaaaaaaatcacctgcagactgcctatagctttaacagtctctgtctccccttcttcacatccttccggtggagaaaagtttgtgaatattaagtaaatttgattcaatagacattttatttttttgtaaagatgatggggtcttgctatgctgctcaggatggtcttgaactcgtgacctcaggtgatcctcccacctctgtctcccaaagtgctggaattacagatgtgagccactgcgcccagcctggtttggtagtttcttaaaagtgaaaattagacctaccatgtgacccagccattccactactaggtgtctacccaagaaaaataaaagcatgtttccacacaaagacttgtatacaaatattcatagcaactttatttggaatagcaaaaaaaagggaaaacaacccaaacagccatcagcaggtgaatggataaacacatggtggatatccatacaatgaaacactgctcagctgtgaaaaaggaacaaactattgaaacaatatccctgttcaggagcaggatttggagaatataagaagcatatcttttataatttaaaaacttgctttctaagatttgaactgaaagatcttttttgaagatgagtgtcatggaattgacatgatttgaagtgttatggcacttcctttgaataaaaaaatcaaagttgctaacaagttccatgtacttaaaaatattgggacagagcgctcaaagctatgaaaagttttgggccacccatgaatatgagataagattaacaagagaggagaaggaagtgaaaaatatggctttccatgcatttccaattgtatgaattaccattgaaggctagtgatgaaatgttactctctaggagtcagtgttttcacatctaaaaatggtatcagtcatagaaaaagcttatctgtctactgccaaaaagggaagagggtaatagcacgtattgagcacctactgtatattcagatgaggtcctgccatacgaaattcagtccccactgttctgggggccatgcaatcgtctttagataataggtgtggggctaggggttccgctgtgaagttaccttccttcccagggtgctcagccagcacaaagctgtggtgagatttgggtccaggtctcagactccagattccaaaccacatttaaaaaaataaaatcatcacctgcaga

SEQ ID NO: 427828 - DNA, 1799 bp, Homo sapiens
aaatctcagatagtgcttcagacaatgtgtttatgtccgtttcatctccgtcctgctccagctgtttctttaccttgtacaggtacctgtggaaaagtgaaaagccactctactactcatttgtcgacaaaccagtagcatataaaaaaagagaaatggtggtgaatctacagaaacaatttagcacactggtcgagtcaacagcaactgctggaaaaaaaagcccttcaagttttcagttcaactggactgaagaggacactgatagaacgtgtttccatggacacagccttcagggagtcctgaaagagaaaggccaatcactgctgactaagaattcattatattggcttagtacacagaaattctgcagatgctattgtacacatgtgacaacctatgaagaatcaaattattctctgagttatcagtttatactaaatctcttctccttcctgctcagaataaagacttcccttctccatgaagaagtgagcttagttgagaagaaactttttgagaaaaaatacagtgtaaaaagaaagaaatcaagatccaagaaagtgagacgacattgagaaaatgaaatagaaactttctggaaaaatattttaatagtgataataacatcagattttaatataacattccagagaattgtggaaaatactgcatatatatgtatagactctgacacatatttacatatatatcaagtgtgcttagaaaaatgtatattatgatggggtcttgctatgctgctcaggatggtcttgaactcgtgacctcaggtgatcctcccacctctgtctcccaaagtgctggaattacagatgtgagccactgcgcccagcctggtttggtagtttcttaaaagtgaaaattagacctaccatgtgacccagccattccactactaggtgtctacccaagaaaaataaaagcatgtttccacacaaagacttgtatacaaatattcatagcaactttatttggaatagcaaaaaaaagggaaaacaacccaaacagccatcagcaggtgaatggataaacacatggtggatatccatacaatgaaacactgctcagctgtgaaaaaggaacaaactattgaaacaatatccctgttcaggagcaggatttggagaatataagaagcatatcttttataatttaaaaacttgctttctaagatttgaactgaaagatcttttttgaagatgagtgtcatggaattgacatgatttgaagtgttatggcacttcctttgaataaaaaaatcaaagttgctaacaagttccatgtacttaaaaatattgggacagagcgctcaaagctatgaaaagttttgggccacccatgaatatgagataagattaacaagagaggagaaggaagtgaaaaatatggctttccatgcatttccaattgtatgaattaccattgaaggctagtgatgaaatgttactctctaggagtcagtgttttcacatctaaaaatggtatcagtcatagaaaaagcttatctgtctactgccaaaaagggaagagggtaatagcacgtattgagcacctactgtatattcagatgaggtcctgccatacgaaattcagtccccactgttctgggggccatgcaatcgtctttagataataggtgtggggctaggggttccgctgtgaagttaccttccttcccagggtgctcagccagcacaaagctgtggtgagatttgggtccaggtctcagactccagattccaaaccacatttaaaaaaataaaatcatcacctgcaga

SEQ ID NO: 427829 - DNA, 1772 bp, Homo sapiens
ttttatttgtttatatgtaatgaatatgaaataaaaaaaaataccaacaaacaaggtacctgtggaaaagtgaaaagccactctactactcatttgtcgacaaaccagtagcatataaaaaaagagaaatggtggtgaatctacagaaacaatttagcacactggtcgagtcaacagcaactgctggaaaaaaaagcccttcaagttttcagttcaactggactgaagaggacactgatagaacgtgtttccatggacacagccttcagggagtcctgaaagagaaaggccaatcactgctgactaagaattcattatattggcttagtacacagaaattctgcagatgctattgtacacatgtgacaacctatgaagaatcaaattattctctgagttatcagtttatactaaatctcttctccttcctgctcagaataaagacttcccttctccatgaagaagtgagcttagttgagaagaaactttttgagaaaaaatacagtgtaaaaagaaagaaatcaagatccaagaaagtgagacgacattgagaaaatgaaatagaaactttctggaaaaatattttaatagtgataataacatcagattttaatataacattccagagaattgtggaaaatactgcatatatatgtatagactctgacacatatttacatatatatcaagtgtgcttagaaaaatgtatattatgatggggtcttgctatgctgctcaggatggtcttgaactcgtgacctcaggtgatcctcccacctctgtctcccaaagtgctggaattacagatgtgagccactgcgcccagcctggtttggtagtttcttaaaagtgaaaattagacctaccatgtgacccagccattccactactaggtgtctacccaagaaaaataaaagcatgtttccacacaaagacttgtatacaaatattcatagcaactttatttggaatagcaaaaaaaagggaaaacaacccaaacagccatcagcaggtgaatggataaacacatggtggatatccatacaatgaaacactgctcagctgtgaaaaaggaacaaactattgaaacaatatccctgttcaggagcaggatttggagaatataagaagcatatcttttataatttaaaaacttgctttctaagatttgaactgaaagatcttttttgaagatgagtgtcatggaattgacatgatttgaagtgttatggcacttcctttgaataaaaaaatcaaagttgctaacaagttccatgtacttaaaaatattgggacagagcgctcaaagctatgaaaagttttgggccacccatgaatatgagataagattaacaagagaggagaaggaagtgaaaaatatggctttccatgcatttccaattgtatgaattaccattgaaggctagtgatgaaatgttactctctaggagtcagtgttttcacatctaaaaatggtatcagtcatagaaaaagcttatctgtctactgccaaaaagggaagagggtaatagcacgtattgagcacctactgtatattcagatgaggtcctgccatacgaaattcagtccccactgttctgggggccatgcaatcgtctttagataataggtgtggggctaggggttccgctgtgaagttaccttccttcccagggtgctcagccagcacaaagctgtggtgagatttgggtccaggtctcagactccagattccaaaccacatttaaaaaaataaaatcatcacctgcaga

SEQ ID NO: 427830 - DNA, 1721 bp, Homo sapiens
atcaagtaaattccaggctttatttgtgatttaacattacttgttattttgtttcctttttttctccggttccagaaatggtggtgaatctacagaaacaatttagcacactggtcgagtcaacagcaactgctggaaaaaaaagcccttcaagttttcagttcaactggactgaagaggacactgatagaacgtgtttccatggacacagccttcagggagtcctgaaagagaaaggccaatcactgctgactaagaattcattatattggcttagtacacagaaattctgcagatgctattgtacacatgtgacaacctatgaagaatcaaattattctctgagttatcagtttatactaaatctcttctccttcctgctcagaataaagacttcccttctccatgaagaagtgagcttagttgagaagaaactttttgagaaaaaatacagtgtaaaaagaaagaaatcaagatccaagaaagtgagacgacattgagaaaatgaaatagaaactttctggaaaaatattttaatagtgataataacatcagattttaatataacattccagagaattgtggaaaatactgcatatatatgtatagactctgacacatatttacatatatatcaagtgtgcttagaaaaatgtatattatgatggggtcttgctatgctgctcaggatggtcttgaactcgtgacctcaggtgatcctcccacctctgtctcccaaagtgctggaattacagatgtgagccactgcgcccagcctggtttggtagtttcttaaaagtgaaaattagacctaccatgtgacccagccattccactactaggtgtctacccaagaaaaataaaagcatgtttccacacaaagacttgtatacaaatattcatagcaactttatttggaatagcaaaaaaaagggaaaacaacccaaacagccatcagcaggtgaatggataaacacatggtggatatccatacaatgaaacactgctcagctgtgaaaaaggaacaaactattgaaacaatatccctgttcaggagcaggatttggagaatataagaagcatatcttttataatttaaaaacttgctttctaagatttgaactgaaagatcttttttgaagatgagtgtcatggaattgacatgatttgaagtgttatggcacttcctttgaataaaaaaatcaaagttgctaacaagttccatgtacttaaaaatattgggacagagcgctcaaagctatgaaaagttttgggccacccatgaatatgagataagattaacaagagaggagaaggaagtgaaaaatatggctttccatgcatttccaattgtatgaattaccattgaaggctagtgatgaaatgttactctctaggagtcagtgttttcacatctaaaaatggtatcagtcatagaaaaagcttatctgtctactgccaaaaagggaagagggtaatagcacgtattgagcacctactgtatattcagatgaggtcctgccatacgaaattcagtccccactgttctgggggccatgcaatcgtctttagataataggtgtggggctaggggttccgctgtgaagttaccttccttcccagggtgctcagccagcacaaagctgtggtgagatttgggtccaggtctcagactccagattccaaaccacatttaaaaaaataaaatcatcacctgcaga

SEQ ID NO: 427831 - DNA, 1487 bp, Homo sapiens
  misc_feature (55)..(55): n is a, c, g, or t
ttgtaaataataattaatcgagtgggttattgattgggtcttggtgtataatatnttattttttctattgtacacatgtgacaacctatgaagaatcaaattattctctgagttatcagtttatactaaatctcttctccttcctgctcagaataaagacttcccttctccatgaagaagtgagcttagttgagaagaaactttttgagaaaaaatacagtgtaaaaagaaagaaatcaagatccaagaaagtgagacgacattgagaaaatgaaatagaaactttctggaaaaatattttaatagtgataataacatcagattttaatataacattccagagaattgtggaaaatactgcatatatatgtatagactctgacacatatttacatatatatcaagtgtgcttagaaaaatgtatattatgatggggtcttgctatgctgctcaggatggtcttgaactcgtgacctcaggtgatcctcccacctctgtctcccaaagtgctggaattacagatgtgagccactgcgcccagcctggtttggtagtttcttaaaagtgaaaattagacctaccatgtgacccagccattccactactaggtgtctacccaagaaaaataaaagcatgtttccacacaaagacttgtatacaaatattcatagcaactttatttggaatagcaaaaaaaagggaaaacaacccaaacagccatcagcaggtgaatggataaacacatggtggatatccatacaatgaaacactgctcagctgtgaaaaaggaacaaactattgaaacaatatccctgttcaggagcaggatttggagaatataagaagcatatcttttataatttaaaaacttgctttctaagatttgaactgaaagatcttttttgaagatgagtgtcatggaattgacatgatttgaagtgttatggcacttcctttgaataaaaaaatcaaagttgctaacaagttccatgtacttaaaaatattgggacagagcgctcaaagctatgaaaagttttgggccacccatgaatatgagataagattaacaagagaggagaaggaagtgaaaaatatggctttccatgcatttccaattgtatgaattaccattgaaggctagtgatgaaatgttactctctaggagtcagtgttttcacatctaaaaatggtatcagtcatagaaaaagcttatctgtctactgccaaaaagggaagagggtaatagcacgtattgagcacctactgtatattcagatgaggtcctgccatacgaaattcagtccccactgttctgggggccatgcaatcgtctttagataataggtgtggggctaggggttccgctgtgaagttaccttccttcccagggtgctcagccagcacaaagctgtggtgagatttgggtccaggtctcagactccagattccaaaccacatttaaaaaaataaaatcatcacctgcaga

SEQ ID NO: 427832 - DNA, 786 bp, Homo sapiens
  misc_feature (51)..(51): n is a, c, g, or t
  misc_feature (53)..(53): n is a, c, g, or t
atattattattttttaagtagataatataagagtatttaaaaaatgtaaananatgtttgctattgtacacatgtgacaacctatgaagaatcaaattattctctgagttatcagtttatactaaatctcttctccttcctgctcagaataaagacttcccttctccatgaagaagtgagcttagttgagaagaaactttttgagaaaaaatacagtgtaaaaagaaagaaatcaagatccaagaaagtgagacgacattgagaaaatgaaatagaaactttctggaaaaatattttaatagtgataataacatcagattttaatataacattccagagaattgtggaaaatactgcatatatatgtatagactctgacacatatttacatatatatcaagtgtgcttagaaaaatgtatattgtaaagcaggtgagcttcatttgattttatttttcagagtatgaacattctaagagaaagttaaaacaatagcaaattgtataattgtatccagaaatgtatactcatcgtattttaaagctaaatttattttttaaactagatcccttcattattctttatgccccagagtaaatcccagatggatcaaagatctaaacataatctttcatatgtaaaaatataaaagtattagtagaaaacaaatatgaatgctttgatgatcttggaatggcaaagtcaatttttgcagcatatggtggacaaagaaataatttctttaatgtatcaatagctcttgcaaagcaaaaggaaaaaagcaaa

SEQ ID NO: 427833 - DNA, 375 bp, Homo sapiens
ctcttctgtggctgtatggtctacaaggtcatattggattaaacaattatcatattgaccagttgaaaagatttttagttaggcatggaaagagactgccttcgccagagaataatggagaataatccctgtatggagtgaaagagtgaggagtgagtttttatactttactgcattcagttctgttgtctctctaatgtctacatcttgatcacacactcacaccaactgcccagtgcagtcaattaatgaaaactcagatgaacaatgtatattattatagtgtggtttatttggttaataatcttggattttatttctttcagataagccatggtttgatttcagaaagtggtaccaaattatgaagaaagc

SEQ ID NO: 427834 - DNA, 2277 bp, Homo sapiens
tgagttacacctccctacccccggtctagtgggctgtggcagtgctcccttctcagtggctcagctgagaacaaatgatgccctccaatgcacaggcaggctgggttaggccctgtggatccacagtggggacctagaggcaagttagtttggtggggaaaagccagaggtctaggtcatctattccctgcctggtttattttcaagccaaaactgagcagtctagctttctatgggatggagaagccaggtatccagcattggagactgatggagaatgagaggaagaaagagaggaggaccttgcagctgtggaaggctccttggagcctcctttgtgggagggtatcagttctggttctgccagagcctcagccctggtagcagaacctcagggctgcccctctccccaaactcctcccagcaaggctgaccctttgagcttactccttaaacagtattaaccctgccacactcatgggcattggcaccttggttcccctgccccactttgtcctgtgacaggtccattgctggcagtggacaggtgaaatactcactccagcctacttccggctctgactctcactcctcaaggggaagggtccgttagaaagtggcccatcccatggtacatggtctcttcttgaccacactaggactcttaggtagaaattagccttcccctttttatggatcattacaaagtgacggtatcacctgtggagagaatgtcctcttccctgctggctgccctgcccatactgtgcagggtgtggtggggtgcagggtgtggtggggtgggccacagttgtgtcctaggtctggagaaaagcttgcagactctgcctttggcaggattttctgcagttagccccgtccagagcagaacgaagggtatttcctagcctatttcctgggcaggctcctcaaatccagggatgaactactttctgcagtggccagccctccttttgattttattgtggccccaattccagggctttgggggttacagagaatcaggcttccggtgggagtagattgttttccatctataggtggagaaaattccaggaggagaatattgtctggcttccccgttctctctgggcaattgtttccttggttctctctccaactccatgttgtcttagtctcccagcaccccttcaggccttccatgtgggcccctagaccacactacccaccttcacacttgcattccacaactcagtccagtggccagcttgttgatgcctccataattctcagccagagcaaatccttgattggcccaccaggtcttgctgctccagaagttgccttgtgggcattccctggcaccatttcctctctgggtcctatacgttcccaagtgcaggaggtcctgggggtatgcctgtgtgcctggcaacatccagcattgtgtttctgctccatctaggtgtcccatttctccagttgcccctcataaggcatcaaacctccagcaaaggaaggcaacaacccatggcctgaccacgggatctacaggttcagatctcaccagggatagcccagacttcaattcttgcttttttgggtatcagggccccaatcccttagtggccagggactcaaagtttggaataatcccagccctgccaagcattaagggtgctggtggggagtgtttgctggctgttcatgaacctctggtgtcctgggcctctctccactagacatggcagcatctctgagttacagattgcaatgtgttgccctgcatggttgaactgcttcggacatctgctaggcatcccatgtgccctgtcccctcttcaatgccagtgagtcacaatggcctatgcttattcacagcaataatacctagggagtccccatgaagcccttttgtcctggtccctcactctgcgtgggtctcctggggaggcagctgctgagtgggtcagttcatgagaacctgcatttatgaagccctgggctgtgtaggcatcaccctgggatgcagacaggttagaggcccagcccttaggggagccatggcagggagagtgccttccaccctgaggccacccagacctggaggagatgcaggccccagctctgctaaagggcctttgaggtgggtgggactgtctcccagttgggcagctcttgagaaggacacacgaccggtttgtgcgcccattgcctgctctgtgtctccgttggtccctctgtctcttccttttcacatttgtgcacataaaatatactggtgtttgtgttcca

SEQ ID NO: 427835 - DNA, 1888 bp, Homo sapiens
tgagttacacctccctacccccggtctagtgggctgtggcagtgctcccttctcagtggctcagctgagaacaaatgatgccctccaatgcacaggcaggctgggttaggccctgtggatccacagtggggacctagaggcaagttagtttggtggggaaaagccagaggtctaggtcatctattccctgcctggtttattttcaagccaaaactgagcagtctagctttctatgggatggagaagccaggtatccagcattggagactgatggagaatgagaggaagaaagagaggaggaccttgcagctgtggaaggctccttggagcctcctttgtgggagggtatcagttctggttctgccagagcctcagccctggtagcagaacctcagggctgcccctctccccaaactcctcccagcaaggctgaccctttgagcttactccttaaacagtattaaccctgccacactcatgggcattggcaccttggttcccctgccccactttgtcctgtgacaggtccattgctggcagtggacaggtgaaatactcactccagcctacttccggctctgactctcactcctcaaggggaagggtccgttagaaagtggcccatcccatggtacatggtctcttcttgaccacactaggactcttaggtagaaattagccttcccctttttatggatcattacaaagtgacggtatcacctgtggagagaatgtcctcttccctgctggctgccctgcccatactgtgcagggtgtggtggggtgcagggtgtggtggggtgggccacagttgtgtcctaggtctggagaaaagcttgcagactctgcctttggcaggattttctgcagttagccccgtccagagcagaacgaagggtatttcctagcctatttcctgggcaggctcctcaaatccagggatgaactactttctgcagtggccagccctccttttgattttattgtggccccaattccagggctttgggggttacagagaatcaggcttccggtgggagtagattgttttccatctataggtggagaaaattccaggaggagaatattgtctggcttccccgttctctctgggcaattgtttccttggttctctctccaactccatgttgtcttagtctcccagcaccccttcaggccttccatgtgggcccctagaccacactacccaccttcacacttgcattccacaactcagtccagtggccagcttgttgatgcctccataattctcagccagagcaaatccttgattggcccaccaggtcttgctgctccagaagttgccttgtgggcattccctggcaccatttcctctctgggtcctatacgttcccaagtgcaggaggtcctgggggtatgcctgtgtgcctggcaacatccagcattgtgtttctgctccatctaggtgtcccatttctccagttgcccctcataaggcatcaaacctccagcaaaggaaggcaacaacccatggcctgaccacgggatctacaggttcagatctcaccagggatagcccagacttcaattcttgcttttttgggtatcagggccccaatcccttagtggccagggactcaaagtttggaataatcccagccccttaggggagccatggcagggagagtgccttccaccctgaggccacccagacctggaggagatgcaggccccagctctgctaaagggcctttgaggtgggtgggactgtctcccagttgggcagctcttgagaaggacacacgaccggtttgtgcgcccattgcctgctctgtgtctccgttggtccctctgtctcttccttttcacatttgtgcacataaaatatactggtgtttgtgttcca

SEQ ID NO: 427836 - DNA, 751 bp, Homo sapiens
ggtgggaggcaaggcctgacctccctccctccctccgatctggatttagttgagctttggctggttccattaggcaatattcaggtgttgggggatggggtgtggaggcagcagagggacattgggaagggtccatggatcgcggcccagttcaggggttggtaccaggaggcctgtggctgagcagcgatggactatgtagttgactttggaagcagcaggccctgtcctggccaagggacaaatgagaacctgcatttatgaagccctgggctgtgtaggcatcaccctgggatgcagacaggttagaggcccagcccttaggggagccatggcagggagagtgccttccaccctgaggccacccagacctggaggagatgcaggccccagctctgctaaagggcctttgaggtgggtgggactgtctcccagttgggcagctcttgagaaggacacacgaccggtttgtgcgcccattgcctgctctgtgtctccgttggtccctctgtctcttccttttcacatttgtgcacataaaatatactggtgtttgtgttccaaaaaaaaaaaaaaaaaaaaaaaaaagagaaaaaagagggagaaaaaaaagggggaggaagaagtgaggacgagaaggggaagtggtaaaagaggatagctgagacacatgtgttgaaagaagagataaagggggtggagaggaactggatggagataatgaaaaggaggaaagatgtgcgtgggatag

SEQ ID NO: 427837 - DNA, 1610 bp, Homo sapiens
gagcgggagccagccctggagacggcgctcctagccgcacctgcgcctggcaggcggccggctctgccagcccctacccacggccccggccccgcaccgggacacatggaagctgccagccccccagccaaggatcagctgagccctagggctgatgcttgcctacgttgctgagaatggcactgaggcccagccaacaaaggttaacccaggacactcctggacagtgatcctgatgtctgttgtgagctgcacactcaagggtgtgataaccagccccagtcggcgccatggcgtctgccgagcccctgacggcgctgtcccgctggtacctgtatgccatccacggctacttctgcgaggtgatgttcacagcggcctgggagttcgtggtgaacttgaactggaagttccctggggtcacgagcgtgtgggccctcttcatctacggcacctccatcctcatcgtggagcgcatgtacctgcggctgcgcggccgctgcccgctgctcctgcgctgcctcatctacacgctctggacctacctgtgggagttcaccaccggcttcatcctgcgccagttcaacgcctgcccctgggactactcccagttcgactttgacttcatgggcctcatcaccctggagtacgccgtgccctggttctgcggggccctcatcatggagcagttcatcatccgcaacaccctccgcctccgcttcgacaaggacgctgagcccggggagcccagcggcgccctagccctggccaacggccatgtcaagactgactgagcaggaagcgggtggggggcctggggatctctcatggaactcatggacaaagagaccaagctggtgaggttgccccatccatgcagcaaaagccctgctccggccaagcctcagccctatagggcacacagagccccctaacgtccgcgggggccggtgttggggggccgtggtcaggtgttgggggatggggtgtggaggcagcagagggacattgggaagggtccatggatcgcggcccagttcaggggttggtaccaggaggcctgtggctgagcagcgatggactatgtagttgactttggaagcagcaggccctgtcctggccaagggacaatgagaatggggccgcaggtgggaggcaaggcctgacctccctccctccgatctggatttagttgagctttggctggttccattaggcaatattcaggtgcttgcttgcaaccaatacctccccaggggcctgctgagctgcagccgaggagagactgggcagccaggaggctgcgtggcagcaacgctggtctgcaagggctgggagaccctcccttggctcctctcccctcccccagggccctgcgctgctcccttggccttctggggcccccgtggtgctggattcccaccaaccttgggcttttggaggtttcaatccccgtgtgttcggtggcgtttcccccttttctgtcttgttttcaaagcctttaccactagcggctctttatccacgtcggtcgccacacctgccccaccccagctccctagccagcacaggagctgccggagatgaagccctgagacacccccaaccct

SEQ ID NO: 427838 - DNA, 485 bp, Homo sapiens
ggatcagctgagccctagggctgatgcttgcctacgttgctgagaatggcactgaggcccagccaacaaaggttaacccaggacactcctggacagtgatcctgatgtctgttgtgagctgcacactcaagggtgtgataagtgagtatgttacaagcacccaggggatcaccagcccagcgatcctgcctgctcggcacctcatcagcatgggcacgagtctggaggttctagttctgagtctgttccccatccaaggtcctgtcacagggcaatgggaggggaatgtcaagcaatattgggccatcacatgcgggagccgtcttatggccacatggcctctaaaatccaggccagacccagtgtattagtttgttttcgtgctgctgataaagacatacgtaagagtggaaaatgtatacagaaaaagagggttaattccacgtgtctggggaagcctcacaatcatggtggaaggcaagggg

SEQ ID NO: 427839 - DNA, 1675 bp, Homo sapiens
gagcgggagccagccctggagacggcgctcctagccgcacctgcgcctggcaggcggccggctctgccagcccctacccacggccccggccccgcaccgggcagtgggcagccatgccgagtcatgaaggtggcatgcagggatgggaaatgctgccttaggagggacacatggaagctgccagccccccagccaaggatcagctgagccctagggctgatgcttgcctacgttgctgagaatggcactgaggcccagccaacaaaggttaacccaggacactcctggacagtgatcctgatgtctgttgtgagctgcacactcaagggtgtgataaccagccccagtcggcgccatggcgtctgccgagcccctgacggcgctgtcccgctggtacctgtatgccatccacggctacttctgcgaggtgatgttcacagcggcctgggagttcgtggtgaacttgaactggaagttccctggggtcacgagcgtgtgggccctcttcatctacggcacctccatcctcatcgtggagcgcatgtacctgcggctgcgcggccgctgcccgctgctcctgcgctgcctcatctacacgctctggacctacctgtgggagttcaccaccggcttcatcctgcgccagttcaacgcctgcccctgggactactcccagttcgactttgacttcatgggcctcatcaccctggagtacgccgtgccctggttctgcggggccctcatcatggagcagttcatcatccgcaacaccctccgcctccgcttcgacaaggacgctgagcccggggagcccagcggcgccctagccctggccaacggccatgtcaagactgactgagcaggaagcgggtggggggcctggggatctctcatggaactcatggacaaagagaccaagctggtgaggttgccccatccatgcagcaaaagccctgctccggccaagcctcagccctatagggcacacagagccccctaacgtccgcgggggccggtgttggggggccgtggtcaggtgttgggggatggggtgtggaggcagcagagggacattgggaagggtccatggatcgcggcccagttcaggggttggtaccaggaggcctgtggctgagcagcgatggactatgtagttgactttggaagcagcaggccctgtcctggccaagggacaatgagaatggggccgcaggtgggaggcaaggcctgacctccctccctccgatctggatttagttgagctttggctggttccattaggcaatattcaggtgcttgcttgcaaccaatacctccccaggggcctgctgagctgcagccgaggagagactgggcagccaggaggctgcgtggcagcaacgctggtctgcaagggctgggagaccctcccttggctcctctcccctcccccagggccctgcgctgctcccttggccttctggggcccccgtggtgctggattcccaccaaccttgggcttttggaggtttcaatccccgtgtgttcggtggcgtttcccccttttctgtcttgttttcaaagcctttaccactagcggctctttatccacgtcggtcgccacacctgccccaccccagctccctagccagcacaggagctgccggagatgaagccctgagacacccccaaccct

SEQ ID NO: 427840 - DNA, 287 bp, Homo sapiens
actagatggaaggcatgagagcaatccaataaaattgggaatccgggagccataaaatatagttgattccatctacaaatagggcaattgcttcagagagaataacagctcaggacactcacacaaccagtgattgagctcccgttgtctactagatcttgcagtgctatggagagtgtaaagatgattaagctactctccttagcctcaagcaacttagcatggcagatgggagataacctgaaagctgctgattagaatagaccaagagtgataaggaccttctg

SEQ ID NO: 427841 - DNA, 686 bp, Homo sapiens
caattcagacgcacgtgagggaaatcagatgactggacttgtagatactaacggttctgaagcggaatggcttattcagaagagcataaaggtatgccctgtggtttcatccgccagaattccggcaactccatttccttggactttgagcccagtatagagtaccagtttgtggagcggttggaagagcgctacaaatgtgccttctgccactcggtgcttcacaacccccaccagacaggatgtgggcaccgcttctgccagcactgcatcctgtccctgagagaaattagaagacagtgcaatacatggccatgtagataaagaggtcatcaaatctaaggagggttataaaggagcaagtgtggcaaaaacagagaaattcctcagagttattatgctacgtataggcagcaaaggctcactggatggtaactgccaaaggattatctgatgggaccgagataacagagattgtgggaacacatcatagtcacaacagaatcaagacaaggcaagagccgacaggaaagacaacaaggtgcacaaaacagcgaaaaaacctagaggagcccacaccgagtcataacagaggccaaaaaaataggccaaaaagaaaaaatacggaccacaggggacatgcggaaagtgaaaccaggagacaaacaagaaaagaaagacagaaa

SEQ ID NO: 427842 - DNA, 3981 bp, Homo sapiens
atcagtgcagggatgtgcagatgagtgggctgtggggtgtcctgctcacggtttcatggatgaatggcttattcagaagagcataaaggtatgccctgtggtttcatccgccagaattccggcaactccatttccttggactttgagcccagtatagagtaccagtttgtggagcggttggaagagcgctacaaatgtgccttctgccactcggtgcttcacaacccccaccagacaggatgtgggcaccgcttctgccagcactgcatcctgtccctgagagaattaaacacagtgccaatctgccctgtagataaagaggtcatcaaatctcaggaggtttttaaagacaattgttgcaaaagagaagtcctcaacttatatgtatattgcagcaatgctcctggatgtaatgccaaggttattctgggccggtaccaggatcaccttcagcagtgcttatttcaacctgtgcagtgttctaatgagaagtgccgggagccagtcctacggaaagacctgaaagagcatttgagtgcatcctgtcagtttcgaaaggaaaaatgcctttattgcaaaaaggatgtggtagtcatcaatctacagaatcatgaggaaaacttgtgtcctgaatacccagtattttgtcccaacaattgtgcgaagattattctaaaaactgaggtagatgaacacctggctgtatgtcctgaagctgagcaagactgtccttttaagcactatggctgtgctgtaacggataaacggaggaacctgcagcaacatgagcattcagccttacgggagcacatgcgtttggttttagaaaagaatgtccaattagaagaacagatttctgacttacacaagagcctagaacagaaagaaagtaaaatccagcagctagcagaaactataaagaaacttgaaaaggagttcaagcagtttgcacagttgtttggcaaaaatggaagcttcctcccaaacatccaggtttttgccagtcacattgacaagtcagcttggctagaagctcaagtgcatcaattattacaaatggttaaccagcaacaaaataaatttgacctgagacctttgatggaagcagttgatacagtgaaacagaaaattaccctgctagaaaacaatgatcaaagattagccgttttagaagaggaaactaacaaacatgatacccacattaatattcataaagcacagctgagtaaaaatgaagagcgatttaaactgctggagggtacttgctataatggaaagctcatttggaaggtgacagattacaagatgaagaagagagaggcggtggatgggcacacagtgtccatcttcagccagtccttctacaccagccgctgtggctaccggctctgtgctagagcatacctgaatggggatgggtcagggagggggtcacacctgtccctatactttgtggtcatgcgaggagagtttgactcactgttgcagtggccattcaggcagagggtgaccctgatgcttctggaccagagtggcaaaaagaacattatggagaccttcaaacctgaccccaatagcagcagctttaaaagacctgatggggagatgaacattgcatctggctgtccccgctttgtggctcattctgttttggagaatgccaagaacgcctacattaaagatgacactctgttcttgaaagtggccgtggacttaactgacctggaggatctctagtcactgttatggggtgataagaggacttcttggggccagaactgtggaggagagcacatttgattatcatattgacctggatttagactcaaagcacatttgtatttgcctttttccttaacgtttgaagtcagtttaaaacttctgaagtgctgtctttttacattttactctgtcccagtttgaaacttaaaactcttagaatattctcttattatttatatttttatatttcttgaaagatggtaagtttcttgaagtttttggggcgtttctcttttactggtgcttagcgcagtgtctcgggcactctaaatattgagtgttatggaggacacagaggtagcagaatcccagttgaaaatgttttgatattttattgtttggcctattgattctagacctggccttaagtctgcaaaagccatctttataaggtaggctgttccagttaagtagtgggtgatgtagttacaaagataatatgctcagtttggacctttttttcagttaaatgctaaatatatgaaaattactatacctctaagtattttcatgaaattcaccagcagtttgcaagcacagttttgcaaggctgcataagaactggtgaatggggtaagcattttcattcttcctgctgaagtaaagcagaaagtactgcatagtatatgagatatagccagctagctaaagttcagattttgttaggttcaaccctatgaaaaaaactattttcataggtcaaaaatggtaaaaaattagcagtttcataagattcaaccaaataaatatatatatacacacacacatacatatacacctatatatgtgtgtatacaaacagttcgaatgtattttggtgacagtaataaatcaatgtgaggatggatagaatttagtatatgatagagaaaatgtcataaatggataaaaggaatttacaacttgaggagaaaacctttacaatttcctatgggtgtcagaagtactctcagcgaaaactgatggctaaaacagtatctactattctctgataactttttttttgagacagagtttcattgtcacccaggctggagtacagtggcatgatctcagctcactgcaaactctgcctcccgaattcaagtgattctcctgcctcagcctcctgagtagctgggattacaggcgcccgtcaccacacccaggtaatttttgtatttttagtagagacggagttttgccatgttggccaagctgatctcaaactcctgacctcaagtgatctgcccgcctcggcctcccaaagtgctgagattacaggcatgacccaccgcgtcaagcctctgacaactattgaatttgtaagctgctatgcaaatgggcatttatataaacttgtgatgtttcttgtcagaattctgagtactctgtgaagaacagaaatgatcatattcttatgcatctatctgtatgggtctgaaggtgtatatacaaactgagatgagtccttatgactcttgataagcctgagtttaacaacaacaaaaatgccaagttgtcctgagcccttctgcgttgttatgccacttccctactgctcatatgcacgctggctcccctgggcacgcaaggatgagtatgggccatgggcccctgtagagctgcttacctggtgatgaccatgcaccttacaatttctgaacagttaaccctatagaagcatgctttatatgagtgtcttctgggaagaggaaccttcttaatctcttctgtgggattttcaaaatgctaaagactcacactgcagcaatcatcccagatgattaaattcaaagaaataggttcacaacaggaatatactgaagaactagagtgtcactgctggtgaactgtggcacggttgctcaacacatcacctcggacaaattcaggaagcatttctttagcccacaagtccagacccaggtgctctgtatgtttgtttttaatattcatcatatccaagttcactctgtcttcctgagcagtggaagatcatattgctgtaacttcttttaagtagttgatgtggaaaacattttaaagtgaatttgtcaaaatgctggttttgtgttttatccaacttttgtgcatatatataaagtatgtcatggcatggtttgcttaggagttcagagttccttcatcatcgaaatagtgattaagtgatcccagaacaaggaatactagagtaaaaagcacctctttttcacaaaa

SEQ ID NO: 427843 - DNA, 3175 bp, Homo sapiens
gaagatgtagcctctacccttgaagaactaacataaatgtaaacagatttctgacttacacaagagcctagaacagaaagaaagtaaaatccagcagctagcagaaactataaagaaacttgaaaaggagttcaagcagtttgcacagttgtttggcaaaaatggaagcttcctcccaaacatccaggtttttgccagtcacattgacaagtcagcttggctagaagctcaagtgcatcaattattacaaatggttaaccagcaacaaaataaatttgacctgagacctttgatggaagcagttgatacagtgaaacagaaaattaccctgctagaaaacaatgatcaaagattagccgttttagaagaggaaactaacaaacatgatacccacattaatattcataaagcacagctgagtaaaaatgaagagcgatttaaactgctggagggtacttgctataatggaaagctcatttggaaggtgacagattacaagatgaagaagagagaggcggtggatgggcacacagtgtccatcttcagccagtccttctacaccagccgctgtggctaccggctctgtgctagagcatacctgaatggggatgggtcagggagggggtcacacctgtccctatactttgtggtcatgcgaggagagtttgactcactgttgcagtggccattcaggcagagggtgaccctgatgcttctggaccagagtggcaaaaagaacattatggagaccttcaaacctgaccccaatagcagcagctttaaaagacctgatggggagatgaacattgcatctggctgtccccgctttgtggctcattctgttttggagaatgccaagaacgcctacattaaagatgacactctgttcttgaaagtggccgtggacttaactgacctggaggatctctagtcactgttatggggtgataagaggacttcttggggccagaactgtggaggagagcacatttgattatcatattgacctggatttagactcaaagcacatttgtatttgcctttttccttaacgtttgaagtcagtttaaaacttctgaagtgctgtctttttacattttactctgtcccagtttgaaacttaaaactcttagaatattctcttattatttatatttttatatttcttgaaagatggtaagtttcttgaagtttttggggcgtttctcttttactggtgcttagcgcagtgtctcgggcactctaaatattgagtgttatggaggacacagaggtagcagaatcccagttgaaaatgttttgatattttattgtttggcctattgattctagacctggccttaagtctgcaaaagccatctttataaggtaggctgttccagttaagtagtgggtgatgtagttacaaagataatatgctcagtttggacctttttttcagttaaatgctaaatatatgaaaattactatacctctaagtattttcatgaaattcaccagcagtttgcaagcacagttttgcaaggctgcataagaactggtgaatggggtaagcattttcattcttcctgctgaagtaaagcagaaagtactgcatagtatatgagatatagccagctagctaaagttcagattttgttaggttcaaccctatgaaaaaaactattttcataggtcaaaaatggtaaaaaattagcagtttcataagattcaaccaaataaatatatatatacacacacacatacatatacacctatatatgtgtgtatacaaacagttcgaatgtattttggtgacagtaataaatcaatgtgaggatggatagaatttagtatatgatagagaaaatgtcataaatggataaaaggaatttacaacttgaggagaaaacctttacaatttcctatgggtgtcagaagtactctcagcgaaaactgatggctaaaacagtatctactattctctgataactttttttttgagacagagtttcattgtcacccaggctggagtacagtggcatgatctcagctcactgcaaactctgcctcccgaattcaagtgattctcctgcctcagcctcctgagtagctgggattacaggcgcccgtcaccacacccaggtaatttttgtatttttagtagagacggagttttgccatgttggccaagctgatctcaaactcctgacctcaagtgatctgcccgcctcggcctcccaaagtgctgagattacaggcatgacccaccgcgtcaagcctctgacaactattgaatttgtaagctgctatgcaaatgggcatttatataaacttgtgatgtttcttgtcagaattctgagtactctgtgaagaacagaaatgatcatattcttatgcatctatctgtatgggtctgaaggtgtatatacaaactgagatgagtccttatgactcttgataagcctgagtttaacaacaacaaaaatgccaagttgtcctgagcccttctgcgttgttatgccacttccctactgctcatatgcacgctggctcccctgggcacgcaaggatgagtatgggccatgggcccctgtagagctgcttacctggtgatgaccatgcaccttacaatttctgaacagttaaccctatagaagcatgctttatatgagtgtcttctgggaagaggaaccttcttaatctcttctgtgggattttcaaaatgctaaagactcacactgcagcaatcatcccagatgattaaattcaaagaaataggttcacaacaggaatatactgaagaactagagtgtcactgctggtgaactgtggcacggttgctcaacacatcacctcggacaaattcaggaagcatttctttagcccacaagtccagacccaggtgctctgtatgtttgtttttaatattcatcatatccaagttcactctgtcttcctgagcagtggaagatcatattgctgtaacttcttttaagtagttgatgtggaaaacattttaaagtgaatttgtcaaaatgctggttttgtgttttatccaacttttgtgcatatatataaagtatgtcatggcatggtttgcttaggagttcagagttccttcatcatcgaaatagtgattaagtgatcccagaacaaggaatactagagtaaaaagcacctctttttcacaaaa

SEQ ID NO: 427844 - DNA, 1690 bp, Homo sapiens
gcagcagccgcgcctgcagaccggcctcgcggagcccgcgcgccgagccccacaatggcttattcagaagagcataaaggtatgccctgtggtttcatccgccagaattccggcaactccatttccttggactttgagcccagtatagagtaccagtttgtggagcggttggaagagcgctacaaatgtgccttctgccactcggtgcttcacaacccccaccagacaggatgtgggcaccgcttctgccagcactgcatcctgtccctgagagaattaaacacagtgccaatctgccctgtagataaagaggtcatcaaatctcaggaggtttttaaagacaattgttgcaaaagagaagtcctcaacttatatgtatattgcagcaatgctcctggatgtaatgccaaggttattctgggccggtaccaggatcaccttcagcagtgcttatttcaacctgtgcagtgttctaatgagaagtgccgggagccagtcctacggaaagacctgaaagagcatttgagtgcatcctgtcagtttcgaaaggaaaaatgcctttattgcaaaaaggatgtggtagtcatcaatctacagaatcatgaggaaaacttgtgtcctgaatacccagtattttgtcccaacaattgtgcgaagattattctaaaaactgaggtagatgaacacctggctgtatgtcctgaagctgagcaagactgtccttttaagcactatggctgtgctgtaacggataaacggaggaacctgcagcaacatgagcattcagccttacgggagcacatgcgtttggttttagaaaagaatgtccaattagaagaacagatttctgacttacacaagagcctagaacagaaagaaagtaaaatccagcagctagcagaaactataaagaaacttgaaaaggagttcaagcagtttgcacagttgtttggcaaaaatggaagcttcctcccaaacatccaggtttttgccagtcacattgacaagtcagcttggctagaagctcaagtgcatcaattattacaaatggttaaccagcaacaaaataaatttgacctgagacctttgatggaagcagttgatacagtgaaacagaaaattaccctgctagaaaacaatgatcaaagattagccgttttagaagaggaaactaacaaacatgatacccacattaatattcataaagcacagctgagtaaaaatgaagagcgatttaaactgctggagggtacttgctataatggaaagctcatttggaaggtgacagattacaagatgaagaagagagaggcggtggatgggcacacagtgtccatcttcagccagtccttctacaccagccgctgtggctaccggctctgtgctagagcatacctgaatggggatgggtcagggagggggtcacacctgtccctatactttgtggtcatgcgaggagagtttgactcactgttgcagtggccattcaggcagagggtgaccctgatgcttctggaccagagtggcaaaaagaacattatggagaccttcaaacctgaccccaatagcagcagctttaaaagacctgatggggagatgaacattgcatctggctgtccccgctttgtggctcattctgttttggagaatgccaagaacgcctacattaaagatgacactctgttcttga

SEQ ID NO: 427845 - DNA, 378 bp, Homo sapiens
tagtaggttaggtatagaaaaggctgatgagaaattctgtagatgtggctttttggaaccacctgtgaatatcttcctataattatgtaggaatctaccctgtaaatattttcctagaaataaatatgtagattttttcctagaaatactttcttagctgcaagtgcatgcatattttaactatatgcatgcagttatattcagtgactttatttttcctcacgttcctgttattagatttctgacttacacaagagcctagaacagaaagaaagtaaaatccagcagctagcagaaactataaagaaacttgaaaaggagttcaagcagtttgcacagttgtttggcaaaaatggaagcttcctcccaaacatccag

SEQ ID NO: 427846 - DNA, 494 bp, Homo sapiens
caggaatatactgaagaactagagtgtcactgctggtgaactgtggcacggttgctcaacacatcacctcggacaaattcaggaagcatttctttagcccacaagtccagacccaggtgctctgtatgtttgtttttaatattcatcatatccaagttcactctgtcttcctgagcagtggaagatcatattgctgtaacttcttttaagtagttgatgtggaaaacattttaaagtgaatttgtcaaaatgctggttttgtgttttatccaacttttgtgcatatatataaagtatgtcatggcatggtttgcttaggagttcagagttccttcatcatcgaaatagtgattaagtgatcccagaacaaggaatactagagtaaaaagcacctctttttcacaaaacgagttgtgatttttgttttaaacaaggtggatccatgtaaactatttttcctttttttatgaacaggacagtaatttttcttctgt

SEQ ID NO: 427847 - DNA, 3972 bp, Homo sapiens
gcagcagccgcgcctgcagaccggcctcgcggagcccgcgcgccgagccccacaatggcttattcagaagagcataaaggtatgccctgtggtttcatccgccagaattccggcaactccatttccttggactttgagcccagtatagagtaccagtttgtggagcggttggaagagcgctacaaatgtgccttctgccactcggtgcttcacaacccccaccagacaggatgtgggcaccgcttctgccagcactgcatcctgtccctgagagaattaaacacagtgccaatctgccctgtagataaagaggtcatcaaatctcaggaggtttttaaagacaattgttgcaaaagagaagtcctcaacttatatgtatattgcagcaatgctcctggatgtaatgccaaggttattctgggccggtaccaggatcaccttcagcagtgcttatttcaacctgtgcagtgttctaatgagaagtgccgggagccagtcctacggaaagacctgaaagagcatttgagtgcatcctgtcagtttcgaaaggaaaaatgcctttattgcaaaaaggatgtggtagtcatcaatctacagaatcatgaggaaaacttgtgtcctgaatacccagtattttgtcccaacaattgtgcgaagattattctaaaaactgaggtagatgaacacctggctgtatgtcctgaagctgagcaagactgtccttttaagcactatggctgtgctgtaacggataaacggaggaacctgcagcaacatgagcattcagccttacgggagcacatgcgtttggttttagaaaagaatgtccaattagaagaacagatttctgacttacacaagagcctagaacagaaagaaagtaaaatccagcagctagcagaaactataaagaaacttgaaaaggagttcaagcagtttgcacagttgtttggcaaaaatggaagcttcctcccaaacatccaggtttttgccagtcacattgacaagtcagcttggctagaagctcaagtgcatcaattattacaaatggttaaccagcaacaaaataaatttgacctgagacctttgatggaagcagttgatacagtgaaacagaaaattaccctgctagaaaacaatgatcaaagattagccgttttagaagaggaaactaacaaacatgatacccacattaatattcataaagcacagctgagtaaaaatgaagagcgatttaaactgctggagggtacttgctataatggaaagctcatttggaaggtgacagattacaagatgaagaagagagaggcggtggatgggcacacagtgtccatcttcagccagtccttctacaccagccgctgtggctaccggctctgtgctagagcatacctgaatggggatgggtcagggagggggtcacacctgtccctatactttgtggtcatgcgaggagagtttgactcactgttgcagtggccattcaggcagagggtgaccctgatgcttctggaccagagtggcaaaaagaacattatggagaccttcaaacctgaccccaatagcagcagctttaaaagacctgatggggagatgaacattgcatctggctgtccccgctttgtggctcattctgttttggagaatgccaagaacgcctacattaaagatgacactctgttcttgaaagtggccgtggacttaactgacctggaggatctctagtcactgttatggggtgataagaggacttcttggggccagaactgtggaggagagcacatttgattatcatattgacctggatttagactcaaagcacatttgtatttgcctttttccttaacgtttgaagtcagtttaaaacttctgaagtgctgtctttttacattttactctgtcccagtttgaaacttaaaactcttagaatattctcttattatttatatttttatatttcttgaaagatggtaagtttcttgaagtttttggggcgtttctcttttactggtgcttagcgcagtgtctcgggcactctaaatattgagtgttatggaggacacagaggtagcagaatcccagttgaaaatgttttgatattttattgtttggcctattgattctagacctggccttaagtctgcaaaagccatctttataaggtaggctgttccagttaagtagtgggtgatgtagttacaaagataatatgctcagtttggacctttttttcagttaaatgctaaatatatgaaaattactatacctctaagtattttcatgaaattcaccagcagtttgcaagcacagttttgcaaggctgcataagaactggtgaatggggtaagcattttcattcttcctgctgaagtaaagcagaaagtactgcatagtatatgagatatagccagctagctaaagttcagattttgttaggttcaaccctatgaaaaaaactattttcataggtcaaaaatggtaaaaaattagcagtttcataagattcaaccaaataaatatatatatacacacacacatacatatacacctatatatgtgtgtatacaaacagttcgaatgtattttggtgacagtaataaatcaatgtgaggatggatagaatttagtatatgatagagaaaatgtcataaatggataaaaggaatttacaacttgaggagaaaacctttacaatttcctatgggtgtcagaagtactctcagcgaaaactgatggctaaaacagtatctactattctctgataactttttttttgagacagagtttcattgtcacccaggctggagtacagtggcatgatctcagctcactgcaaactctgcctcccgaattcaagtgattctcctgcctcagcctcctgagtagctgggattacaggcgcccgtcaccacacccaggtaatttttgtatttttagtagagacggagttttgccatgttggccaagctgatctcaaactcctgacctcaagtgatctgcccgcctcggcctcccaaagtgctgagattacaggcatgacccaccgcgtcaagcctctgacaactattgaatttgtaagctgctatgcaaatgggcatttatataaacttgtgatgtttcttgtcagaattctgagtactctgtgaagaacagaaatgatcatattcttatgcatctatctgtatgggtctgaaggtgtatatacaaactgagatgagtccttatgactcttgataagcctgagtttaacaacaacaaaaatgccaagttgtcctgagcccttctgcgttgttatgccacttccctactgctcatatgcacgctggctcccctgggcacgcaaggatgagtatgggccatgggcccctgtagagctgcttacctggtgatgaccatgcaccttacaatttctgaacagttaaccctatagaagcatgctttatatgagtgtcttctgggaagaggaaccttcttaatctcttctgtgggattttcaaaatgctaaagactcacactgcagcaatcatcccagatgattaaattcaaagaaataggttcacaacaggaatatactgaagaactagagtgtcactgctggtgaactgtggcacggttgctcaacacatcacctcggacaaattcaggaagcatttctttagcccacaagtccagacccaggtgctctgtatgtttgtttttaatattcatcatatccaagttcactctgtcttcctgagcagtggaagatcatattgctgtaacttcttttaagtagttgatgtggaaaacattttaaagtgaatttgtcaaaatgctggttttgtgttttatccaacttttgtgcatatatataaagtatgtcatggcatggtttgcttaggagttcagagttccttcatcatcgaaatagtgattaagtgatcccagaacaaggaatactagagtaaaaagcacctctttttcacaaaa

SEQ ID NO: 427848 - DNA, 4047 bp, Homo sapiens
gcagcagccgcgcctgcagaccggcctcgcggagcccgcgcgccgagccccacaatggcttattcagaagagcataaaggtatgccctgtggtttcatccgccagaattccggcaactccatttccttggactttgagcccagtatagagtaccagtttgtggagcggttggaagagcgctacaaatgtgccttctgccactcggtgcttcacaacccccaccagacaggatgtgggcaccgcttctgccagcactgcatcctgtccctgagagaattaaacacagtgccaatctgccctgtagataaagaggtcatcaaatctcaggaggtttttaaagacaattgttgcaaaagagaagtcctcaacttatatgtatattgcagcaatgctcctggatgtaatgccaaggttattctgggccggtaccaggatcaccttcagcagtgcttatttcaacctgtgcagtgttctaatgagaagtgccgggagccagtcctacggaaagacctgaaagagcatttgagtgcatcctgtcagtttcgaaaggaaaaatgcctttattgcaaaaaggatgtggtagtcatcaatctacagaatcatgaggaaaacttgtgtcctgaatacccagtattttgtcccaacaattgtgcgaagattattctaaaaactgaggtagatgaacacctggctgtatgtcctgaagctgagcaagactgtccttttaagcactatggctgtgctgtaacggataaacggaggaacctgcagcaacatgagcattcagccttacgggagcacatgcgtttggttttagaaaagaatgtccaattagaagaacagatttctgacttacacaagagcctagaacagaaagaaagtaaaatccagcagctagcagaaactataaagaaacttgaaaaggagttcaagcagtttgcacagttgtttggcaaaaatggaagcttcctcccaaacatccaggtttttgccagtcacattgacaagtcagcttggctagaagctcaagtgcatcaattattacaaatggttaaccagcaacaaaataaatttgacctgagacctttgatggaagcagttgatacagtgaaacagaaaattaccctgctagaaaacaatgatcaaagattagccgttttagaagaggaaactaacaaacatgatacccacattaatattcataaagcacagctgagtaaaaatgaagagcgatttaaactgctggagggtacttgctataatggaaagctcatttggaaggtgacagattacaagatgaagaagagagaggcggtggatgggcacacagtgtccatcttcagccagtccttctacaccagccgctgtggctaccggctctgtgctagagcatacctgaatggggatgggtcagggagggggtcacacctgtccctatactttgtggtcatgcgaggagagtttgactcactgttgcagtggccattcaggcagagggtgaccctgatgcttctggaccagagtggcaaaaagaacattatggagaccttcaaacctgaccccaatagcagcagctttaaaagacctgatggggagatgaacattgcatctggctgtccccgctttgtggctcattctgttttggagaatgccaagaacgcctacattaaagatgacactctgttcttgaaagtggccgtggacttaactgacctggaggatctctagtcactgttatggggtgataagaggacttcttggggccagaactgtggaggagagcacatttgattatcatattgacctggatttagactcaaagcacatttgtatttgcctttttccttaacgtttgaagtcagtttaaaacttctgaagtgctgtctttttacattttactctgtcccagtttgaaacttaaaactcttagaatattctcttattatttatatttttatatttcttgaaagatggtaagtttcttgaagtttttggggcgtttctcttttactggtgcttagcgcagtgtctcgggcactctaaatattgagtgttatggaggacacagaggtagcagaatcccagttgaaaatgttttgatattttattgtttggcctattgattctagacctggccttaagtctgcaaaagccatctttataaggtaggctgttccagttaagtagtgggtgatgtagttacaaagataatatgctcagtttggacctttttttcagttaaatgctaaatatatgaaaattactatacctctaagtattttcatgaaattcaccagcagtttgcaagcacagttttgcaaggctgcataagaactggtgaatggggtaagcattttcattcttcctgctgaagtaaagcagaaagtactgcatagtatatgagatatagccagctagctaaagttcagattttgttaggttcaaccctatgaaaaaaactattttcataggtcaaaaatggtaaaaaattagcagtttcataagattcaaccaaataaatatatatatacacacacacatacatatacacctatatatgtgtgtatacaaacagttcgaatgtattttggtgacagtaataaatcaatgtgaggatggatagaatttagtatatgatagagaaaatgtcataaatggataaaaggaatttacaacttgaggagaaaacctttacaatttcctatgggtgtcagaagtactctcagcgaaaactgatggctaaaacagtatctactattctctgataactttttttttgagacagagtttcattgtcacccaggctggagtacagtggcatgatctcagctcactgcaaactctgcctcccgaattcaagtgattctcctgcctcagcctcctgagtagctgggattacaggcgcccgtcaccacacccaggtaatttttgtatttttagtagagacggagttttgccatgttggccaagctgatctcaaactcctgacctcaagtgatctgcccgcctcggcctcccaaagtgctgagattacaggcatgacccaccgcgtcaagcctctgacaactattgaatttgtaagctgctatgcaaatgggcatttatataaacttgtgatgtttcttgtcagaattctgagtactctgtgaagaacagaaatgatcatattcttatgcatctatctgtatgggtctgaaggtgtatatacaaactgagatgagtccttatgactcttgataagcctgagtttaacaacaacaaaaatgccaagttgtcctgagcccttctgcgttgttatgccacttccctactgctcatatgcacgctggctcccctgggcacgcaaggatgagtatgggccatgggcccctgtagagctgcttacctggtgatgaccatgcaccttacaatttctgaacagttaaccctatagaagcatgctttatatgagtgtcttctgggaagaggaaccttcttaatctcttctgtgggattttcaaaatgctaaagactcacactgcagcaatcatcccagatgattaaattcaaagaaataggttcacaacaggaatatactgaagaactagagtgtcactgctggtgaactgtggcacggttgctcaacacatcacctcggacaaattcaggaagcatttctttagcccacaagtccagacccaggtgctctgtatgtttgtttttaatattcatcatatccaagttcactctgtcttcctgagcagtggaagatcatattgctgtaacttcttttaagtagttgatgtggaaaacattttaaagtgaatttgtcaaaatgctggttttgtgttttatccaacttttgtgcatatatataaagtatgtcatggcatggtttgcttaggagttcagagttccttcatcatcgaaatagtgattaagtgatcccagaacaaggaatactagagtaaaaagcacctctttttcacaaaaaaggtaaaaaaacttcaggggggccccggtcccaatttgccttataggagtgtattacattcacttgcccgcctt

SEQ ID NO: 427849 - DNA, 3918 bp, Homo sapiens
gcagcagccgcgcctgcagaccggcctcgcggagcccgcgcgccgagccccacaatggcttattcagaagagcataaaggtatgccctgtggtttcatccgccagaattccggcaactccatttccttggactttgagcccagtatagagtaccagtttgtggagcggttggaagagcgctacaaatgtgccttctgccactcggtgcttcacaacccccaccagacaggatgtgggcaccgcttctgccagcactgcatcctgtccctgagagaattaaacacagtgccaatctgccctgtagataaagaggtcatcaaatctcaggaggtttttaaagacaattgttgcaaaagagaagtcctcaacttatatgtatattgcagcaatgctcctggatgtaatgccaaggttattctgggccggtaccaggatcaccttcagcagtgcttatttcaacctgtgcagtgttctaatgagaagtgccgggagccagtcctacggaaagacctgaaagagcatttgagtgcatcctgtcagtttcgaaaggaaaaatgcctttattgcaaaaaggatgtggtagtcatcaatctacagaatcatgaggaaaacttgtgtcctgaatacccagtattttgtcccaacaattgtgcgaagattattctaaaaactgaggtagatgaacacctggctgtatgtcctgaagctgagcaagactgtccttttaagcactatggctgtgctgtaacggataaacggaggaacctgcagcaacatgagcattcagccttacgggagcacatgcgtttggttttagaaaagaatgtccaattagaagaacagatttctgacttacacaagagcctagaacagaaagaaagtaaaatccagcagctagcagaaactataaagaaacttgaaaaggagttcaagcagtttgcacagttgtttggcaaaaatggaagcttcctcccaaacatccaggtttttgccagtcacattgacaagtcagcttggctagaagctcaagtgcatcaattattacaaatggttaaccagcaacaaaataaatttgacctgagacctttgatggaagcagttgatacagtgaaacagaaaattaccctgctagaaaacaatgatcaaagattagccgttttagaagaggaaactaacaaacatgatacccacattaatattcataaagcacagctgagtaaaaatgaagagcgatttaaactgctggagggtacttgctataatggaaagctcatttggaaggtgacagattacaagatgaagaagagagaggcggtggatgggcacacagtgtccatcttcagccagtccttctacaccagccgctgtggctaccggctctgtgctagagcatacctgaatggggatgggtcagggagggggtcacacctgtccctatactttgtggtcatgcgaggagagtttgactcactgttgcagtggccattcaggcagagggtgaccctgatgcttctggaccagagtggcaaaaagaacattatggagaccttcaaacctgaccccaatagcagcagctttaaaagacctgatggggagatgaacattgcatctggctgtccccgctttgtggctcattctgttttggagaatgccaagaacgcctacattaaagatgacactctgttcttgaaagtggccgtggacttaactgacctggaggatctctagtcactgttatggggtgataagaggacttcttggggccagaactgtggaggagagcacatttgattatcatattgacctggatttagactcaaagcacatttgtatttgcctttttccttaacgtttgaagtcagtttaaaacttctgaagtgctgtctttttacattttactctgtcccagtttgaaacttaaaactcttagaatattctcttattatttatatttttatatttcttgaaagatggtaagtttcttgaagtttttggggcgtttctcttttactggtgcttagcgcagtgtctcgggcactctaaatattgagtgttatggaggacacagaggtagcagaatcccagttgaaaatgttttgatattttattgtttggcctattgattctagacctggccttaagtctgcaaaagccatctttataaggtaggctgttccagttaagtagtgggtgatgtagttacaaagataatatgctcagtttggacctttttttcagttaaatgctaaatatatgaaaattactatacctctaagtattttcatgaaattcaccagcagtttgcaagcacagttttgcaaggctgcataagaactggtgaatggggtaagcattttcattcttcctgctgaagtaaagcagaaagtactgcatagtatatgagatatagccagctagctaaagttcagattttgttaggttcaaccctatgaaaaaaactattttcataggtcaaaaatggtaaaaaattagcagtttcataagattcaaccaaataaatatatatatacacacacacatacatatacacctatatatgtgtgtatacaaacagttcgaatgtattttggtgacagtaataaatcaatgtgaggatggatagaatttagtatatgatagagaaaatgtcataaatggataaaaggaatttacaacttgaggagaaaacctttacaatttcctatgggtgtcagaagtactctcagcgaaaactgatggctaaaacagtatctactattctctgataactttttttttgagacagagtttcattgtcacccaggctggagtacagtggcatgatctcagctcactgcaaactctgcctcccgaattcaagtgattctcctgcctcagcctcctgagtagctgggattacaggcgcccgtcaccacacccaggtaatttttgtatttttagtagagacggagttttgccatgttggccaagctgatctcaaactcctgacctcaagtgatctgcccgcctcggcctcccaaagtgctgagattacaggcatgacccaccgcgtcaagcctctgacaactattgaatttgtaagctgctatgcaaatgggcatttatataaacttgtgatgtttcttgtcagaattctgagtactctgtgaagaacagaaatgatcatattcttatgcatctatctgtatgggtctgaaggtgtatatacaaactgagatgagtccttatgactcttgataagcctgagtttaacaacaacaaaaatgccaagttgtcctgagcccttctgcgttgttatgccacttccctactgctcatatgcacgctggctcccctgggcacgcaaggatgagtatgggccatgggcccctgtagagctgcttacctggtgatgaccatgcaccttacaatttctgaacagttaaccctatagaagcatgctttatatgagtgtcttctgggaagaggaaccttcttaatctcttctgtgggattttcaaaatgttcacaacaggaatatactgaagaactagagtgtcactgctggtgaactgtggcacggttgctcaacacatcacctcggacaaattcaggaagcatttctttagcccacaagtccagacccaggtgctctgtatgtttgtttttaatattcatcatatccaagttcactctgtcttcctgagcagtggaagatcatattgctgtaacttcttttaagtagttgatgtggaaaacattttaaagtgaatttgtcaaaatgctggttttgtgttttatccaacttttgtgcatatatataaagtatgtcatggcatggtttgcttaggagttcagagttccttcatcatcgaaatagtgattaagtgatcccagaacaaggaatactagagtaaaaagcacctctttttcacaaaa

SEQ ID NO: 427850 - DNA, 7473 bp, Homo sapiens
  misc_feature (4376)..(4376): n is a, c, g, or t
  misc_feature (4414)..(4414): n is a, c, g, or t
  misc_feature (4753)..(4753): n is a, c, g, or t
  misc_feature (5048)..(5048): n is a, c, g, or t
acttatgggcggagatggatggtggatggggggcgggggaggcagcggagggagatgaggagataggcgggagcgagggagcgagggagggagcgaaggaggtagagaagagtggaggcgccaggggagggagcgtagcttggttgctccgtagtacggcggctcgcgaggaagaatcccgagcgggctccgggacggacagagaggcgggcggggatggtgtgcggggctgcggctcctgcgtccctcccagcggcgcgtgagcggcactgatttgtccctggggcggcagcgcggacccgcccggagatgaggcgtcgattagcaaggtaaaagtaacagaaccatggctcagtttccaacaccttttggtggcagcctggatatctgggccataactgtagaggaaagagcgaagcatgatcagcagttccatagtttaaagccaatatctggattcattactggtgatcaagctagaaactttttttttcaatctgggttacctcaacctgttttagcacagatatgggcactagctgacatgaataatgatggaagaatggatcaagtggagttttccatagctatgaaacttatcaaactgaagctacaaggatatcagctaccctctgcacttccccctgtcatgaaacagcaaccagttgctatttctagcgcaccagcatttggtatgggaggtatcgccagcatgccaccgcttacagctgttgctccagtgccaatgggatccattccagttgttggaatgtctccaaccctagtatcttctgttcccacagcagctgtgccccccctggctaacggggctccccctgttatacaacctctgcctgcatttgctcatcctgcagccacattgccaaagagttcttcctttagtagatctggtccagggtcacaactaaacactaaattacaaaaggcacagtcatttgatgtggccagtgtcccaccagtggcagagtgggctgttcctcagtcatcaagactgaaatacaggcaattattcaatagtcatgacaaaactatgagtggacacttaacaggtccccaagcaagaactattcttatgcagtcaagtttaccacaggctcagctggcttcaatatggaatctttctgacattgatcaagatggaaaacttacagcagaggaatttatcctggcaatgcacctcattgatgtagctatgtctggccaaccactgccacctgtcctgcctccagaatacattccaccttcttttagaagagttcgatctggcagtggtatatctgtcataagctcaacatctgtagatcagaggctaccagaggaaccagttttagaagatgaacaacaacaattagaaaagaaattacctgtaacgtttgaagataagaagcgggagaactttgaacgtggcaacctggaactggagaaacgaaggcaagctctcctggaacagcagcgcaaggagcaggagcgcctggcccagctggagcgggcggagcaggagaggaaggagcgtgagcgccaggagcaagagcgcaaaagacaactggaactggagaagcaactggaaaagcagcgggagctagaacggcagagagaggaggagaggaggaaagaaattgagaggcgagaggctgcaaaacgggaacttgaaaggcaacgacaacttgagtgggaacggaatcgaaggcaagaactactaaatcaaagaaacaaagaacaagaggacatagttgtactgaaagcaaagaaaaagactttggaatttgaattagaagctctaaatgataaaaagcatcaactagaagggaaacttcaagatatcagatgtcgattgaccacccaaaggcaagaaattgagagcacaaacaaatctagagagttgagaattgccgaaatcacccatctacagcaacaattacaggaatctcagcaaatgcttggaagacttattccagaaaaacagatactcaatgaccaattaaaacaagttcagcagaacagtttgcacagagattcacttgttacacttaaaagagccttagaagcaaaagaactagctcggcagcacctacgagaccaactggatgaagtggagaaagaaactagatcaaaactacaggagattgatattttcaataatcagctgaaggaactaagagaaatacacaataagcaacaactccagaagcaaaagtccatggaggctgaacgactgaaacagaaagaacaagaacgaaagatcatagaattagaaaaacaaaaagaagaagcccaaagacgagctcaggaaagggacaagcagtggctggagcatgtgcagcaggaggacgagcatcagagaccaagaaaactccacgaagaggaaaaactgaaaagggaggagagtgtcaaaaagaaggatggcgaggaaaaaggcaaacaggaagcacaagacaagctgggtcggcttttccatcaacaccaagaaccagctaagccagctgtccaggcaccctggtccactgcagaaaaaggtccacttaccatttctgcacaggaaaatgtaaaagtggtgtattaccgggcactgtacccctttgaatccagaagccatgatgaaatcactatccagccaggagacatagtcaatggtggatgaaagccaaactggagaacccggctggcttggaggagaattaaaaggaaagacagggtggttccctgcaaactatgcagagaaaatcccagaaaatgaggttcccgctccagtgaaaccagtgactgattcaacatctgcccctgcccccaaactggccttgcgtgagacccccgcccctttggcagtaacctcttcagagccctccacgacccctaataactgggccgacttcagctccacgtggcccaccagcacgaatgagaaaccagaaacggataactgggatgcatgggcagcccagccctctctcaccgttccaagtgccggccagttaaggcagaggtccgcctttactccagccacggccactggctcctccccgtctcctgtgctaggccagggtgaaaaggtggaggggctacaagctcaagccctatatccttggagagccaaaaaagacaaccacttaaattttaacaaaaatgatgtcatcaccgtcctggaacagcaagacatgtggtggtttggagaagttcaaggtcagaagggttggttccccaagtcttacgtgaaactcatttcagggcccataaggaagtctacaagcatggattctggttcttcagagagtcctgctagtctaaagcgagtagcctctccagcagccaagccggtcgtttcgggagaagaatttattgccatgtacacttacgagagttctgagcaaggagatttaacctttcagcaaggggatgtgattttggttaccaagaaagatggtgactggtggacaggaacagtgggcgacaaggccggagtcttcccttctaactatgtgaggcttaaagattcagagggctctggaactgctgggaaaacagggagtttaggaaaaaaacctgaaattgcccaggttattgcctcatacaccgccaccggccccgagcagctcactctcgcccctggtcagctgattttgatccgaaaaaagaacccaggtggatggtgggaaggagagctgcaagcacgtgggaaaaagcgccagataggctggttcccagctaattatgtaaagcttctaagccctgggacgagcaaaatcactccaacagagccacctaagtcaacagcattagcggcagtgtgccaggtgattgggatgtacgactacaccgcgcagaatgacgatgagctggccttcaacaagggccagatcatcaacgtcctcaacaaggaggaccctgactggtggaaaggagaagtcaatggacaagtggggctcttcccatccaattatgtgaagctgaccacagacatggacccaagccagcaatggtgttcagacttacatctcttggatatgttgaccccaactgaaagaaagcgacaaggatacatccacgagctcattgtcaccgaggagaactatgtgaatgacctgcagctggtcacagagatttttcaaaaacccctgatggagtctgagctgctgacagaaaaagaggttgctatgatttttgtgaactggaaggagctgattatgtgtaatatcaaactactaaaagcgctgagagtccgcaagaagatgtccggggagaagatgcctgtgaagatgattggagacatcctgagcgcacagctgccgcacatgcagccctacatccgcttctgcagccgccagctcaacggggctgccctgatccagcagaagacggangaggccccagacttcaaggagttcgtcaaaagattggnaatggatcctcggtgtaaagggatgccactctctagttttatactgaagcctatgcaacgggtaacaagatacccactgatcattaaaaatatcctggaaaacacccctgaaaaccacccggaccacagccacttgaagcacgccctggagaaggcggaagagctctgttcccaggtgaacgaaggggtgcgggagaaggagaactctgaccggctggagtggatccaggcccacgtgcagtgtgaaggcctgtctgagcaacttgtgttcaattcagtgaccaattgcttggggccgcgcaaatttctgcacagtgggaagctctacaaggccaagancaacaaggagctgtatggcttccttttcaacgacttcctcctgctgactcagatcacgaagcctttggggtcttctggcaccgacaaagtcttcagccccaaatcaaacctgcagtataaaatgtataaaacacctattttcctaaatgaggttctagtaaaattacccaccgacccttctggagacgagcccatcttccacatctcccacattgaccgcgtctatactctccgagcagaaagcataaatgaaaggactgcctgggtgcagaaaatcaaagctgcttctgaactntacatagagactgagaaaaagaagcgcgagaaagcgtacctggtccgttcccaaagggcaacaggcattggaaggttgatggtgaacgtggttgaaggcatcgagttgaaaccctgtcggtcacatggaaagagcaacccgtactgtgaggtgaccatgggttcccagtgccacatcaccaagacgatccaggacactctgaaccccaagtggaattccaactgccagttcttcatccgagacctggagcaggaagtcctctgcatcactgtgttcgagagggaccagttctcaccagatgattttttgggtcggacggagatccgtgtggcggacatcaagaaagaccagggctccaaaggtccagttacgaagtgtcttctgctgcacgaagtccccacgggagagattgtggtccgcttggacctgcagttgtttgatgagccgtaggcagcgggctcagggtgtgctcagcagggtcccagcccacggccacacatgctgtctggaaattgtattccttttctaagaaaccaccatttggtattcagtcacagggatatgggatggcaaagacaggcccctcaaagctcctaggaatcattctcgacaatcctccctgccccgaaacaatttcctgtttcatgaaacaaagctgtgttttcctttgtcctcactacaggtctcattatggcttctagggtcgctgaaatcccatagccctcaacagggtgcagctgggagtctagccccttcccgggcttgagggatgggtctggttactataaaatagatttataaatgcaatgtctatatttttggagaactcatgtaaccctcctgtttcttacatccaccagtccccaagtagacttcttggcctacaatgcccagtccttggtgtgagtttagaaacaattatgacggtcctgtcattgcttcagaatcccatctctcctgcagggaaatgctgcctagagctgatcactcggtgagacggtctgatcaggccctggcttagctctttgaagagctggtctatggaagtttccagcatgtgcaccgttatagccgttccttccccctctaggccttgtattaatatatgtcaatgaaaacacactggtgtattgttgcgtggattcagttctgattcccagcatgcttagaatatggtcacagaaagtcattatctagaaagtcacccctctgctggatcagatcactacaggtcactggaaaggcaactttacaatgttgggtcactgggtctcggttggcagccatgttggaaaaatctcttttggctcggaggcctgtgatatttcatagcagcagtcgttgctggtgacctgttctgtgcttgaatgtgctgaatcctgattgttgtaggacatttcaacagctctttttggtacgttccccaaaaagccatgtcctagatccccaaggcgtgaaaaggaaaaatatcaagctggaggttgggaaagaaaatgaaggcagtccattatgtggtgggtgaaagaccctaggaggatgcaagccccgcacatcccggggcaaagacctaagacacttttccaccctccaccaccccaacctcacataatatgcttgttgcaagagtcaggactttatgactatgtgccaagctgtttggtttgagttctttaatttttttttcccttaaatgccaggagatcatctggttagttagatagtaacttgatttgctaatgaaaagtgggggccgtgttttgtttgcatgttaatattctcataatcctagtttgttgtggtcatgaaatgccctttgcatgttctgttggtactggagtctagctttcctgtactagatggtgttctctttgattgtaggtccttagactttaattagggttatcaaagtgctttctaaatgatagcatcagcgttgtggcagagtacctcctttgctgggaactgaatgtgtagggttatcatttcccatgagagcccggtcatacttcaagcaatttttttaaaagtgtgtgttggaaaggacaacaaagtttacatttcatacttttaagaaatactttattatttatttattgaagatagtgtagaattttgtatcaagaacaacagacataagtattttttgaaacaagcaaatataccctgtagttagaaactttcaactgaacatgttagagaccaagtttaacttcaggcatgcatttgtttaccatttcccagcagaaaacatggttaaaatactttaagtttatattttttgatgttgttaagaaacttttaaattaaatctataaatagacatgcaactcatgctttcctatttctataaccaacaccgtttgtttagtgtatttatgaaagatatgctaccatggtagaaagaaaagtattcaatgtgtaaatt

SEQ ID NO: 427851 - DNA, 5505 bp, Homo sapiens
acttatgggcggagatggatggtggatggggggcgggggaggcagcggagggagatgaggagataggcgggagcgagggagcgagggagggagcgaaggaggtagagaagagtggaggcgccaggggagggagcgtagcttggttgctccgtagtacggcggctcgcgaggaagaatcccgagcgggctccgggacggacagagaggcgggcggggatggtgtgcggggctgcggctcctgcgtccctcccagcggcgcgtgagcggcactgatttgtccctggggcggcagcgcggacccgcccggagatgaggcgtcgattagcaaggtaaaagtaacagaaccatggctcagtttccaacaccttttggtggcagcctggatatctgggccataactgtagaggaaagagcgaagcatgatcagcagttccatagtttaaagccaatatctggattcattactggtgatcaagctagaaactttttttttcaatctgggttacctcaacctgttttagcacagatatgggcactagctgacatgaataatgatggaagaatggatcaagtggagttttccatagctatgaaacttatcaaactgaagctacaaggatatcagctaccctctgcacttccccctgtcatgaaacagcaaccagttgctatttctagcgcaccagcatttggtatgggaggtatcgccagcatgccaccgcttacagctgttgctccagtgccaatgggatccattccagttgttggaatgtctccaaccctagtatcttctgttcccacagcagctgtgccccccctggctaacggggctccccctgttatacaacctctgcctgcatttgctcatcctgcagccacattgccaaagagttcttcctttagtagatctggtccagggtcacaactaaacactaaattacaaaaggcacagtcatttgatgtggccagtgtcccaccagtggcagagtgggctgttcctcagtcatcaagactgaaatacaggcaattattcaatagtcatgacaaaactatgagtggacacttaacaggtccccaagcaagaactattcttatgcagtcaagtttaccacaggctcagctggcttcaatatggaatctttctgacattgatcaagatggaaaacttacagcagaggaatttatcctggcaatgcacctcattgatgtagctatgtctggccaaccactgccacctgtcctgcctccagaatacattccaccttcttttagaagagttcgatctggcagtggtatatctgtcataagctcaacatctgtagatcagaggctaccagaggaaccagttttagaagatgaacaacaacaattagaaaagaaattacctgtaacgtttgaagataagaagcgggagaactttgaacgtggcaacctggaactggagaaacgaaggcaagctctcctggaacagcagcgcaaggagcaggagcgcctggcccagctggagcgggcggagcaggagaggaaggagcgtgagcgccaggagcaagagcgcaaaagacaactggaactggagaagcaactggaaaagcagcgggagctagaacggcagagagaggaggagaggaggaaagaaattgagaggcgagaggctgcaaaacgggaacttgaaaggcaacgacaacttgagtgggaacggaatcgaaggcaagaactactaaatcaaagaaacaaagaacaagaggacatagttgtactgaaagcaaagaaaaagactttggaatttgaattagaagctctaaatgataaaaagcatcaactagaagggaaacttcaagatatcagatgtcgattgaccacccaaaggcaagaaattgagagcacaaacaaatctagagagttgagaattgccgaaatcacccatctacagcaacaattacaggaatctcagcaaatgcttggaagacttattccagaaaaacagatactcaatgaccaattaaaacaagttcagcagaacagtttgcacagagattcacttgttacacttaaaagagccttagaagcaaaagaactagctcggcagcacctacgagaccaactggatgaagtggagaaagaaactagatcaaaactacaggagattgatattttcaataatcagctgaaggaactaagagaaatacacaataagcaacaactccagaagcaaaagtccatggaggctgaacgactgaaacagaaagaacaagaacgaaagatcatagaattagaaaaacaaaaagaagaagcccaaagacgagctcaggaaagggacaagcagtggctggagcatgtgcagcaggaggacgagcatcagagaccaagaaaactccacgaagaggaaaaactgaaaagggaggagagtgtcaaaaagaaggatggcgaggaaaaaggcaaacaggaagcacaagacaagctgggtcggcttttccatcaacaccaagaaccagctaagccagctgtccaggcaccctggtccactgcagaaaaaggtccacttaccatttctgcacaggaaaatgtaaaagtggtgtattaccgggcactgtacccctttgaatccagaagccatgatgaaatcactatccagccaggagacatagtcaatggtggatgaaagccaaactggagaacccggctggcttggaggagaattaaaaggaaagacagggtggttccctgcaaactatgcagagaaaatcccagaaaatgaggttcccgctccagtgaaaccagtgactgattcaacatctgcccctgcccccaaactggccttgcgtgagacccccgcccctttggcagtaacctcttcagagccctccacgacccctaataactgggccgacttcagctccacgtggcccaccagcacgaatgagaaaccagaaacggataactgggatgcatgggcagcccagccctctctcaccgttccaagtgccggccagttaaggcagaggtccgcctttactccagccacggccactggctcctccccgtctcctgtgctaggccagggtgaaaaggtggaggggctacaagctcaagccctatatccttggagagccaaaaaagacaaccacttaaattttaacaaaaatgatgtcatcaccgtcctggaacagcaagacatgtggtggtttggagaagttcaaggtcagaagggttggttccccaagtcttacgtgaaactcatttcagggcccataaggaagtctacaagcatggattctggttcttcagagagtcctgctagtctaaagcgagtagcctctccagcagccaagccggtcgtttcgggagaagaatttattgccatgtacacttacgagagttctgagcaaggagatttaacctttcagcaaggggatgtgattttggttaccaagaaagatggtgactggtggacaggaacagtgggcgacaaggccggagtcttcccttctaactatgtgaggcttaaagattcagagggctctggaactgctgggaaaacagggagtttaggaaaaaaacctgaaattgcccaggttattgcctcatacaccgccaccggccccgagcagctcactctcgcccctggtcagctgattttgatccgaaaaaagaacccaggtggatggtgggaaggagagctgcaagcacgtgggaaaaagcgccagataggctggttcccagctaattatgtaaagcttctaagccctgggacgagcaaaatcactccaacagagccacctaagtcaacagcattagcggcagtgtgccaggtgattgggatgtacgactacaccgcgcagaatgacgatgagctggccttcaacaagggccagatcatcaacgtcctcaacaaggaggaccctgactggtggaaaggagaagtcaatggacaagtggggctcttcccatccaattatgtgaagctgaccacagacatggacccaagccagcaatgaatcatatgttgtccatccccccctcaggcttgaaagtcctcaaagagacccactatcccatatcactgcccagagggatgatgggagatgcagccttgatcatgtgacttccagcatgatcacctactgccttctgagtagaagaactcactgcagagcagtttacctcattttaccttagttgcatgtgatcgcaatgtttgagttattacttgcagagataggagcaaaaattacaaaaacacacagggtagtgggtccttttgtggctttcctagttactcaaattgactttcccccacctttgcacaggtgctttcaatagttttaaaattatttttaaatatatattttagctttttaataaacaaaataaataaatgacttctttgctattttggttttgcaaaaagacccactatcaaggaatgctgcatgtgctattaaaaattgttccaaatgtccataaatctgagacttgatgtattttttcattttgtccagtgttaccaactaaattgtgcagtttggggcttttcccccttaccatagaagtgcagaggagttcagtatctctgttttaaagacgtatagaatgagcccaattaaagcgaaggtgtttgtgcttgtttgtgtgtatcagctgtaccttgttgagcatgtaatacatcctgtacataagaaattagttctttccatggcaaagctattaccttgtacgatgctctaatcatattgcatttaattttattttgcacagtgaccttgtagccacatgagaaagcactctgtgtttttgttcggtctcagatttatctggttgagttggtgttttgtttggggtttttaattttgcgtgtttgcatagcataaaatcagtagacaacaccactgaggtcgttacgatcaacgatatccacagtctctttttagtctctgttacatgaagttttattccagttacttttcatggaatgacctattttgaacaagtaattttcttgacaagaaagaatgtatagaagtctccctgcaattaatttccaatgtttacattttttaactagactgtggaatttctacagattaatatgaaatggagctcatggtccgtttgtgtgttagatatgctgtagctgaagccctgtttgtcttttaaacactagttggaagctctcaataaaaatgcctgctgctcacagcacagaaaatggggcagggggagcctcaagcacaatctagctgtcctcctaaagactctgtaatgctcactcccctcgcgttctcccggcgctgtcgggaggctgtgctggtggtcgtgtagaggtccttctcctttcacatggtgcagagagcgaggacctctcctcctcgttcagttgcacttcagtattttcacggatatgaatgtaaaatatataaatatataaacctgcggctttaacaactgtaatacaaccttttgaattagttccgtgtatagataattaaattcttcatacaaaagtta

SEQ ID NO: 427852 - DNA, 235 bp, Homo sapiens
gagacggagtctggctctgtcacccaggctagagtgcgatggcgccggttgacagtggctggagcatgtgcagcaggaggacgagcatcagagaccaagaaaactccacgaagaggaaaaactgaaaagggaggagagtgtcaaaaagaaggatggcgctcaggaagcatggcactctggcgggcataccagcgggcctgccgctcacccgtgaaagcacgtcaacccactgcca

SEQ ID NO: 427853 - DNA, 6171 bp, Homo sapiens
acttatgggcggagatggatggtggatggggggcgggggaggcagcggagggagatgaggagataggcgggagcgagggagcgagggagggagcgaaggaggtagagaagagtggaggcgccaggggagggagcgtagcttggttgctccgtagtacggcggctcgcgaggaagaatcccgagcgggctccgggacggacagagaggcgggcggggatggtgtgcggggctgcggctcctgcgtccctcccagcggcgcgtgagcggcactgatttgtccctggggcggcagcgcggacccgcccggagatgaggcgtcgattagcaaggtaaaagtaacagaaccatggctcagtttccaacaccttttggtggcagcctggatatctgggccataactgtagaggaaagagcgaagcatgatcagcagttccatagtttaaagccaatatctggattcattactggtgatcaagctagaaactttttttttcaatctgggttacctcaacctgttttagcacagatatgggcactagctgacatgaataatgatggaagaatggatcaagtggagttttccatagctatgaaacttatcaaactgaagctacaaggatatcagctaccctctgcacttccccctgtcatgaaacagcaaccagttgctatttctagcgcaccagcatttggtatgggaggtatcgccagcatgccaccgcttacagctgttgctccagtgccaatgggatccattccagttgttggaatgtctccaaccctagtatcttctgttcccacagcagctgtgccccccctggctaacggggctccccctgttatacaacctctgcctgcatttgctcatcctgcagccacattgccaaagagttcttcctttagtagatctggtccagggtcacaactaaacactaaattacaaaaggcacagtcatttgatgtggccagtgtcccaccagtggcagagtgggctgttcctcagtcatcaagactgaaatacaggcaattattcaatagtcatgacaaaactatgagtggacacttaacaggtccccaagcaagaactattcttatgcagtcaagtttaccacaggctcagctggcttcaatatggaatctttctgacattgatcaagatggaaaacttacagcagaggaatttatcctggcaatgcacctcattgatgtagctatgtctggccaaccactgccacctgtcctgcctccagaatacattccaccttcttttagaagagttcgatctggcagtggtatatctgtcataagctcaacatctgtagatcagaggctaccagaggaaccagttttagaagatgaacaacaacaattagaaaagaaattacctgtaacgtttgaagataagaagcgggagaactttgaacgtggcaacctggaactggagaaacgaaggcaagctctcctggaacagcagcgcaaggagcaggagcgcctggcccagctggagcgggcggagcaggagaggaaggagcgtgagcgccaggagcaagagcgcaaaagacaactggaactggagaagcaactggaaaagcagcgggagctagaacggcagagagaggaggagaggaggaaagaaattgagaggcgagaggctgcaaaacgggaacttgaaaggcaacgacaacttgagtgggaacggaatcgaaggcaagaactactaaatcaaagaaacaaagaacaagaggacatagttgtactgaaagcaaagaaaaagactttggaatttgaattagaagctctaaatgataaaaagcatcaactagaagggaaacttcaagatatcagatgtcgattgaccacccaaaggcaagaaattgagagcacaaacaaatctagagagttgagaattgccgaaatcacccatctacagcaacaattacaggaatctcagcaaatgcttggaagacttattccagaaaaacagatactcaatgaccaattaaaacaagttcagcagaacagtttgcacagagattcacttgttacacttaaaagagccttagaagcaaaagaactagctcggcagcacctacgagaccaactggatgaagtggagaaagaaactagatcaaaactacaggagattgatattttcaataatcagctgaaggaactaagagaaatacacaataagcaacaactccagaagcaaaagtccatggaggctgaacgactgaaacagaaagaacaagaacgaaagatcatagaattagaaaaacaaaaagaagaagcccaaagacgagctcaggaaagggacaagcagtggctggagcatgtgcagcaggaggacgagcatcagagaccaagaaaactccacgaagaggaaaaactgaaaagggaggagagtgtcaaaaagaaggatggcgaggaaaaaggcaaacaggaagcacaagacaagctgggtcggcttttccatcaacaccaagaaccagctaagccagctgtccaggcaccctggtccactgcagaaaaaggtccacttaccatttctgcacaggaaaatgtaaaagtggtgtattaccgggcactgtacccctttgaatccagaagccatgatgaaatcactatccagccaggagacatagtcaatggtggatgaaagccaaactggagaacccggctggcttggaggagaattaaaaggaaagacagggtggttccctgcaaactatgcagagaaaatcccagaaaatgaggttcccgctccagtgaaaccagtgactgattcaacatctgcccctgcccccaaactggccttgcgtgagacccccgcccctttggcagtaacctcttcagagccctccacgacccctaataactgggccgacttcagctccacgtggcccaccagcacgaatgagaaaccagaaacggataactgggatgcatgggcagcccagccctctctcaccgttccaagtgccggccagttaaggcagaggtccgcctttactccagccacggccactggctcctccccgtctcctgtgctaggccagggtgaaaaggtggaggggctacaagctcaagccctatatccttggagagccaaaaaagacaaccacttaaattttaacaaaaatgatgtcatcaccgtcctggaacagcaagacatgtggtggtttggagaagttcaaggtcagaagggttggttccccaagtcttacgtgaaactcatttcagggcccataaggaagtctacaagcatggattctggttcttcagagagtcctgctagtctaaagcgagtagcctctccagcagccaagccggtcgtttcgggagaagaatttattgccatgtacacttacgagagttctgagcaaggagatttaacctttcagcaaggggatgtgattttggttaccaagaaagatggtgactggtggacaggaacagtgggcgacaaggccggagtcttcccttctaactatgtgaggcttaaagattcagagggctctggaactgctgggaaaacagggagtttaggaaaaaaacctgaaattgcccaggttattgcctcatacaccgccaccggccccgagcagctcactctcgcccctggtcagctgattttgatccgaaaaaagaacccaggtggatggtgggaaggagagctgcaagcacgtgggaaaaagcgccagataggctggttcccagctaattatgtaaagcttctaagccctgggacgagcaaaatcactccaacagagccacctaagtcaacagcattagcggcagtgtgccaggtgattgggatgtacgactacaccgcgcagaatgacgatgagctggccttcaacaagggccagatcatcaacgtcctcaacaaggaggaccctgactggtggaaaggagaagtcaatggacaagtggggctcttcccatccaattatgtgaagctgaccacagacatggacccaagccagcaatgaatcatatgttgtccatccccccctcaggcttgaaagtcctcaaagagacccactatcccatatcactgcccagagggatgatgggagatgcagccttgatcatgtgacttccagcatgatcacctactgccttctgagtagaagaactcactgcagagcagtttacctcattttaccttagttgcatgtgatcgcaatgtttgagttattacttgcagagataggagcaaaaattacaaaaacacacagggtagtgggtccttttgtggctttcctagttactcaaattgactttcccccacctttgcacaggtgctttcaatagttttaaaattatttttaaatatatattttagctttttaataaacaaaataaataaatgacttctttgctattttggttttgcaaaaagacccactatcaaggaatgctgcatgtgctattaaaaattgttccaaatgtccataaatctgagacttgatgtattttttcattttgtccagtgttaccaactaaattgtgcagtttggggcttttcccccttaccatagaagtgcagaggagttcagtatctctgttttaaagacgtatagaatgagcccaattaaagcgaaggtgtttgtgcttgtttgtgtgtatcagctgtaccttgttgagcatgtaatacatcctgtacataagaaattagttctttccatggcaaagctattaccttgtacgatgctctaatcatattgcatttaattttattttgcacagtgaccttgtagccacatgagaaagcactctgtgtttttgttcggtctcagatttatctggttgagttggtgttttgtttggggtttttaattttgcgtgtttgcatagcataaaatcagtagacaacaccactgaggtcgttacgatcaacgatatccacagtctctttttagtctctgttacatgaagttttattccagttacttttcatggaatgacctattttgaacaagtaattttcttgacaagaaagaatgtatagaagtctccctgcaattaatttccaatgtttacattttttaactagactgtggaatttctacagattaatatgaaatggagctcatggtccgtttgtgtgttagatatgctgtagctgaagccctgtttgtcttttaaacactagttggaagctctcaataaaaatgcctgctgctcacagcacagaaaatggggcagggggagcctcaagcacaatctagctgtcctcctaaagactctgtaatgctcactcccctcgcgttctcccggcgctgtcgggaggctgtgctggtggtcgtgtagaggtccttctcctttcacatggtgcagagagcgaggacctctcctcctcgttcagttgcacttcagtattttcacggatatgaatgtaaaatatataaatatataaacctgcggctttaacaactgtaatacaaccttttgaattagttccgtgtatagataattaaattcttcatacaaaagttaaaaaaaaaaaaaaaaaaaaaaaaaaaaaacctttgggggggccggggcccggaaaggtttttaagacccatccgtctggggggcgcgggcgggcccaacaggggtacgtgagacacgggcgccaacaccggcggcacccgagggaaactccggggcgcaccagacctaacgggcgggggtttccccccaaataaaaaaaggcgcgggggggcacccgggccgctttcgggaacacactcccaagtgggcttcgcgaggggccacagcggggctcataccaacgcggggcgcccaggcagcgccgatatcaatttagccccggcccggagggggttaaaaaagacggaccagccaacacacaggcaacgacggacggaccaaacgccgaccacacggagacaagcaacccaacccacgacgaaaacaagacggaaggacgaagcgagcgccgagaacgagccggaacaaccagcaaaaggacagcgacaacagcacagacagaacagacggagacgaccaaggaccgaagagacaaggcagctcacacgctacagacacacaacaagacagaacacagagaacaaaacaagaggcaccagagcgaaaaacagaaaacgaaagagacagaagacacaaacaacagagccgaagcaagaacaataaaaa

SEQ ID NO: 427854 - DNA, 5292 bp, Homo sapiens
acttatgggcggagatggatggtggatggggggcgggggaggcagcggagggagatgaggagataggcgggagcgagggagcgagggagggagcgaaggaggtagagaagagtggaggcgccaggggagggagcgtagcttggttgctccgtagtacggcggctcgcgaggaagaatcccgagcgggctccgggacggacagagaggcgggcggggatggtgtgcggggctgcggctcctgcgtccctcccagcggcgcgtgagcggcactgatttgtccctggggcggcagcgcggacccgcccggagatgaggcgtcgattagcaaggtaaaagtaacagaaccatggctcagtttccaacaccttttggtggcagcctggatatctgggccataactgtagaggaaagagcgaagcatgatcagcagttccatagtttaaagccaatatctggattcattactggtgatcaagctagaaactttttttttcaatctgggttacctcaacctgttttagcacagatatgggcactagctgacatgaataatgatggaagaatggatcaagtggagttttccatagctatgaaacttatcaaactgaagctacaaggatatcagctaccctctgcacttccccctgtcatgaaacagcaaccagttgctatttctagcgcaccagcatttggtatgggaggtatcgccagcatgccaccgcttacagctgttgctccagtgccaatgggatccattccagttgttggaatgtctccaaccctagtatcttctgttcccacagcagctgtgccccccctggctaacggggctccccctgttatacaacctctgcctgcatttgctcatcctgcagccacattgccaaagagttcttcctttagtagatctggtccagggtcacaactaaacactaaattacaaaaggcacagtcatttgatgtggccagtgtcccaccagtggcagagtgggctgttcctcagtcatcaagactgaaatacaggcaattattcaatagtcatgacaaaactatgagtggacacttaacaggtccccaagcaagaactattcttatgcagtcaagtttaccacaggctcagctggcttcaatatggaatctttctgacattgatcaagatggaaaacttacagcagaggaatttatcctggcaatgcacctcattgatgtagctatgtctggccaaccactgccacctgtcctgcctccagaatacattccaccttcttttagaagagttcgatctggcagtggtatatctgtcataagctcaacatctgtagatcagaggctaccagaggaaccagttttagaagatgaacaacaacaattagaaaagaaattacctgtaacgtttgaagataagaagcgggagaactttgaacgtggcaacctggaactggagaaacgaaggcaagctctcctggaacagcagcgcaaggagcaggagcgcctggcccagctggagcgggcggagcaggagaggaaggagcgtgagcgccaggagcaagagcgcaaaagacaactggaactggagaagcaactggaaaagcagcgggagctagaacggcagagagaggaggagaggaggaaagaaattgagaggcgagaggctgcaaaacgggaacttgaaaggcaacgacaacttgagtgggaacggaatcgaaggcaagaactactaaatcaaagaaacaaagaacaagaggacatagttgtactgaaagcaaagaaaaagactttggaatttgaattagaagctctaaatgataaaaagcatcaactagaagggaaacttcaagatatcagatgtcgattgaccacccaaaggcaagaaattgagagcacaaacaaatctagagagttgagaattgccgaaatcacccatctacagcaacaattacaggaatctcagcaaatgcttggaagacttattccagaaaaacagatactcaatgaccaattaaaacaagttcagcagaacagtttgcacagagattcacttgttacacttaaaagagccttagaagcaaaagaactagctcggcagcacctacgagaccaactggatgaagtggagaaagaaactagatcaaaactacaggagattgatattttcaataatcagctgaaggaactaagagaaatacacaataagcaacaactccagaagcaaaagtccatggaggctgaacgactgaaacagaaagaacaagaacgaaagatcatagaattagaaaaacaaaaagaagaagcccaaagacgagctcaggaaagggacaagcagtggctggagcatgtgcagcaggaggacgagcatcagagaccaagaaaactccacgaagaggaaaaactgaaaagggaggagagtgtcaaaaagaaggatggcgaggaaaaaggcaaacaggaagcacaagacaagctgggtcggcttttccatcaacaccaagaaccagctaagccagctgtccaggcaccctggtccactgcagaaaaaggtccacttaccatttctgcacaggaaaatgtaaaagtggtgtattaccgggcactgtacccctttgaatccagaagccatgatgaaatcactatccagccaggagacatagtcaatggtggatgaaagccaaactggagaacccggctggcttggaggagaattaaaaggaaagacagggtggttccctgcaaactatgcagagaaaatcccagaaaatgaggttcccgctccagtgaaaccagtgactgattcaacatctgcccctgcccccaaactggccttgcgtgagacccccgcccctttggcagtaacctcttcagagccctccacgacccctaataactgggccgacttcagctccacgtggcccaccagcacgaatgagaaaccagaaacggataactgggatgcatgggcagcccagccctctctcaccgttccaagtgccggccagttaaggcagaggtccgcctttactccagccacggccactggctcctccccgtctcctgtgctaggccagggtgaaaaggtggaggggctacaagctcaagccctatatccttggagagccaaaaaagacaaccacttaaattttaacaaaaatgatgtcatcaccgtcctggaacagcaagacatgtggtggtttggagaagttcaaggtcagaagggttggttccccaagtcttacgtgaaactcatttcagggcccataaggaagtctacaagcatggattctggttcttcagagagtcctgctagtctaaagcgagtagcctctccagcagccaagccggtcgtttcgggagaagaaattgcccaggttattgcctcatacaccgccaccggccccgagcagctcactctcgcccctggtcagctgattttgatccgaaaaaagaacccaggtggatggtgggaaggagagctgcaagcacgtgggaaaaagcgccagataggctggttcccagctaattatgtaaagcttctaagccctgggacgagcaaaatcactccaacagagccacctaagtcaacagcattagcggcagtgtgccaggtgattgggatgtacgactacaccgcgcagaatgacgatgagctggccttcaacaagggccagatcatcaacgtcctcaacaaggaggaccctgactggtggaaaggagaagtcaatggacaagtggggctcttcccatccaattatgtgaagctgaccacagacatggacccaagccagcaatgaatcatatgttgtccatccccccctcaggcttgaaagtcctcaaagagacccactatcccatatcactgcccagagggatgatgggagatgcagccttgatcatgtgacttccagcatgatcacctactgccttctgagtagaagaactcactgcagagcagtttacctcattttaccttagttgcatgtgatcgcaatgtttgagttattacttgcagagataggagcaaaaattacaaaaacacacagggtagtgggtccttttgtggctttcctagttactcaaattgactttcccccacctttgcacaggtgctttcaatagttttaaaattatttttaaatatatattttagctttttaataaacaaaataaataaatgacttctttgctattttggttttgcaaaaagacccactatcaaggaatgctgcatgtgctattaaaaattgttccaaatgtccataaatctgagacttgatgtattttttcattttgtccagtgttaccaactaaattgtgcagtttggggcttttcccccttaccatagaagtgcagaggagttcagtatctctgttttaaagacgtatagaatgagcccaattaaagcgaaggtgtttgtgcttgtttgtgtgtatcagctgtaccttgttgagcatgtaatacatcctgtacataagaaattagttctttccatggcaaagctattaccttgtacgatgctctaatcatattgcatttaattttattttgcacagtgaccttgtagccacatgagaaagcactctgtgtttttgttcggtctcagatttatctggttgagttggtgttttgtttggggtttttaattttgcgtgtttgcatagcataaaatcagtagacaacaccactgaggtcgttacgatcaacgatatccacagtctctttttagtctctgttacatgaagttttattccagttacttttcatggaatgacctattttgaacaagtaattttcttgacaagaaagaatgtatagaagtctccctgcaattaatttccaatgtttacattttttaactagactgtggaatttctacagattaatatgaaatggagctcatggtccgtttgtgtgttagatatgctgtagctgaagccctgtttgtcttttaaacactagttggaagctctcaataaaaatgcctgctgctcacagcacagaaaatggggcagggggagcctcaagcacaatctagctgtcctcctaaagactctgtaatgctcactcccctcgcgttctcccggcgctgtcgggaggctgtgctggtggtcgtgtagaggtccttctcctttcacatggtgcagagagcgaggacctctcctcctcgttcagttgcacttcagtattttcacggatatgaatgtaaaatatataaatatataaacctgcggctttaacaactgtaatacaaccttttgaattagttccgtgtatagataattaaattcttcatacaaaagtta

SEQ ID NO: 427855 - DNA, 5181 bp, Homo sapiens
acttatgggcggagatggatggtggatggggggcgggggaggcagcggagggagatgaggagataggcgggagcgagggagcgagggagggagcgaaggaggtagagaagagtggaggcgccaggggagggagcgtagcttggttgctccgtagtacggcggctcgcgaggaagaatcccgagcgggctccgggacggacagagaggcgggcggggatggtgtgcggggctgcggctcctgcgtccctcccagcggcgcgtgagcggcactgatttgtccctggggcggcagcgcggacccgcccggagatgaggcgtcgattagcaaggtaaaagtaacagaaccatggctcagtttccaacaccttttggtggcagcctggatatctgggccataactgtagaggaaagagcgaagcatgatcagcagttccatagtttaaagccaatatctggattcattactggtgatcaagctagaaactttttttttcaatctgggttacctcaacctgttttagcacagatatgggcactagctgacatgaataatgatggaagaatggatcaagtggagttttccatagctatgaaacttatcaaactgaagctacaaggatatcagctaccctctgcacttccccctgtcatgaaacagcaaccagttgctatttctagcgcaccagcatttgcagctgtgccccccctggctaacggggctccccctgttatacaacctctgcctgcatttgctcatcctgcagccacattgccaaagagttcttcctttagtagatctggtccagggtcacaactaaacactaaattacaaaaggcacagtcatttgatgtggccagtgtcccaccagtggcagagtgggctgttcctcagtcatcaagactgaaatacaggcaattattcaatagtcatgacaaaactatgagtggacacttaacaggtccccaagcaagaactattcttatgcagtcaagtttaccacaggctcagctggcttcaatatggaatctttctgacattgatcaagatggaaaacttacagcagaggaatttatcctggcaatgcacctcattgatgtagctatgtctggccaaccactgccacctgtcctgcctccagaatacattccaccttcttttagaagagttcgatctggcagtggtatatctgtcataagctcaacatctgtagatcagaggctaccagaggaaccagttttagaagatgaacaacaacaattagaaaagaaattacctgtaacgtttgaagataagaagcgggagaactttgaacgtggcaacctggaactggagaaacgaaggcaagctctcctggaacagcagcgcaaggagcaggagcgcctggcccagctggagcgggcggagcaggagaggaaggagcgtgagcgccaggagcaagagcgcaaaagacaactggaactggagaagcaactggaaaagcagcgggagctagaacggcagagagaggaggagaggaggaaagaaattgagaggcgagaggctgcaaaacgggaacttgaaaggcaacgacaacttgagtgggaacggaatcgaaggcaagaactactaaatcaaagaaacaaagaacaagaggacatagttgtactgaaagcaaagaaaaagactttggaatttgaattagaagctctaaatgataaaaagcatcaactagaagggaaacttcaagatatcagatgtcgattgaccacccaaaggcaagaaattgagagcacaaacaaatctagagagttgagaattgccgaaatcacccatctacagcaacaattacaggaatctcagcaaatgcttggaagacttattccagaaaaacagatactcaatgaccaattaaaacaagttcagcagaacagtttgcacagagattcacttgttacacttaaaagagccttagaagcaaaagaactagctcggcagcacctacgagaccaactggatgaagtggagaaagaaactagatcaaaactacaggagattgatattttcaataatcagctgaaggaactaagagaaatacacaataagcaacaactccagaagcaaaagtccatggaggctgaacgactgaaacagaaagaacaagaacgaaagatcatagaattagaaaaacaaaaagaagaagcccaaagacgagctcaggaaagggacaagcagtggctggagcatgtgcagcaggaggacgagcatcagagaccaagaaaactccacgaagaggaaaaactgaaaagggaggagagtgtcaaaaagaaggatggcgaggaaaaaggcaaacaggaagcacaagacaagctgggtcggcttttccatcaacaccaagaaccagctaagccagctgtccaggcaccctggtccactgcagaaaaaggtccacttaccatttctgcacaggaaaatgtaaaagtggtgtattaccgggcactgtacccctttgaatccagaagccatgatgaaatcactatccagccaggagacatagtcaatggtggatgaaagccaaactggagaacccggctggcttggaggagaattaaaaggaaagacagggtggttccctgcaaactatgcagagaaaatcccagaaaatgaggttcccgctccagtgaaaccagtgactgattcaacatctgcccctgcccccaaactggccttgcgtgagacccccgcccctttggcagtaacctcttcagagccctccacgacccctaataactgggccgacttcagctccacgtggcccaccagcacgaatgagaaaccagaaacggataactgggatgcatgggcagcccagccctctctcaccgttccaagtgccggccagttaaggcagaggtccgcctttactccagccacggccactggctcctccccgtctcctgtgctaggccagggtgaaaaggtggaggggctacaagctcaagccctatatccttggagagccaaaaaagacaaccacttaaattttaacaaaaatgatgtcatcaccgtcctggaacagcaagacatgtggtggtttggagaagttcaaggtcagaagggttggttccccaagtcttacgtgaaactcatttcagggcccataaggaagtctacaagcatggattctggttcttcagagagtcctgctagtctaaagcgagtagcctctccagcagccaagccggtcgtttcgggagaagaaattgcccaggttattgcctcatacaccgccaccggccccgagcagctcactctcgcccctggtcagctgattttgatccgaaaaaagaacccaggtggatggtgggaaggagagctgcaagcacgtgggaaaaagcgccagataggctggttcccagctaattatgtaaagcttctaagccctgggacgagcaaaatcactccaacagagccacctaagtcaacagcattagcggcagtgtgccaggtgattgggatgtacgactacaccgcgcagaatgacgatgagctggccttcaacaagggccagatcatcaacgtcctcaacaaggaggaccctgactggtggaaaggagaagtcaatggacaagtggggctcttcccatccaattatgtgaagctgaccacagacatggacccaagccagcaatgaatcatatgttgtccatccccccctcaggcttgaaagtcctcaaagagacccactatcccatatcactgcccagagggatgatgggagatgcagccttgatcatgtgacttccagcatgatcacctactgccttctgagtagaagaactcactgcagagcagtttacctcattttaccttagttgcatgtgatcgcaatgtttgagttattacttgcagagataggagcaaaaattacaaaaacacacagggtagtgggtccttttgtggctttcctagttactcaaattgactttcccccacctttgcacaggtgctttcaatagttttaaaattatttttaaatatatattttagctttttaataaacaaaataaataaatgacttctttgctattttggttttgcaaaaagacccactatcaaggaatgctgcatgtgctattaaaaattgttccaaatgtccataaatctgagacttgatgtattttttcattttgtccagtgttaccaactaaattgtgcagtttggggcttttcccccttaccatagaagtgcagaggagttcagtatctctgttttaaagacgtatagaatgagcccaattaaagcgaaggtgtttgtgcttgtttgtgtgtatcagctgtaccttgttgagcatgtaatacatcctgtacataagaaattagttctttccatggcaaagctattaccttgtacgatgctctaatcatattgcatttaattttattttgcacagtgaccttgtagccacatgagaaagcactctgtgtttttgttcggtctcagatttatctggttgagttggtgttttgtttggggtttttaattttgcgtgtttgcatagcataaaatcagtagacaacaccactgaggtcgttacgatcaacgatatccacagtctctttttagtctctgttacatgaagttttattccagttacttttcatggaatgacctattttgaacaagtaattttcttgacaagaaagaatgtatagaagtctccctgcaattaatttccaatgtttacattttttaactagactgtggaatttctacagattaatatgaaatggagctcatggtccgtttgtgtgttagatatgctgtagctgaagccctgtttgtcttttaaacactagttggaagctctcaataaaaatgcctgctgctcacagcacagaaaatggggcagggggagcctcaagcacaatctagctgtcctcctaaagactctgtaatgctcactcccctcgcgttctcccggcgctgtcgggaggctgtgctggtggtcgtgtagaggtccttctcctttcacatggtgcagagagcgaggacctctcctcctcgttcagttgcacttcagtattttcacggatatgaatgtaaaatatataaatatataaacctgcggctttaacaactgtaatacaaccttttgaattagttccgtgtatagataattaaattcttcatacaaaagtta

SEQ ID NO: 427856 - DNA, 5088 bp, Homo sapiens
acttatgggcggagatggatggtggatggggggcgggggaggcagcggagggagatgaggagataggcgggagcgagggagcgagggagggagcgaaggaggtagagaagagtggaggcgccaggggagggagcgtagcttggttgctccgtagtacggcggctcgcgaggaagaatcccgagcgggctccgggacggacagagaggcgggcggggatggtgtgcggggctgcggctcctgcgtccctcccagcggcgcgtgagcggcactgatttgtccctggggcggcagcgcggacccgcccggagatgaggcgtcgattagcaaggtaaaagtaacagaaccatggctcagtttccaacaccttttggtggcagcctggatatctgggccataactgtagaggaaagagcgaagcatgatcagcagttccatagtttaaagccaatatctggattcattactggtgatcaagctagaaactttttttttcaatctgggttacctcaacctgttttagcacagatatgggcactagctgacatgaataatgatggaagaatggatcaagtggagttttccatagctatgaaacttatcaaactgaagctacaaggatatcagctaccctctgcacttccccctgtcatgaaacagcaaccagttgctatttctagcgcaccagcatttggtatgggaggtatcgccagcatgccaccgcttacagctgttgctccagtgccaatgggatccattccagttgttggaatgtctccaaccctagtatcttctgttcccacagcagctgtgccccccctggctaacggggctccccctgttatacaacctctgcctgcatttgctcatcctgcagccacattgccaaagagttcttcctttagtagatctggtccagggtcacaactaaacactaaattacaaaaggcacagtcatttgatgtggccagtgtcccaccagtggcagagtgggctgttcctcagtcatcaagactgaaatacaggcaattattcaatagtcatgacaaaactatgagtggacacttaacaggtccccaagcaagaactattcttatgcagtcaagtttaccacaggctcagctggcttcaatatggaatctttctgacattgatcaagatggaaaacttacagcagaggaatttatcctggcaatgcacctcattgatgtagctatgtctggccaaccactgccacctgtcctgcctccagaatacattccaccttcttttagaagagttcgatctggcagtggtatatctgtcataagctcaacatctgtagatcagaggctaccagaggaaccagttttagaagatgaacaacaacaattagaaaagaaattacctgtaacgtttgaagataagaagcgggagaactttgaacgtggcaacctggaactggagaaacgaaggcaagctctcctggaacagcagcgcaaggagcaggagcgcctggcccagctggagcgggcggagcaggagaggaaggagcgtgagcgccaggagcaagagcgcaaaagacaactggaactggagaagcaactggaaaagcagcgggagctagaacggcagagagaggaggagaggaggaaagaaattgagaggcgagaggctgcaaaacgggaacttgaaaggcaacgacaacttgagtgggaacggaatcgaaggcaagaactactaaatcaaagaaacaaagaacaagaggacatagttgtactgaaagcaaagaaaaagactttggaatttgaattagaagctctaaatgataaaaagcatcaactagaagggaaacttcaagatatcagatgtcgattgaccacccaaaggcaagaaattgagagcacaaacaaatctagagagttgagaattgccgaaatcacccatctacagcaacaattacaggaatctcagcaaatgcttggaagacttattccagaaaaacagatactcaatgaccaattaaaacaagttcagcagaacagtttgcacagagattcacttgttacacttaaaagagccttagaagcaaaagaactagctcggcagcacctacgagaccaactggatgaagtggagaaagaaactagatcaaaactacaggaggacgagcatcagagaccaagaaaactccacgaagaggaaaaactgaaaagggaggagagtgtcaaaaagaaggatggcgaggaaaaaggcaaacaggaagcacaagacaagctgggtcggcttttccatcaacaccaagaaccagctaagccagctgtccaggcaccctggtccactgcagaaaaaggtccacttaccatttctgcacaggaaaatgtaaaagtggtgtattaccgggcactgtacccctttgaatccagaagccatgatgaaatcactatccagccaggagacatagtcaatggtggatgaaagccaaactggagaacccggctggcttggaggagaattaaaaggaaagacagggtggttccctgcaaactatgcagagaaaatcccagaaaatgaggttcccgctccagtgaaaccagtgactgattcaacatctgcccctgcccccaaactggccttgcgtgagacccccgcccctttggcagtaacctcttcagagccctccacgacccctaataactgggccgacttcagctccacgtggcccaccagcacgaatgagaaaccagaaacggataactgggatgcatgggcagcccagccctctctcaccgttccaagtgccggccagttaaggcagaggtccgcctttactccagccacggccactggctcctccccgtctcctgtgctaggccagggtgaaaaggtggaggggctacaagctcaagccctatatccttggagagccaaaaaagacaaccacttaaattttaacaaaaatgatgtcatcaccgtcctggaacagcaagacatgtggtggtttggagaagttcaaggtcagaagggttggttccccaagtcttacgtgaaactcatttcagggcccataaggaagtctacaagcatggattctggttcttcagagagtcctgctagtctaaagcgagtagcctctccagcagccaagccggtcgtttcgggagaagaaattgcccaggttattgcctcatacaccgccaccggccccgagcagctcactctcgcccctggtcagctgattttgatccgaaaaaagaacccaggtggatggtgggaaggagagctgcaagcacgtgggaaaaagcgccagataggctggttcccagctaattatgtaaagcttctaagccctgggacgagcaaaatcactccaacagagccacctaagtcaacagcattagcggcagtgtgccaggtgattgggatgtacgactacaccgcgcagaatgacgatgagctggccttcaacaagggccagatcatcaacgtcctcaacaaggaggaccctgactggtggaaaggagaagtcaatggacaagtggggctcttcccatccaattatgtgaagctgaccacagacatggacccaagccagcaatgaatcatatgttgtccatccccccctcaggcttgaaagtcctcaaagagacccactatcccatatcactgcccagagggatgatgggagatgcagccttgatcatgtgacttccagcatgatcacctactgccttctgagtagaagaactcactgcagagcagtttacctcattttaccttagttgcatgtgatcgcaatgtttgagttattacttgcagagataggagcaaaaattacaaaaacacacagggtagtgggtccttttgtggctttcctagttactcaaattgactttcccccacctttgcacaggtgctttcaatagttttaaaattatttttaaatatatattttagctttttaataaacaaaataaataaatgacttctttgctattttggttttgcaaaaagacccactatcaaggaatgctgcatgtgctattaaaaattgttccaaatgtccataaatctgagacttgatgtattttttcattttgtccagtgttaccaactaaattgtgcagtttggggcttttcccccttaccatagaagtgcagaggagttcagtatctctgttttaaagacgtatagaatgagcccaattaaagcgaaggtgtttgtgcttgtttgtgtgtatcagctgtaccttgttgagcatgtaatacatcctgtacataagaaattagttctttccatggcaaagctattaccttgtacgatgctctaatcatattgcatttaattttattttgcacagtgaccttgtagccacatgagaaagcactctgtgtttttgttcggtctcagatttatctggttgagttggtgttttgtttggggtttttaattttgcgtgtttgcatagcataaaatcagtagacaacaccactgaggtcgttacgatcaacgatatccacagtctctttttagtctctgttacatgaagttttattccagttacttttcatggaatgacctattttgaacaagtaattttcttgacaagaaagaatgtatagaagtctccctgcaattaatttccaatgtttacattttttaactagactgtggaatttctacagattaatatgaaatggagctcatggtccgtttgtgtgttagatatgctgtagctgaagccctgtttgtcttttaaacactagttggaagctctcaataaaaatgcctgctgctcacagcacagaaaatggggcagggggagcctcaagcacaatctagctgtcctcctaaagactctgtaatgctcactcccctcgcgttctcccggcgctgtcgggaggctgtgctggtggtcgtgtagaggtccttctcctttcacatggtgcagagagcgaggacctctcctcctcgttcagttgcacttcagtattttcacggatatgaatgtaaaatatataaatatataaacctgcggctttaacaactgtaatacaaccttttgaattagttccgtgtatagataattaaattcttcatacaaaagtta

SEQ ID NO: 427857 - DNA, 5283 bp, Homo sapiens
acttatgggcggagatggatggtggatggggggcgggggaggcagcggagggagatgaggagataggcgggagcgagggagcgagggagggagcgaaggaggtagagaagagtggaggcgccaggggagggagcgtagcttggttgctccgtagtacggcggctcgcgaggaagaatcccgagcgggctccgggacggacagagaggcgggcggggatggtgtgcggggctgcggctcctgcgtccctcccagcggcgcgtgagcggcactgatttgtccctggggcggcagcgcggacccgcccggagatgaggcgtcgattagcaaggtaaaagtaacagaaccatggctcagtttccaacaccttttggtggcagcctggatatctgggccataactgtagaggaaagagcgaagcatgatcagcagttccatagtttaaagccaatatctggattcattactggtgatcaagctagaaactttttttttcaatctgggttacctcaacctgttttagcacagatatgggcactagctgacatgaataatgatggaagaatggatcaagtggagttttccatagctatgaaacttatcaaactgaagctacaaggatatcagctaccctctgcacttccccctgtcatgaaacagcaaccagttgctatttctagcgcaccagcatttggtatgggaggtatcgccagcatgccaccgcttacagctgttgctccagtgccaatgggatccattccagttgttggaatgtctccaaccctagtatcttctgttcccacagcagctgtgccccccctggctaacggggctccccctgttatacaacctctgcctgcatttgctcatcctgcagccacattgccaaagagttcttcctttagtagatctggtccagggtcacaactaaacactaaattacaaaaggcacagtcatttgatgtggccagtgtcccaccagtggcagagtgggctgttcctcagtcatcaagactgaaatacaggcaattattcaatagtcatgacaaaactatgagtggacacttaacaggtccccaagcaagaactattcttatgcagtcaagtttaccacaggctcagctggcttcaatatggaatctttctgacattgatcaagatggaaaacttacagcagaggaatttatcctggcaatgcacctcattgatgtagctatgtctggccaaccactgccacctgtcctgcctccagaatacattccaccttcttttagaagagttcgatctggcagtggtatatctgtcataagctcaacatctgtagatcagaggctaccagaggaaccagttttagaagatgaacaacaacaattagaaaagaaattacctgtaacgtttgaagataagaagcgggagaactttgaacgtggcaacctggaactggagaaacgaaggcaagctctcctggaacagcagcgcaaggagcaggagcgcctggcccagctggagcgggcggagcaggagaggaaggagcgtgagcgccaggagcaagagcgcaaaagacaactggaactggagaagcaactggaaaagcagcgggagctagaacggcagagagaggaggagaggaggaaagaaattgagaggcgagaggctgcaaaacgggaacttgaaaggcaacgacaacttgagtgggaacggaatcgaaggcaagaactactaaatcaaagaaacaaagaacaagaggacatagttgtactgaaagcaaagaaaaagactttggaatttgaattagaagctctaaatgataaaaagcatcaactagaagggaaacttcaagatatcagatgtcgattgaccacccaaaggcaagaaattgagagcacaaacaaatctagagagttgagaattgccgaaatcacccatctacagcaacaattacaggaatctcagcaaatgcttggaagacttattccagaaaaacagatactcaatgaccaattaaaacaagttcagcagaacagtttgcacagagattcacttgttacacttaaaagagccttagaagcaaaagaactagctcggcagcacctacgagaccaactggatgaagtggagaaagaaactagatcaaaactacaggagattgatattttcaataatcagctgaaggaactaagagaaatacacaataagcaacaactccagaagcaaaagtccatggaggctgaacgactgaaacagaaagaacaagaacgaaagatcatagaattagaaaaacaaaaagaagaagcccaaagacgagctcaggaaagggacaagcagtggctggagcatgtgcagcaggaggacgagcatcagagaccaagaaaactccacgaagaggaaaaactgaaaagggaggagagtgtcaaaaagaaggatggcgaggaaaaaggcaaacaggaagcacaagacaagctgggtcggcttttccatcaacaccaagaaccagctaagccagctgtccaggcaccctggtccactgcagaaaaaggtccacttaccatttctgcacaggaaaatgtaaaagtggtgtattaccgggcactgtacccctttgaatccagaagccatgatgaaatcactatccagccaggagacatagtcaatggtggatgaaagccaaactggagaacccggctggcttggaggagaattaaaaggaaagacagggtggttccctgcaaactatgcagagaaaatcccagaaaatgaggttcccgctccagtgaaaccagtgactgattcaacatctgcccctgcccccaaactggccttgcgtgagacccccgcccctttggcagtaacctcttcagagccctccacgacccctaataactgggccgacttcagctccacgtggcccaccagcacgaatgagaaaccagaaacggataactgggatgcatgggcagcccagccctctctcaccgttccaagtgccggccagttaaggcagaggtccgcctttactccagccacggccactggctcctccccgtctcctgtgctaggccagggtgaaaaggtggaggggctacaagctcaagccctatatccttggagagccaaaaaagacaaccacttaaattttaacaaaaatgatgtcatcaccgtcctggaacagcaagacatgtggtggtttggagaagttcaaggtcagaagggttggttccccaagtcttacgtgaaactcatttcagggcccataaggaagtctacaagcatggattctggttcttcagagagtcctgctagtctaaagcgagtagcctctccagcagccaagccggtcgtttcgggagaagaatttattgccatgtacacttacgagagttctgagcaaggagatttaacctttcagcaaggggatgtgattttggttaccaagaaagatggtgactggtggacaggaacagtgggcgacaaggccggagtcttcccttctaactatgtgaggcttaaagattcagagggctctggaactgctgggaaaacagggagtttaggaaaaaaacctgaaattgcccaggttattgcctcatacaccgccaccggccccgagcagctcactctcgcccctggtcagctgattttgatccgaaaaaagaacccaggtggatggtgggaaggagagctgcaagcacgtgggaaaaagcgccagataggctggttcccagctaattatgtaaagcttctaagccctgggacgagcaaaatcactccaacagagccacctaagtcaacagcattagcggcagtgtgccaggtgattgggatgtacgactacaccgcgcagaatgacgatgagctggccttcaacaagggccagatcatcaacgtcctcaacaaggaggaccctgactggtggaaaggagaagtcaatggacaagtggggctcttcccatccaattatgtgaagctgaccacagacatggacccaagccagcaatgaatcatatgttgtccatccccccctcaggcttgaaagtccttttgtggctttcctagttactcaaattgactttcccccacctttgcacaggtgctttcaatagttttaaaattatttttaaatatatattttagctttttaataaacaaaataaataaatgacttctttgctattttggttttgcaaaaagacccactatcaaggaatgctgcatgtgctattaaaaattgttccaaatgtccataaatctgagacttgatgtattttttcattttgtccagtgttaccaactaaattgtgcagtttggggcttttcccccttaccatagaagtgcagaggagttcagtatctctgttttaaagacgtatagaatgagcccaattaaagcgaaggtgtttgtgcttgtttgtgtgtatcagctgtaccttgttgagcatgtaatacatcctgtacataagaaattagttctttccatggcaaagctattaccttgtacgatgctctaatcatattgcatttaattttattttgcacagtgaccttgtagccacatgagaaagcactctgtgtttttgttcggtctcagatttatctggttgagttggtgttttgtttggggtttttaattttgcgtgtttgcatagcataaaatcagtagacaacaccactgaggtcgttacgatcaacgatatccacagtctctttttagtctctgttacatgaagttttattccagttacttttcatggaatgacctattttgaacaagtaattttcttgacaagaaagaatgtatagaagtctccctgcaattaatttccaatgtttacattttttaactagactgtggaatttctacagattaatatgaaatggagctcatggtccgtttgtgtgttagatatgctgtagctgaagccctgtttgtcttttaaacactagttggaagctctcaataaaaatgcctgctgctcacagcacagaaaatggggcagggggagcctcaagcacaatctagctgtcctcctaaagactctgtaatgctcactcccctcgcgttctcccggcgctgtcgggaggctgtgctggtggtcgtgtagaggtccttctcctttcacatggtgcagagagcgaggacctctcctcctcgttcagttgcacttcagtattttcacggatatgaatgtaaaatatataaatatataaacctgcggctttaacaactgtaatacaaccttttgaattagttccgtgtatagataattaaattcttcatacaaaagtta

SEQ ID NO: 427858 - DNA, 5451 bp, Homo sapiens
acttatgggcggagatggatggtggatggggggcgggggaggcagcggagggagatgaggagataggcgggagcgagggagcgagggagggagcgaaggaggtagagaagagtggaggcgccaggggagggagcgtagcttggttgctccgtagtacggcggctcgcgaggaagaatcccgagcgggctccgggacggacagagaggcgggcggggatggtgtgcggggctgcggctcctgcgtccctcccagcggcgcgtgagcggcactgatttgtccctggggcggcagcgcggacccgcccggagatgaggcgtcgattagcaaggtaaaagtaacagaaccatggctcagtttccaacaccttttggtggcagcctggatatctgggccataactgtagaggaaagagcgaagcatgatcagcagttccatagtttaaagccaatatctggattcattactggtgatcaagctagaaactttttttttcaatctgggttacctcaacctgttttagcacagatatgggcactagctgacatgaataatgatggaagaatggatcaagtggagttttccatagctatgaaacttatcaaactgaagctacaaggatatcagctaccctctgcacttccccctgtcatgaaacagcaaccagttgctatttctagcgcaccagcatttggtatgggaggtatcgccagcatgccaccgcttacagctgttgctccagtgccaatgggatccattccagttgttggaatgtctccaaccctagtatcttctgttcccacagcagctgtgccccccctggctaacggggctccccctgttatacaacctctgcctgcatttgctcatcctgcagccacattgccaaagagttcttcctttagtagatctggtccagggtcacaactaaacactaaattacaaaaggcacagtcatttgatgtggccagtgtcccaccagtggcagagtgggctgttcctcagtcatcaagactgaaatacaggcaattattcaatagtcatgacaaaactatgagtggacacttaacaggtccccaagcaagaactattcttatgcagtcaagtttaccacaggctcagctggcttcaatatggaatctttctgacattgatcaagatggaaaacttacagcagaggaatttatcctggcaatgcacctcattgatgtagctatgtctggccaaccactgccacctgtcctgcctccagaatacattccaccttcttttagaagagttcgatctggcagtggtatatctgtcataagctcaacatctgtagatcagaggctaccagaggaaccagttttagaagatgaacaacaacaattagaaaagaaattacctgtaacgtttgaagataagaagcgggagaactttgaacgtggcaacctggaactggagaaacgaaggcaagctctcctggaacagcagcgcaaggagcaggagcgcctggcccagctggagcgggcggagcaggagaggaaggagcgtgagcgccaggagcaagagcgcaaaagacaactggaactggagaagcaactggaaaagcagcgggagctagaacggcagagagaggaggagaggaggaaagaaattgagaggcgagaggctgcaaaacgggaacttgaaaggcaacgacaacttgagtgggaacggaatcgaaggcaagaactactaaatcaaagaaacaaagaacaagaggacatagttgtactgaaagcaaagaaaaagactttggaatttgaattagaagctctaaatgataaaaagcatcaactagaagggaaacttcaagatatcagatgtcgattgaccacccaaaggcaagaaattgagagcacaaacaaatctagagagttgagaattgccgaaatcacccatctacagcaacaattacaggaatctcagcaaatgcttggaagacttattccagaaaaacagatactcaatgaccaattaaaacaagttcagcagaacagtttgcacagagattcacttgttacacttaaaagagccttagaagcaaaagaactagctcggcagcacctacgagaccaactggatgaagtggagaaagaaactagatcaaaactacaggagattgatattttcaataatcagctgaaggaactaagagaaatacacaataagcaacaactccagaagcaaaagtccatggaggctgaacgactgaaacagaaagaacaagaacgaaagatcatagaattagaaaaacaaaaagaagaagcccaaagacgagctcaggaaagggacaagcagtggctggagcatgtgcagcaggaggacgagcatcagagaccaagaaaactccacgaagaggaaaaactgaaaagggaggagagtgtcaaaaagaaggatggcgaggaaaaaggcaaacaggaagcacaagacaagctgggtcggcttttccatcaacaccaagaaccagctaagccagctgtccaggcaccctggtccactgcagaaaaaggtccacttaccatttctgcacaggaaaatgtaaaagtggtgtattaccgggcactgtacccctttgaatccagaagccatgatgaaatcactatccagccaggagacatagtcaatggtggatgaaagccaaactggagaacccggctggcttggaggagaattaaaaggaaagacagggtggttccctgcaaactatgcagagaaaatcccagaaaatgaggttcccgctccagtgaaaccagtgactgattcaacatctgcccctgcccccaaactggccttgcgtgagacccccgcccctttggcagtaacctcttcagagccctccacgacccctaataactgggccgacttcagctccacgtggcccaccagcacgaatgagaaaccagaaacggataactgggatgcatgggcagcccagccctctctcaccgttccaagtgccggccagttaaggcagaggtccgcctttactccagccacggccactggctcctccccgtctcctgtgctaggccagggtgaaaaggtggaggggctacaagctcaagccctatatccttggagagccaaaaaagacaaccacttaaattttaacaaaaatgatgtcatcaccgtcctggaacagcaagacatgtggtggtttggagaagttcaaggtcagaagggttggttccccaagtcttacgtgaaactcatttcagggcccataaggaagtctacaagcatggattctggttcttcagagagtcctgctagtctaaagcgagtagcctctccagcagccaagccggtcgtttcgggagaagaatttattgccatgtacacttacgagagttctgagcaaggagatttaacctttcagcaaggggatgtgattttggttaccaagaaagatggtgactggtggacaggaacagtgggcgacaaggccggagtcttcccttctaactatgtgaggcttaaagattcagagggctctggaactgctgggaaaacagggagtttaggaaaaaaacctgaaattgcccaggttattgcctcatacaccgccaccggccccgagcagctcactctcgcccctggtcagctgattttgatccgaaaaaagaacccaggtggatggtgggaaggagagctgcaagcacgtgggaaaaagcgccagataggctggttcccagctaattatgtaaagcttctaagccctgggacgagcaaaatcactccaacagagccacctaagtcaacagcattagcggcagtgtgccaggtgattgggatgtacgactacaccgcgcagaatgacgatgagctggccttcaacaagggccagatcatcaacgtcctcaacaaggaggaccctgactggtggaaaggagaagtcaatggacaagtggggctcttcccatccaattatgtgaagctgaccacagacatggacccaagccagcaatgaatcatatgttgtccatccccccctcaggcttgaaagtcctcaaagagacccactatcccatatcactgcccagagggatgatgggagatgcagccttgatcatgtgacttccagcatgatcacctactgccttctgagtagaagaactcactgcagagcagtttacctcattttaccttagttgcatgtgatcgcaatgtttgagttattacttgcagagataggagcaaaaattacaaaaacacacagggtagtgggtccttttgtggctttcctagttactcaaattgactttcccccacctttgcacaggtgctttcaatagttttaaaattatttttaaatatatattttagctttttaataaacaaaataaataaatgacttctttgctattttggttttgcaaaaagacccactatcaaggaatgctgcatgtgctattaccagtgttaccaactaaattgtgcagtttggggcttttcccccttaccatagaagtgcagaggagttcagtatctctgttttaaagacgtatagaatgagcccaattaaagcgaaggtgtttgtgcttgtttgtgtgtatcagctgtaccttgttgagcatgtaatacatcctgtacataagaaattagttctttccatggcaaagctattaccttgtacgatgctctaatcatattgcatttaattttattttgcacagtgaccttgtagccacatgagaaagcactctgtgtttttgttcggtctcagatttatctggttgagttggtgttttgtttggggtttttaattttgcgtgtttgcatagcataaaatcagtagacaacaccactgaggtcgttacgatcaacgatatccacagtctctttttagtctctgttacatgaagttttattccagttacttttcatggaatgacctattttgaacaagtaattttcttgacaagaaagaatgtatagaagtctccctgcaattaatttccaatgtttacattttttaactagactgtggaatttctacagattaatatgaaatggagctcatggtccgtttgtgtgttagatatgctgtagctgaagccctgtttgtcttttaaacactagttggaagctctcaataaaaatgcctgctgctcacagcacagaaaatggggcagggggagcctcaagcacaatctagctgtcctcctaaagactctgtaatgctcactcccctcgcgttctcccggcgctgtcgggaggctgtgctggtggtcgtgtagaggtccttctcctttcacatggtgcagagagcgaggacctctcctcctcgttcagttgcacttcagtattttcacggatatgaatgtaaaatatataaatatataaacctgcggctttaacaactgtaatacaaccttttgaattagttccgtgtatagataattaaattcttcatacaaaagtta

SEQ ID NO: 427859 - DNA, 4639 bp, Homo sapiens
cagaagtacccacagcagaatagatcatgtgtcccaccagtggcagagtgggctgttcctcagtcatcaagactgaaatacaggcaattattcaatagtcatgacaaaactatgagtggacacttaacagatggagcttcactcttgttgcccaggccggagtgcaatggtgtgatctcagctcactgcaatctccacctcctgggttcaagtgagtctcctgcctcagcctcccaagtagctgggattacaggcatgtaccaccacgcccggctaattttgtatttttagtagaaacagggtttcaccatgttgctcaggctggtctcaaactcctgacctcaggtgatccacccacctcagcctcccaaagtgctgggattacaggcatgagccaccacacccggcccactgaaggtccccaagcaagaactattcttatgcagtcaagtttaccacaggctcagctggcttcaatatggaatctttctgacattgatcaagatggaaaacttacagcagaggaatttatcctggcaatgcacctcattgatgtagctatgtctggccaaccactgccacctgtcctgcctccagaatacattccaccttcttttagaagagttcgatctggcagtggtatatctgtcataagctcaacatctgtagatcagaggctaccagaggaaccagttttagaagatgaacaacaacaattagaaaagaaattacctgtaacgtttgaagataagaagcgggagaactttgaacgtggcaacctggaactggagaaacgaaggcaagctctcctggaacagcagcgcaaggagcaggagcgcctggcccagctggagcgggcggagcaggagaggaaggagcgtgagcgccaggagcaagagcgcaaaagacaactggaactggagaagcaactggaaaagcagcgggagctagaacggcagagagaggaggagaggaggaaagaaattgagaggcgagaggctgcaaaacgggaacttgaaaggcaacgacaacttgagtgggaacggaatcgaaggcaagaactactaaatcaaagaaacaaagaacaagaggacatagttgtactgaaagcaaagaaaaagactttggaatttgaattagaagctctaaatgataaaaagcatcaactagaagggaaacttcaagatatcagatgtcgattgaccacccaaaggcaagaaattgagagcacaaacaaatctagagagttgagaattgccgaaatcacccatctacagcaacaattacaggaatctcagcaaatgcttggaagacttattccagaaaaacagatactcaatgaccaattaaaacaagttcagcagaacagtttgcacagagattcacttgttacacttaaaagagccttagaagcaaaagaactagctcggcagcacctacgagaccaactggatgaagtggagaaagaaactagatcaaaactacaggagattgatattttcaataatcagctgaaggaactaagagaaatacacaataagcaacaactccagaagcaaaagtccatggaggctgaacgactgaaacagaaagaacaagaacgaaagatcatagaattagaaaaacaaaaagaagaagcccaaagacgagctcaggaaagggacaagcagtggctggagcatgtgcagcaggaggacgagcatcagagaccaagaaaactccacgaagaggaaaaactgaaaagggaggagagtgtcaaaaagaaggatggcgaggaaaaaggcaaacaggaagcacaagacaagctgggtcggcttttccatcaacaccaagaaccagctaagccagctgtccaggcaccctggtccactgcagaaaaaggtccacttaccatttctgcacaggaaaatgtaaaagtggtgtattaccgggcactgtacccctttgaatccagaagccatgatgaaatcactatccagccaggagacatagtcaatggtggatgaaagccaaactggagaacccggctggcttggaggagaattaaaaggaaagacagggtggttccctgcaaactatgcagagaaaatcccagaaaatgaggttcccgctccagtgaaaccagtgactgattcaacatctgcccctgcccccaaactggccttgcgtgagacccccgcccctttggcagtaacctcttcagagccctccacgacccctaataactgggccgacttcagctccacgtggcccaccagcacgaatgagaaaccagaaacggataactgggatgcatgggcagcccagccctctctcaccgttccaagtgccggccagttaaggcagaggtccgcctttactccagccacggccactggctcctccccgtctcctgtgctaggccagggtgaaaaggtggaggggctacaagctcaagccctatatccttggagagccaaaaaagacaaccacttaaattttaacaaaaatgatgtcatcaccgtcctggaacagcaagacatgtggtggtttggagaagttcaaggtcagaagggttggttccccaagtcttacgtgaaactcatttcagggcccataaggaagtctacaagcatggattctggttcttcagagagtcctgctagtctaaagcgagtagcctctccagcagccaagccggtcgtttcgggagaagaaattgcccaggttattgcctcatacaccgccaccggccccgagcagctcactctcgcccctggtcagctgattttgatccgaaaaaagaacccaggtggatggtgggaaggagagctgcaagcacgtgggaaaaagcgccagataggctggttcccagctaattatgtaaagcttctaagccctgggacgagcaaaatcactccaacagagccacctaagtcaacagcattagcggcagtgtgccaggtgattgggatgtacgactacaccgcgcagaatgacgatgagctggccttcaacaagggccagatcatcaacgtcctcaacaaggaggaccctgactggtggaaaggagaagtcaatggacaagtggggctcttcccatccaattatgtgaagctgaccacagacatggacccaagccagcaatgaatcatatgttgtccatccccccctcaggcttgaaagtcctcaaagagacccactatcccatatcactgcccagagggatgatgggagatgcagccttgatcatgtgacttccagcatgatcacctactgccttctgagtagaagaactcactgcagagcagtttacctcattttaccttagttgcatgtgatcgcaatgtttgagttattacttgcagagataggagcaaaaattacaaaaacacacagggtagtgggtccttttgtggctttcctagttactcaaattgactttcccccacctttgcacaggtgctttcaatagttttaaaattatttttaaatatatattttagctttttaataaacaaaataaataaatgacttctttgctattttggttttgcaaaaagacccactatcaaggaatgctgcatgtgctattaaaaattgttccaaatgtccataaatctgagacttgatgtattttttcattttgtccagtgttaccaactaaattgtgcagtttggggcttttcccccttaccatagaagtgcagaggagttcagtatctctgttttaaagacgtatagaatgagcccaattaaagcgaaggtgtttgtgcttgtttgtgtgtatcagctgtaccttgttgagcatgtaatacatcctgtacataagaaattagttctttccatggcaaagctattaccttgtacgatgctctaatcatattgcatttaattttattttgcacagtgaccttgtagccacatgagaaagcactctgtgtttttgttcggtctcagatttatctggttgagttggtgttttgtttggggtttttaattttgcgtgtttgcatagcataaaatcagtagacaacaccactgaggtcgttacgatcaacgatatccacagtctctttttagtctctgttacatgaagttttattccagttacttttcatggaatgacctattttgaacaagtaattttcttgacaagaaagaatgtatagaagtctccctgcaattaatttccaatgtttacattttttaactagactgtggaatttctacagattaatatgaaatggagctcatggtccgtttgtgtgttagatatgctgtagctgaagccctgtttgtcttttaaacactagttggaagctctcaataaaaatgcctgctgctcacagcacagaaaatggggcagggggagcctcaagcacaatctagctgtcctcctaaagactctgtaatgctcactcccctcgcgttctcccggcgctgtcgggaggctgtgctggtggtcgtgtagaggtccttctcctttcacatggtgcagagagcgaggacctctcctcctcgttcagttgcacttcagtattttcacggatatgaatgtaaaatatataaatatataaacctgcggctttaacaactgtaatacaaccttttgaattagttccgtgtatagataattaaattcttcatacaaaagtta

SEQ ID NO: 427860 - DNA, 5451 bp, Homo sapiens
acttatgggcggagatggatggtggatggggggcgggggaggcagcggagggagatgaggagataggcgggagcgagggagcgagggagggagcgaaggaggtagagaagagtggaggcgccaggggagggagcgtagcttggttgctccgtagtacggcggctcgcgaggaagaatcccgagcgggctccgggacggacagagaggcgggcggggatggtgtgcggggctgcggctcctgcgtccctcccagcggcgcgtgagcggcactgatttgtccctggggcggcagcgcggacccgcccggagatgaggcgtcgattagcaaggtaaaagtaacagaaccatggctcagtttccaacaccttttggtggcagcctggatatctgggccataactgtagaggaaagagcgaagcatgatcagcagttccatagtttaaagccaatatctggattcattactggtgatcaagctagaaactttttttttcaatctgggttacctcaacctgttttagcacagatatgggcactagctgacatgaataatgatggaagaatggatcaagtggagttttccatagctatgaaacttatcaaactgaagctacaaggatatcagctaccctctgcacttccccctgtcatgaaacagcaaccagttgctatttctagcgcaccagcatttggtatgggaggtatcgccagcatgccaccgcttacagctgttgctccagtgccaatgggatccattccagttgttggaatgtctccaaccctagtatcttctgttcccacagcagctgtgccccccctggctaacggggctccccctgttatacaacctctgcctgcatttgctcatcctgcagccacattgccaaagagttcttcctttagtagatctggtccagggtcacaactaaacactaaattacaaaaggcacagtcatttgatgtggccagtgtcccaccagtggcagagtgggctgttcctcagtcatcaagactgaaatacaggcaattattcaatagtcatgacaaaactatgagtggacacttaacaggtccccaagcaagaactattcttatgcagtcaagtttaccacaggctcagctggcttcaatatggaatctttctgacattgatcaagatggaaaacttacagcagaggaatttatcctggcaatgcacctcattgatgtagctatgtctggccaaccactgccacctgtcctgcctccagaatacattccaccttcttttagaagagttcgatctggcagtggtatatctgtcataagctcaacatctgtagatcagaggctaccagaggaaccagttttagaagatgaacaacaacaattagaaaagaaattacctgtaacgtttgaagataagaagcgggagaactttgaacgtggcaacctggaactggagaaacgaaggcaagctctcctggaacagcagcgcaaggagcaggagcgcctggcccagctggagcgggcggagcaggagaggaaggagcgtgagcgccaggagcaagagcgcaaaagacaactggaactggagaagcaactggaaaagcagcgggagctagaacggcagagagaggaggagaggaggaaagaaattgagaggcgagaggctgcaaaacgggaacttgaaaggcaacgacaacttgagtgggaacggaatcgaaggcaagaactactaaatcaaagaaacaaagaacaagaggacatagttgtactgaaagcaaagaaaaagactttggaatttgaattagaagctctaaatgataaaaagcatcaactagaagggaaacttcaagatatcagatgtcgattgaccacccaaaggcaagaaattgagagcacaaacaaatctagagagttgagaattgccgaaatcacccatctacagcaacaattacaggaatctcagcaaatgcttggaagacttattccagaaaaacagatactcaatgaccaattaaaacaagttcagcagaacagtttgcacagagattcacttgttacacttaaaagagccttagaagcaaaagaactagctcggcagcacctacgagaccaactggatgaagtggagaaagaaactagatcaaaactacaggagattgatattttcaataatcagctgaaggaactaagagaaatacacaataagcaacaactccagaagcaaaagtccatggaggctgaacgactgaaacagaaagaacaagaacgaaagatcatagaattagaaaaacaaaaagaagaagcccaaagacgagctcaggaaagggacaagcagtggctggagcatgtgcagcaggaggacgagcatcagagaccaagaaaactccacgaagaggaaaaactgaaaagggaggagagtgtcaaaaagaaggatggcgaggaaaaaggcaaacaggaagcacaagacaagctgggtcggcttttccatcaacaccaagaaccagctaagccagctgtccaggcaccctggtccactgcagaaaaaggtccacttaccatttctgcacaggaaaatgtaaaagtggtgtattaccgggcactgtacccctttgaatccagaagccatgatgaaatcactatccagccaggagacatagtcaatggtggatgaaagccaaactggagaacccggctggcttggaggagaattaaaaggaaagacagggtggttccctgcaaactatgcagagaaaatcccagaaaatgaggttcccgctccagtgaaaccagtgactgattcaacatctgcccctgcccccaaactggccttgcgtgagacccccgcccctttggcagtaacctcttcagagccctccacgacccctaataactgggccgacttcagctccacgtggcccaccagcacgaatgagaaaccagaaacggataactgggatgcatgggcagcccagccctctctcaccgttccaagtgccggccagttaaggcagaggtccgcctttactccagccacggccactggctcctccccgtctcctgtgctaggccagggtgaaaaggtggaggggctacaagctcaagccctatatccttggagagccaaaaaagacaaccacttaaattttaacaaaaatgatgtcatcaccgtcctggaacagcaagacatgtggtggtttggagaagttcaaggtcagaagggttggttccccaagtcttacgtgaaactcatttcagggcccataaggaagtctacaagcatggattctggttcttcagagagtcctgctagtctaaagcgagtagcctctccagcagccaagccggtcgtttcgggagaagaatttattgccatgtacacttacgagagttctgagcaaggagatttaacctttcagcaaggggatgtgattttggttaccaagaaagatggtgactggtggacaggaacagtgggcgacaaggccggagtcttcccttctaactatgtgaggcttaaagattcagagggctctggaactgctgggaaaacagggagtttaggaaaaaaacctgaaattgcccaggttattgcctcatacaccgccaccggccccgagcagctcactctcgcccctggtcagctgattttgatccgaaaaaagaacccaggtggatggtgggaaggagagctgcaagcacgtgggaaaaagcgccagataggctggttcccagctaattatgtaaagcttctaagccctgggacgagcaaaatcactccaacagagccacctaagtcaacagcattagcggcagtgtgccaggtgattgggatgtacgactacaccgcgcagaatgacgatgagctggccttcaacaagggccagatcatcaacgtcctcaacaaggaggaccctgactggtggaaaggagaagtcaatggacaagtggggctcttcccatccaattatgtgaagctgaccacagacatggacccaagccagcaatgaatcatatgttgtccatccccccctcaggcttgaaagtcctcaaagagacccactatcccatatcactgcccagagggatgatgggagatgcagccttgatcatgtgacttccagcatgatcacctactgccttctgagtagaagaactcactgcagagcagtttacctcattttaccttagttgcatgtgatcgcaatgtttgagttattacttgcagagataggagcaaaaattacaaaaacacacagggtagtgggtccttttgtggctttcctagttactcaaattgactttcccccacctttgcacaggtgctttcaatagttttaaaattatttttaaatatatattttagctttttaataaacaaaataaataaatgacttctttgctattttggttttgcaaaaagacccactatcaaggaatgctgcatgtgctattaaaaattgttccaaatgtccataaatctgagacttgatgtattttttcattttgtccagtgttaccaactaaattgtgcagtttggggcttttcccccttaccatagaagtgcagaggagttcagtatctctgttttaaagacgtatagaatgagcccaattaaagcgaaggtgtttgtgcttgtttgtgtgtatcagctgtaccttgttgagcatgtaatacatcctgtacataagaaattagttctttccatggcaaagctattaccttgtacgatgctctaatcatattgcatttaattttattttgcacagtgaccttgtagccacatgagaaagcactctgtgtttttgttcggtctcagatttatctggttgagttggtgttttgtttggggtttttaattttgcgtgtttgcatagcataaaatcagtagacaacaccactgaggtcgttacgatcaacgatatccacagtctctttttagtctctgttacatgaagttttattccagttacttttcatggaatgacctattttgaacaagtaattttcttgacaagaaagaatgtatagaagtctccctgcaattaatttccaatgtttacattttttaactagactgtggaatttctacagattaatatgaaatggagctcatggtccgtttgtgtgttagatatgctgtagctgaagccctgtttgtcttttaaacactagttggaagctctcaataaaaatgcctgctgctcacagcacaggtaatgctcactcccctcgcgttctcccggcgctgtcgggaggctgtgctggtggtcgtgtagaggtccttctcctttcacatggtgcagagagcgaggacctctcctcctcgttcagttgcacttcagtattttcacggatatgaatgtaaaatatataaatatataaacctgcggctttaacaactgtaatacaaccttttgaattagttccgtgtatagataattaaattcttcatacaaaagtta

SEQ ID NO: 427861 - DNA, 2687 bp, Homo sapiens
ctagatggtcagacaatgactttgtgaagaggctggaaggctttggcctccacttttggaaataaacaattgttgggaaacagtgaagcatccagccctcctgctgtgctgcctcagggccctttgtggctgtgtgtgcttgtctggcctgtgcttgttggagaggtgccatgctcacgtctgccctaattgataacaaagcgcaacataacgagaggtcctttatgttattccacacaagggtgaaaaggtggaggggctacaagctcaagccctatatccttggagagccaaaaaagacaaccacttaaattttaacaaaaatgatgtcatcaccgtcctggaacagcaagacatgtggtggtttggagaagttcaaggtcagaagggttggttccccaagtcttacgtgaaactcatttcagggcccataaggaagtctacaagcatggattctggttcttcagagagtcctgctagtctaaagcgagtagcctctccagcagccaagccggtcgtttcgggagaagaatttattgccatgtacacttacgagagttctgagcaaggagatttaacctttcagcaaggggatgtgattttggttaccaagaaagatggtgactggtggacaggaacagtgggcgacaaggccggagtcttcccttctaactatgtgaggcttaaagattcagagggctctggaactgctgggaaaacagggagtttaggaaaaaaacctgaaattgcccaggttattgcctcatacaccgccaccggccccgagcagctcactctcgcccctggtcagctgattttgatccgaaaaaagaacccaggtggatggtgggaaggagagctgcaagcacgtgggaaaaagcgccagataggctggttcccagctaattatgtaaagcttctaagccctgggacgagcaaaatcactccaacagagccacctaagtcaacagcattagcggcagtgtgccaggtgattgggatgtacgactacaccgcgcagaatgacgatgagctggccttcaacaagggccagatcatcaacgtcctcaacaaggaggaccctgactggtggaaaggagaagtcaatggacaagtggggctcttcccatccaattatgtgaagctgaccacagacatggacccaagccagcaatgaatcatatgttgtccatccccccctcaggcttgaaagtcctcaaagagacccactatcccatatcactgcccagagggatgatgggagatgcagccttgatcatgtgacttccagcatgatcacctactgccttctgagtagaagaactcactgcagagcagtttacctcattttaccttagttgcatgtgatcgcaatgtttgagttattacttgcagagataggagcaaaaattacaaaaacacacagggtagtgggtccttttgtggctttcctagttactcaaattgactttcccccacctttgcacaggtgctttcaatagttttaaaattatttttaaatatatattttagctttttaataaacaaaataaataaatgacttctttgctattttggttttgcaaaaagacccactatcaaggaatgctgcatgtgctattaaaaattgttccaaatgtccataaatctgagacttgatgtattttttcattttgtccagtgttaccaactaaattgtgcagtttggggcttttcccccttaccatagaagtgcagaggagttcagtatctctgttttaaagacgtatagaatgagcccaattaaagcgaaggtgtttgtgcttgtttgtgtgtatcagctgtaccttgttgagcatgtaatacatcctgtacataagaaattagttctttccatggcaaagctattaccttgtacgatgctctaatcatattgcatttaattttattttgcacagtgaccttgtagccacatgagaaagcactctgtgtttttgttcggtctcagatttatctggttgagttggtgttttgtttggggtttttaattttgcgtgtttgcatagcataaaatcagtagacaacaccactgaggtcgttacgatcaacgatatccacagtctctttttagtctctgttacatgaagttttattccagttacttttcatggaatgacctattttgaacaagtaattttcttgacaagaaagaatgtatagaagtctccctgcaattaatttccaatgtttacattttttaactagactgtggaatttctacagattaatatgaaatggagctcatggtccgtttgtgtgttagatatgctgtagctgaagccctgtttgtcttttaaacactagttggaagctctcaataaaaatgcctgctgctcacagcacagaaaatggggcagggggagcctcaagcacaatctagctgtcctcctaaagactctgtaatgctcactcccctcgcgttctcccggcgctgtcgggaggctgtgctggtggtcgtgtagaggtccttctcctttcacatggtgcagagagcgaggacctctcctcctcgttcagttgcacttcagtattttcacggatatgaatgtaaaatatataaatatataaacctgcggctttaacaactgtaatacaaccttttgaattagttccgtgtatagataattaaattcttcatacaaaagtta

SEQ ID NO: 427862 - DNA, 2435 bp, Homo sapiens
agtggtttctgaggaaaatgggcttctctttctactgtacttggcagctagaaaagctattgagtcctttagtcacttcaaagtagcactttagccattgggtgctactgtgctggggtgggtggtgaatgaggccccacccttggcctcagggcattctgggtaattatgggaggggtgtgacagaaggtgccaggagtgggcaaggagcggacttcgtggagggaagttggtaagtaagtttcacgggatgacaagggagtctgcagcccactgagggctcaaggatcagccaggcccttgaatgccgtgtctgcctggtagctctgggaacgggcgattcagggagccttactcgttgggtagaaatccagctcaatacattggttttgatgtgttcatctgtgaacctgggaggcgcctgcatcttcttggccttttctcctgctgactcttaacagtgcactgccgtgtttgatcttgtttttcacaaattgcccaggttattgcctcatacaccgccaccggccccgagcagctcactctcgcccctggtcagctgattttgatccgaaaaaagaacccaggtggatggtgggaaggagagctgcaagcacgtgggaaaaagcgccagataggctggttcccagctaattatgtaaagcttctaagccctgggacgagcaaaatcactccaacagagccacctaagtcaacagcattagcggcagtgtgccaggtgattgggatgtacgactacaccgcgcagaatgacgatgagctggccttcaacaagggccagatcatcaacgtcctcaacaaggaggaccctgactggtggaaaggagaagtcaatggacaagtggggctcttcccatccaattatgtgaagctgaccacagacatggacccaagccagcaatgaatcatatgttgtccatccccccctcaggcttgaaagtcctcaaagagacccactatcccatatcactgcccagagggatgatgggagatgcagccttgatcatgtgacttccagcatgatcacctactgccttctgagtagaagaactcactgcagagcagtttacctcattttaccttagttgcatgtgatcgcaatgtttgagttattacttgcagagataggagcaaaaattacaaaaacacacagggtagtgggtccttttgtggctttcctagttactcaaattgactttcccccacctttgcacaggtgctttcaatagttttaaaattatttttaaatatatattttagctttttaataaacaaaataaataaatgacttctttgctattttggttttgcaaaaagacccactatcaaggaatgctgcatgtgctattaaaaattgttccaaatgtccataaatctgagacttgatgtattttttcattttgtccagtgttaccaactaaattgtgcagtttggggcttttcccccttaccatagaagtgcagaggagttcagtatctctgttttaaagacgtatagaatgagcccaattaaagcgaaggtgtttgtgcttgtttgtgtgtatcagctgtaccttgttgagcatgtaatacatcctgtacataagaaattagttctttccatggcaaagctattaccttgtacgatgctctaatcatattgcatttaattttattttgcacagtgaccttgtagccacatgagaaagcactctgtgtttttgttcggtctcagatttatctggttgagttggtgttttgtttggggtttttaattttgcgtgtttgcatagcataaaatcagtagacaacaccactgaggtcgttacgatcaacgatatccacagtctctttttagtctctgttacatgaagttttattccagttacttttcatggaatgacctattttgaacaagtaattttcttgacaagaaagaatgtatagaagtctccctgcaattaatttccaatgtttacattttttaactagactgtggaatttctacagattaatatgaaatggagctcatggtccgtttgtgtgttagatatgctgtagctgaagccctgtttgtcttttaaacactagttggaagctctcaataaaaatgcctgctgctcacagcacagaaaatggggcagggggagcctcaagcacaatctagctgtcctcctaaagactctgtaatgctcactcccctcgcgttctcccggcgctgtcgggaggctgtgctggtggtcgtgtagaggtccttctcctttcacatggtgcagagagcgaggacctctcctcctcgttcagttgcacttcagtattttcacggatatgaatgtaaaatatataaatatataaacctgcggctttaacaactgtaatacaaccttttgaattagttccgtgtatagataattaaattcttcatacaaaagtta

SEQ ID NO: 427863 - DNA, 3569 bp, Homo sapiens
acttatgggcggagatggatggtggatggggggcgggggaggcagcggagggagatgaggagataggcgggagcgagggagcgagggagggagcgaaggaggtagagaagagtggaggcgccaggggagggagcgtagcttggttgctccgtagtacggcggctcgcgaggaagaatcccgagcgggctccgggacggacagagaggcgggcggggatggtgtgcggggctgcggctcctgcgtccctcccagcggcgcgtgagcggcactgatttgtccctggggcggcagcgcggacccgcccggagatgaggcgtcgattagcaaggtaaaagtaacagaaccatggctcagtttccaacaccttttggtggcagcctggatatctgggccataactgtagaggaaagagcgaagcatgatcagcagttccatagtttaaagccaatatctggattcattactggtgatcaagctagaaactttttttttcaatctgggttacctcaacctgttttagcacagatatgggcactagctgacatgaataatgatggaagaatggatcaagtggagttttccatagctatgaaacttatcaaactgaagctacaaggatatcagctaccctctgcacttccccctgtcatgaaacagcaaccagttgctatttctagcgcaccagcatttggtatgggaggtatcgccagcatgccaccgcttacagctgttgctccagtgccaatgggatccattccagttgttggaatgtctccaaccctagtatcttctgttcccacagcagctgtgccccccctggctaacggggctccccctgttatacaacctctgcctgcatttgctcatcctgcagccacattgccaaagagttcttcctttagtagatctggtccagggtcacaactaaacactaaattacaaaaggcacagtcatttgatgtggccagtgtcccaccagtggcagagtgggctgttcctcagtcatcaagactgaaatacaggcaattattcaatagtcatgacaaaactatgagtggacacttaacaggtccccaagcaagaactattcttatgcagtcaagtttaccacaggctcagctggcttcaatatggaatctttctgacattgatcaagatggaaaacttacagcagaggaatttatcctggcaatgcacctcattgatgtagctatgtctggccaaccactgccacctgtcctgcctccagaatacattccaccttcttttagaagagttcgatctggcagtggtatatctgtcataagctcaacatctgtagatcagaggctaccagaggaaccagttttagaagatgaacaacaacaattagaaaagaaattacctgtaacgtttgaagataagaagcgggagaactttgaacgtggcaacctggaactggagaaacgaaggcaagctctcctggaacagcagcgcaaggagcaggagcgcctggcccagctggagcgggcggagcaggagaggaaggagcgtgagcgccaggagcaagagcgcaaaagacaactggaactggagaagcaactggaaaagcagcgggagctagaacggcagagagaggaggagaggaggaaagaaattgagaggcgagaggctgcaaaacgggaacttgaaaggcaacgacaacttgagtgggaacggaatcgaaggcaagaactactaaatcaaagaaacaaagaacaagaggacatagttgtactgaaagcaaagaaaaagactttggaatttgaattagaagctctaaatgataaaaagcatcaactagaagggaaacttcaagatatcagatgtcgattgaccacccaaaggcaagaaattgagagcacaaacaaatctagagagttgagaattgccgaaatcacccatctacagcaacaattacaggaatctcagcaaatgcttggaagacttattccagaaaaacagatactcaatgaccaattaaaacaagttcagcagaacagtttgcacagagattcacttgttacacttaaaagagccttagaagcaaaagaactagctcggcagcacctacgagaccaactggatgaagtggagaaagaaactagatcaaaactacaggagattgatattttcaataatcagctgaaggaactaagagaaatacacaataagcaacaactccagaagcaaaagtccatggaggctgaacgactgaaacagaaagaacaagaacgaaagatcatagaattagaaaaacaaaaagaagaagcccaaagacgagctcaggaaagggacaagcagtggctggagcatgtgcagcaggaggacgagcatcagagaccaagaaaactccacgaagaggaaaaactgaaaagggaggagagtgtcaaaaagaaggatggcgaggaaaaaggcaaacaggaagcacaagacaagctgggtcggcttttccatcaacaccaagaaccagctaagccagctgtccaggcaccctggtccactgcagaaaaaggtccacttaccatttctgcacaggaaaatgtaaaagtggtgtattaccgggcactgtacccctttgaatccagaagccatgatgaaatcactatccagccaggagacatagtcaatggtggatgaaagccaaactggagaacccggctggcttggaggagaattaaaaggaaagacagggtggttccctgcaaactatgcagagaaaatcccagaaaatgaggttcccgctccagtgaaaccagtgactgattcaacatctgcccctgcccccaaactggccttgcgtgagacccccgcccctttggcagtaacctcttcagagccctccacgacccctaataactgggccgacttcagctccacgtggcccaccagcacgaatgagaaaccagaaacggataactgggatgcatgggcagcccagccctctctcaccgttccaagtgccggccagttaaggcagaggtccgcctttactccagccacggccactggctcctccccgtctcctgtgctaggccagcctgacttcctcctccacccctccatgagactaggccacatgcagccccggattgtgcttctcttcccggaccccctgcagtgttccacctcgaggcttttgcccatgctgcgccctcggcctggagtgcccttcctccgaagccctagctgtcaaagtccttctcatccttcaaggcccatctcagatgctgccccctctgtgaaatttacgctgatgcccccaggcagaattcatccctgttttctctttattcctgcagtgaatagtaggaactcctttttagtatatttcattctgccaggtggtacacttggttgtttttatctctgtcttccccattacttgtgaattacctgctagtaatactgcccatctttatagtgctttgtggttaataaagtgcttttccctaaattatctgggggaggcagagactgtttttttcatctgtaatctcatggggcagtgcatgtagatgtacaataaatggtaattacaatgaattta

SEQ ID NO: 427864 - DNA, 2890 bp, Homo sapiens
acttatgggcggagatggatggtggatggggggcgggggaggcagcggagggagatgaggagataggcgggagcgagggagcgagggagggagcgaaggaggtagagaagagtggaggcgccaggggagggagcgtagcttggttgctccgtagtacggcggctcgcgaggaagaatcccgagcgggctccgggacggacagagaggcgggcggggatggtgtgcggggctgcggctcctgcgtccctcccagcggcgcgtgagcggcactgatttgtccctggggcggcagcgcggacccgcccggagatgaggcgtcgattagcaaggtaaaagtaacagaaccatggctcagtttccaacaccttttggtggcagcctggatatctgggccataactgtagaggaaagagcgaagcatgatcagcagttccatagtttaaagccaatatctggattcattactggtgatcaagctagaaactttttttttcaatctgggttacctcaacctgttttagcacagatatgggcactagctgacatgaataatgatggaagaatggatcaagtggagttttccatagctatgaaacttatcaaactgaagctacaaggatatcagctaccctctgcacttccccctgtcatgaaacagcaaccagttgctatttctagcgcaccagcatttggtatgggaggtatcgccagcatgccaccgcttacagctgttgctccagtgccaatgggatccattccagttgttggaatgtctccaaccctagtatcttctgttcccacagcagctgtgccccccctggctaacggggctccccctgttatacaacctctgcctgcatttgctcatcctgcagccacattgccaaagagttcttcctttagtagatctggtccagggtcacaactaaacactaaattacaaaaggcacagtcatttgatgtggccagtgtcccaccagtggcagagtgggctgttcctcagtcatcaagactgaaatacaggcaattattcaatagtcatgacaaaactatgagtggacacttaacaggtccccaagcaagaactattcttatgcagtcaagtttaccacaggctcagctggcttcaatatggaatctttctgacattgatcaagatggaaaacttacagcagaggaatttatcctggcaatgcacctcattgatgtagctatgtctggccaaccactgccacctgtcctgcctccagaatacattccaccttcttttagaagagttcgatctggcagtggtatatctgtcataagctcaacatctgtagatcagaggctaccagaggaaccagttttagaagatgaacaacaacaattagaaaagaaattacctgtaacgtttgaagataagaagcgggagaactttgaacgtggcaacctggaactggagaaacgaaggcaagctctcctggaacagcagcgcaaggagcaggagcgcctggcccagctggagcgggcggagcaggagaggaaggagcgtgagcgccaggagcaagagcgcaaaagacaactggaactggagaagcaactggaaaagcagcgggagctagaacggcagagagaggaggagaggaggaaagaaattgagaggcgagaggctgcaaaacgggaacttgaaaggcaacgacaacttgagtgggaacggaatcgaaggcaagaactactaaatcaaagaaacaaagaacaagaggacatagttgtactgaaagcaaagaaaaagactttggaatttgaattagaagctctaaatgataaaaagcatcaactagaagggaaacttcaagatatcagatgtcgattgaccacccaaaggcaagaaattgagagcacaaacaaatctagagagttgagaattgccgaaatcacccatctacagcaacaattacaggaatctcagcaaatgcttggaagacttattccagaaaaacagatactcaatgaccaattaaaacaagttcagcagaacagtttgcacagagattcacttgttacacttaaaagagccttagaagcaaaagaactagctcggcagcacctacgagaccaactggatgaagtggagaaagaaactagatcaaaactacaggagattgatattttcaataatcagctgaaggaactaagagaaatacacaataagcaacaactccagaagcaaaagtccatggaggctgaacgactgaaacagaaagaacaagaacgaaagatcatagaattagaaaaacaaaaagaagaagcccaaagacgagctcaggaaagggacaagcagtggctggagcatgtgcagcaggaggacgagcatcagagaccaagaaaactccacgaagaggaaaaactgaaaagggaggagagtgtcaaaaagaaggatggcgaggaaaaaggcaaacaggaagcacaagacaagctgggtcggcttttccatcaacaccaagaaccagctaagccagctgtccaggcaccctggtccactgcagaaaaaggtccacttaccatttctgcacaggaaaatgtaaaagtggtgtattaccgggcactgtacccctttgaatccagaagccatgatgaaatcactatccagccaggagacatagtcaatggtggatgaaagccaaactggagaacccggctggcttggaggagaattaaaaggaaagacagggtggttccctgcaaactatgcagagaaaatcccagaaaatgaggttcccgctccagtgaaaccagtgactgattcaacatctgcccctgcccccaaactggccctttggcctggaagaacctccccgcccctctttgtgggcgagattaaactctctttataaagaagccctctctc

SEQ ID NO: 427865 - DNA, 2436 bp, Homo sapiens
  misc_feature (2356)..(2356): n is a, c, g, or t
acttatgggcggagatggatggtggatggggggcgggggaggcagcggagggagatgaggagataggcgggagcgagggagcgagggagggagcgaaggaggtagagaagagtggaggcgccaggggagggagcgtagcttggttgctccgtagtacggcggctcgcgaggaagaatcccgagcgggctccgggacggacagagaggcgggcggggatggtgtgcggggctgcggctcctgcgtccctcccagcggcgcgtgagcggcactgatttgtccctggggcggcagcgcggacccgcccggagatgaggcgtcgattagcaaggtaaaagtaacagaaccatggctcagtttccaacaccttttggtggcagcctggatatctgggccataactgtagaggaaagagcgaagcatgatcagcagttccatagtttaaagccaatatctggattcattactggtgatcaagctagaaactttttttttcaatctgggttacctcaacctgttttagcacagatatgggcactagctgacatgaataatgatggaagaatggatcaagtggagttttccatagctatgaaacttatcaaactgaagctacaaggatatcagctaccctctgcacttccccctgtcatgaaacagcaaccagttgctatttctagcgcaccagcatttggtatgggaggtatcgccagcatgccaccgcttacagctgttgctccagtgccaatgggatccattccagttgttggaatgtctccaaccctagtatcttctgttcccacagcagctgtgccccccctggctaacggggctccccctgttatacaacctctgcctgcatttgctcatcctgcagccacattgccaaagagttcttcctttagtagatctggtccagggtcacaactaaacactaaattacaaaaggcacagtcatttgatgtggccagtgtcccaccagtggcagagtgggctgttcctcagtcatcaagactgaaatacaggcaattattcaatagtcatgacaaaactatgagtggacacttaacaggtccccaagcaagaactattcttatgcagtcaagtttaccacaggctcagctggcttcaatatggaatctttctgacattgatcaagatggaaaacttacagcagaggaatttatcctggcaatgcacctcattgatgtagctatgtctggccaaccactgccacctgtcctgcctccagaatacattccaccttcttttagaagagttcgatctggcagtggtatatctgtcataagctcaacatctgtagatcagaggctaccagaggaaccagttttagaagatgaacaacaacaattagaaaagaaattacctgtaacgtttgaagataagaagcgggagaactttgaacgtggcaacctggaactggagaaacgaaggcaagctctcctggaacagcagcgcaaggagcaggagcgcctggcccagctggagcgggcggagcaggagaggaaggagcgtgagcgccaggagcaagagcgcaaaagacaactggaactggagaagcaactggaaaagcagcgggagctagaacggcagagagaggaggagaggaggaaagaaattgagaggcgagaggctgcaaaacgggaacttgaaaggcaacgacaacttgagtgggaacggaatcgaaggcaagaactactaaatcaaagaaacaaagaacaagaggacatagttgtactgaaagcaaagaaaaagactttggaatttgaattagaagctctaaatgataaaaagcatcaactagaagggaaacttcaagatatcagatgtcgattgaccacccaaaggcaagaaattgagagcacaaacaaatctagagagttgagaattgccgaaatcacccatctacagcaacaattacaggaatctcagcaaatgcttggaagacttattccagaaaaacagatactcaatgaccaattaaaacaagttcagcagaacagtttgcacagagattcacttgttacacttaaaagagccttagaagcaaaagaactagctcggcagcacctacgagaccaactggatgaagtggagaaagaaactagatcaaaactacaggagattgatattttcaataatcagctgaaggaactaagagaaatacacaataagcaacaactccagaagcaaaagtccatggaggctgaacgactgaaacagaaagaacaagaacgaaagatcatagaattagaaaaacaaaaagaagaagcccaaagattcctaattctagccgatgacctgtgtgcgttaccattgttcacaggatggcagttncagggtggagacttctgggaccaggctgcctgggattgaagcccatgcatgtatggctgtgtgacgtggacaagtcattt

SEQ ID NO: 427866 - DNA, 1012 bp, Homo sapiens
acttatgggcggagatggatggtggatggggggcgggggaggcagcggagggagatgaggagataggcgggagcgagggagcgagggagggagcgaaggaggtagagaagagtggaggcgccaggggagggagcgtagcttggttgctccgtagtacggcggctcgcgaggaagaatcccgagcgggctccgggacggacagagaggcgggcggggatggtgtgcggggctgcggctcctgcgtccctcccagcggcgcgtgagcggcactgatttgtccctggggcggcagcgcggacccgcccggagatgaggcgtcgattagcaaggtaaaagtaacagaaccatggctcagtttccaacaccttttggtggcagcctggatatctgggccataactgtagaggaaagagcgaagcatgatcagcagttccatagtttaaagccaatatctggattcattactggtgatcaagctagaaactttttttttcaatctgggttacctcaacctgttttagcacagatatgggcactagctgacatgaataatgatggaagaatggatcaagtggagttttccatagctatgaaacttatcaaactgaagctacaaggatatcagctaccctctgcacttccccctgtcatgaaacagcaaccagttgctatttctagcgcaccagcatttggaggtaattctgtctgaaaaatgatggccccctgcaggaagatagtgctggggagaagaaggagcatgttcacatttgaaccctgggatgtaaagtaatcaaaatgaaagcagagatgcaggccgccagtcaggggaaaaggaagaaacttacagtccgctgctgcagcttctgggtttttttttttttttctcttccattatccttcaggttgttgcatacttccttttgattttcggtttccataatgtctgtttctccttgtgcataaacaattcctttggattatggcatctagaaatatatatattttgaatcac

SEQ ID NO: 427867 - DNA, 257 bp, Homo sapiens
aggaacagtgggcgacaaggccggagtcttcccttctaactatgtgaggcttaaagattcagaggtaaacccacattaactgtttcctctccctttctgtgcggtgattctctttgtggggagtcacgatgtttgacagcggaactttgttgggttttgctaagttctggaatgtgacagtaaatccagtgtgacctgtcattgtttgatcttgtcatttggcactgcgcagtaagcactggcttcccccaagcaga

SEQ ID NO: 427868 - DNA, 437 bp, Homo sapiens
tagcaaaaatattcaatgagcatctctcagtcagtcatgccttgaaataaactagtacataagccatgtgtccagtatagcaaagtgctgaaaaataagaatgcgagcttagagtcatgcctctgtagtaccttattatgtgtttttaacctagctaagtacaactatttcagctgtgggtcgtttaaagttttaaaagttaagcagttttaacagaaaaatcagtgtcattgtacgattttctttgaagataaaaattaaaatactctcttcttccattattgcagcatggattctggttcttcagagagtcctgctagtctaaagcgagtagcctctccagcagccaagccggtcgtttcgggagaaggtgagggcctgagttgtattatgttcttcagaagggtcaaggacattgtgtaaatgtttgaaatgag

SEQ ID NO: 427869 - DNA, 595 bp, Homo sapiens
gtggcccaccagcacgaatgagaaaccagaaacggataactgggatgcatgggcagcccagccctctctcaccgttccaagtgccggccagttaaggcagaggtccgcctttactccagccacggccactggctcctccccgtctcctgtgctaggccaggtaaaggcagccagtgagagtgtgaagacttagcatgctatctagtgccaaaaacttcagcaaatgctttttggcaatgtcattttgaagcaagccttgttatgtgtgtcttggttggctggcagtatgggaatccagtgcaggagccagaaatctgctgtgaatagttgggagttgggggtgggggtgggacacagtcaacttctcctgcctgggttgatgaaggaagcttcattgcagaagtggcacttgagctgcatcttgaccagtgggtaagatcttactagaaaatggagagagcctgcctgtcagacagaaactgctgggaaggctcgaaggcagacagtcagaatgtatttaaggaaaatcacatacccctccatttgtctagaccattgagttttttttggaaaaggtagaccaattaaaggttaa

SEQ ID NO: 427870 - DNA, 730 bp, Homo sapiens
tgcatcgtccagaattgcttccgagtcggcgcggcgcaaggcttgctgggagacacataacctcgattttcttccgccatccggctaaatagtcccatgtgcactttgttccatggataaataaacactaggaacgcatttccaccctagatttcagcagaaatgctgaatgtaaaggaatatttgagtaaagtgagttgccgttcttgaagcccgtctcctaaggattctcccggtgtccgcgtagggatctcatgctatataggagggccctgccaggcaccgtctcctgtctccggtccgtgcctccaagatgacaaagaaaagaaggaacaatggtcgtgccaaaaagggccgcggccacgtgcagcctattcgctgcactaactgtgcccgatgcgtgcccaaggacaaggccattaagaaattcgtcattcgaaacatagtggaggccgcagcagtcagggacatttctgaagcgagcgtcttcgatgcctatgtgcttcccaagctgtatgtgaagctacattactgtgtgagttgtgcaattcacagcaaagtagtcaggaatcgatctcgtgaagcccgcaaggaccgaacacccccaccccgatttagacctgcgggtgctgccccacgtcccccaccaaagcccatgtaaggagctgagttcttaaagactgaagacaggctattctctggagaaaaataaaatggaaattgtacttaa

SEQ ID NO: 427871 - DNA, 958 bp, Homo sapiens
tgcatcgtccagaattgcttccgagtcggcgcggcgcaaggcttgctgggagacacataacctcgattttcttccgccatccggctaaatagtcccatgtgcactttgttccatggataaataaacactaggaacgcatttccaccctagatttcagcagaaatgctgaatgtaaaggaatatttgagtaaagtgagttgccgttcttgaagcccgtctcctaaggattctcccggtgtccgcgtagggatctcatgctatataggagggccctgccaggcaccgtctcctgtctccggtccgtgcctccaagatgacaaagaaaagaaggaacaatggtcgtgccaaaaagggccgcggccacgtgcagcctattcgctgcactaactgtgcccgatgcgtgcccaaggacaaggccattaagaaattcgtcattcgaaacatagtggaggccgcagcagtcagggacatttctgaagcgagcgtcttcgatgcctatgtgcttcccaagctgtatgtgaagctacattactgtgtgagttgtgcaattcacagcaaagtagtcaggaatcgatctcgtgaagcccgcaaggaccgaacacccccaccccgatttagacctgcgggtgctgccccacgtcccccaccaaagcccatgtaaggagctgagttcttaaagactgaagacaggctattctctggagaaaaataaaatggaaattgtacttaacaaaaacaacacgaagaaaaaaaaacttggggcgcggcccccagaaaagtttacaacacactgggggggggcgcgagagagaaccggcaacgcggcccaggaacggcacgaggggggccccaaaaacggcgccgcgctaaacaaggtggcaggcacacggcagcgatacccgcggggaaaaccaacagacagcaaaggaaccgaagcaggcacacaaccaacaccaag

SEQ ID NO: 427872 - DNA, 661 bp, Homo sapiens
tgcatcgtccagaattgcttccgagtcggcgcggcgcaaggcttgctgggagacacataacctcgattttcttccgccatccggctaaatagtcccatgtgcactttgttccatggataaataaacactaggaacgcatttccaccctagatttcagcagaaatgctgaatgtaaaggaatatttgagtaaagtgagttgccgttcttgaagcccgtctcctgtctccggtccgtgcctccaagatgacaaagaaaagaaggaacaatggtcgtgccaaaaagggccgcggccacgtgcagcctattcgctgcactaactgtgcccgatgcgtgcccaaggacaaggccattaagaaattcgtcattcgaaacatagtggaggccgcagcagtcagggacatttctgaagcgagcgtcttcgatgcctatgtgcttcccaagctgtatgtgaagctacattactgtgtgagttgtgcaattcacagcaaagtagtcaggaatcgatctcgtgaagcccgcaaggaccgaacacccccaccccgatttagacctgcgggtgctgccccacgtcccccaccaaagcccatgtaaggagctgagttcttaaagactgaagacaggctattctctggagaaaaataaaatggaaattgtacttaa

SEQ ID NO: 427873 - DNA, 1492 bp, Homo sapiens
tgcatcgtccagaattgcttccgagtcggcgcggcgcaaggcttgctgggagacacataacctcgattttcttccgccatccggctaaatagtcccatgtgcactttgttccatggataaataaacactaggaacgcatttccaccctagatttcagcagaaatgctgaatgtaaaggaatatttgagtaaagtgagttgccgttcttgaagcccgtctcctaaggattctcccggtgtccgcgtagggatctcatgctatataggagggccctgccaggcaccgtctcctgtctccggtccgtgcctccaagatgacaaagaaaagaaggaacaatggtcgtgccaaaaagggccgcggccacgtgcagcctattcgctgcactaactgtgcccgatgcgtgcccaaggacaaggccattaagaaattcgtcattcgaaacatagtggaggccgcagcagtcagggacatttctgaagcgagcgtcttcgatggtaagtgggtcaccggcgcgaactgtgtgaggatcccagtatcttaaagccttcgcccaacttcgcccttttggaggctctgttcgttggagcctctcaggcaatttccacgtatttaaggttgttactggtagaagagaattctcttgtttgccgttttgattcttttctgggcagagggtgactttgtgatagagtgcacagcctttactctgaggtaaaggtttgcctgtttcggttatgagattgcaaaaactagaaacttggtaaatttgacaattcttgtgctattgattatttgaatatttgtgaaaatatacaggtgaggaagaatgtcttcaacgtttcgagaatggaggccgtctagtttggtgtgcaaggatgatgtttggagcaataagaacgtcgctttgtttttttccttttatagaaagagcaaggttcagggtaggcattagggcgggtgtaggtgtagaaggaactggattattggtttattgcatttagaatgtcagtctggtccttgcggtgtcacagatgaactcacgtgggatgttaattcacttgtaaaactgagggttatacatatgtgcctcaggtattgggctgaacaggtgctttgggggtgcttttatgtgcccgacaggcatttaaataggtttagttttaattgacgtaaacatgtaaggtgctcttcattcatgtaacaaaaaagcaaggtaggtatataataccagtataactctattttctattccttagcctatgtgcttcccaagctgtatgtgaagctacattactgtgtgagttgtgcaattcacagcaaagtagtcaggaatcgatctcgtgaagcccgcaaggaccgaacacccccaccccgatttagacctgcgggtgctgccccacgtcccccaccaaagcccatgtaaggagctgagttcttaaagactgaagacaggctattctctggagaaaaataaaatggaaattgtacttaa

SEQ ID NO: 427874 - DNA, 1117 bp, Homo sapiens
  misc_feature (8)..(8): n is a, c, g, or t
caaagganggaacaatggtcgtgccatgcccaaggacaaggccattaagaaattcgtcattcgaaacatagtggaggccgcagcagtcagggacatttctgaagcgagcgtcttcgatggtaagtgggtcaccggcgcgaactgtgtgaggatcccagtatcttaaagccttcgcccaacttcgcccttttggaggctctgttcgttggagcctctcaggcaatttccacgtatttaaggttgttactggtagaagagaattctcttgtttgccgttttgattcttttctgggcagagggtgactttgtgatagagtgcacagcctttactctgaggtaaaggtttgcctgtttcggttatgagattgcaaaaactagaaacttggtaaatttgacaattcttgtgctattgattatttgaatatttgtgaaaatatacaggtgaggaagaatgtcttcaacgtttcgagaatggaggccgtctagtttggtgtgcaaggatgatgtttggagcaataagaacgtcgctttgtttttttccttttatagaaagagcaaggttcagggtaggcattagggcgggtgtaggtgtagaaggaactggattattggtttattgcatttagaatgtcagtctggtccttgcggtgtcacagatgaactcacgtgggatgttaattcacttgtaaaactgagggttatacatatgtgcctcaggtattgggctgaacaggtgctttgggggtgcttttatgtgcccgacaggcatttaaataggtttagttttaattgacgtaaacatgtaaggtgctcttcattcatgtaacaaaaaagcaaggtaggtatataataccagtataactctattttctattccttagcctatgtgcttcccaagctgtatgtgaagctacattactgtgtgagttgtgcaattcacagcaaagtagtcaggaatcgatctcgtgaagcccgcaaggaccgaacacccccaccccgatttagacctgcgggtgctgccccacgtcccccaccaaagcccatgtaaggagctgagttcttaaagactgaagacaggctattctctggagaaaaataaaatggaaattgtacttaa

SEQ ID NO: 427875 - DNA, 308 bp, Homo sapiens
ttttcccatcctgtcgcagacaaagaaaagaaggaacaatggtcgtgccaaaaagggccgcggccacgtgcagcctattcgctgcactaactgtgcccgatgcgtgcccaaggacaaggccattaagaaattcgtcattcgaaacatagtggaggccgcagcagtcagggacatttctgaagcgagcgtcttcgatggtaagtgggtcaccggcgcgaactgtgtgaggatcccagtatcttaaagccttcgcccaacttcgcccttttggaggctctgttcgttggagcctctcaggcaatttccac

SEQ ID NO: 427876 - DNA, 3703 bp, Homo sapiens
ggtgaatgggctggtggtgctcgctgctgctgctgagaggaggaggaggatgaagagttgggcttgtttgttcctcctcctcctgcttctcctgctcagagttcctgcctccagctgccaggggggacagccagccagcagcaggaggggggctagagagctgaaggagagccagtttccccaaaattggacttctcagaacctttaatatgctaatgtgcattgtgaatctccaagagggggatatgatatgcagcattcttgaatacttctaatgacagggagcccactacctcataagctgcagtgagaagaggagtttgttactttaaacagaggctgaagaaactatagaattagcagagaaagtggagaaggtagaggatggagttgcagactctacaggaggctcttaaagtggaaattcaggttcaccagaaactggttgctcaaatgaagcaggatccacagaatgctgacttaaagaaacagcttcatgaactccaagccaaaatcacagctttgagtgagaaacagaaaagagtagttgaacagctacggaagaacctgatagtaaagcaagaacaaccggacaagttccaaatacagccattgccacaatctgaaaacaaactacaaacagcacagcagcaaccactacagcaactacaacaacagcagcagtaccaccaccaccacgcccagcagtcagctgcagcctctcccaacctgactgcttcacagaagactgtaactacagcttctatgattaccacaaagacactacctctcgtcttgaaagcagcaactgcgaccatgcctgcctctgtggtgggccagagacctaccattgctatggtgaccgccatcaacagtcagaaggctgtgctcagcactgatgtgcagaacacaccagtcaacctccagacgtctagtaaggtcactgggcctggggcagaggctgtccaaattgtggcaaaaaacacagtcactctgcaggttcaggcaacacctcctcagcccatcaaagtaccacagtttatcccccctcctagactcactccacgtccaaactttcttccacaggttcgacccaagcctgtggcccagaataacattcctattgccccagcaccacctcccatgctcgcagctcctcagcttatccagaggcccgtcatgctgaccaagttcacccccacaacccttcccacatcccagaattccatccaccccgtccgtgtcgtcaatgggcagactgcaaccatagccaaaacgttccccatggcccagctcaccagcattgtgatagctactccagggaccagactcgctggacctcaaactgtacagcttagcaagccaagtcttgaaaaacagacagttaaatctcacacagaaacagatgagaaacaaacagagagccgcaccatcaccccacctgctgcacccaaaccaaaacgggaggagaaccctcagaaacttgccttcatggtgtctctagggttggtaacacatgaccatctagaagaaatccaaagcaagaggcaagagcgaaaaagaagaacaacagcaaatccggtctacagtggagcagtctttgagccagagcgtaagaagagtgcagtgacatacctaaacagcacaatgcaccctgggacccggaagagagccaatgaggaacactggccaaagggtgatattcatgaggatttttgcagcgtttgcagaaaaagtggccagttactgatgtgcgacacatgttcccgtgtatatcatttggactgcttagacccccctctgaaaacaattcccaagggcatgtggatctgtcccagatgtcaggaccagatgctgaagaaggaagaagcaattccatggcctggaactttagcaattgttcattcctatattgcctacaaagcagcaaaagaagaagagaaacagaagttacttaaatggagttcagatttaaaacaagaacgagaacaactagagcaaaaggtgaaacagctcagcaattccataagtaaatgcatggaaatgaagaacaccatcctggcccggcagaaggagatgcacagctccctggagaaggtaaaacagctgattcgcctcatccacggcatcgacctctccaaacctgtagactctgaggccactgtgggggccatctccaatggcccggactgcaccccccctgccaatgccgccacctccacgccggccccttccccctcctcccagagctgcacagcgaactgtaaccagggggaagagactaaataacagagcccctctaggagaagccacgggatcccggcggcaaggagaacagaacactgaagactctagaaaagcaaagccggatttctggaaagtgcagaattcttttggttctttggttccagagagagagaagatgcttgtgccaggtggcaccagagtttgccaattgatccttcttattctgtgtgtacatgcaaagattggaccatgttacatgaaatagtgccagctggaggttctttgccagcaccatgccaagtgaaataatatatttactctctctattatacaccagtgtgtgcctgcagcagcctccacagccacgatgggtttgtttctgttttcttgggtggggagcagggacgggcggagggaggagagcaggtttcagatccttacttgccgagccgtttgtttaggtagagaagacaagtccaaagagtgtgtgggctttcctgtttctaaactttcgctactataaaaccaaaaaaaggaattgagatttcaccaaccccagtgcccagaagagggaaggggagtggctggagggagcagggggtgggacagtgtatcaaataagcagtatttaatcacctctggcgggggcctcgtgcaaggggagactgacaccaagaacagccagtaggttcttctcccctgcactctgctccctgcgcggtaaccccaccactcctgaagcctgcccagtctccttccttccctgcttggtgagtcgcgcatctccgtggttatcccgctgtctcctctccaagaacaagcagagcccgggccactggcccttgcccaaggcagggaagaaggatgtgtgtgtccaggaaggaaaaaaaggtggatcagtgattttacttgaaaacaagctccatcccttttctatatttataagaagagaagatcttgagtgaagcagcacgcgacccaggtgtgtgtgaattgaatggagacgtttcttttctctttctttaatttttgtttttgttctttttttctttaaggaaagttttattttactgttcattttactttcttggtaacaaaaactaaaataaggaatagaaaagctgtttttcaggctgacagtccaattaagggtagccaagaccttgcatggtagagtaggaatcatagtgtcagtgaggtcccgtgagtctttgtgagtccttgtgtcatcgttcgggcactgtttttttatgcaagggcaaaaatctttgtatctggggaaaaaaaacttttttttaaattaaaaaggaaaataaaagatattgaggtcttcctagtgttacttaaattaagatcaaggtaagaaacattgtaaaaaaaaattacaaaagtgctatttgtttcctaaaaacagtgatttctattaaaaaggtgtcagaactggaaaaaaaaaaaa

SEQ ID NO: 427877 - DNA, 645 bp, Homo sapiens
gggtgtcatgtggcgtcacgagaaaagataggaatgctcagccaagtcccagctccttctaagcctgggctcaagtgtcctggctcttcctgccttgaacttgattctcctaagctgatatttggaactttttagtccagaaactatagaccagggttttgcaacactgctaccataaatccttcctggattttatctgccagtagccacagataccactgctagctgttacatagaggatgtgtgtttaaacctccttctcaaggtaaaattctaaaaatcttttcagatgctgaagaaggaagaagcaattccatggcctggaactttagcaattgttcattcctatattgcctacaaagcagcaaaagaagaagagaaacagaagttacttaaatggagttcagatttaaaacaagaacgagaacaactagagcacagtcgatacataggtgcagagacctaggcctttccaatatacgtaacagtacgtgtgggccccaggctgtttcgggtccttctgtttattaacgtgattaacttgggcaaatgcagtttgccatccagttagagttcagacctcaggtacaggcggccagttggtaggtggtgccttacccaagctctgtaacatcctcttggctt

SEQ ID NO: 427878 - DNA, 3662 bp, Homo sapiens
gtgagagagagaggagaggagaggaggaggaggaggagggagaagggaacaacctaccatcttaacacactaatatctaaaaagtgcgagaggcccagagcagcagcagaagcagcagcagcagctccagcttcttccctcctcctcctcctcctgcttctcctgctcagagttcctgcctccagctgccaggggggacagccagccagcagcaggaggggggctagagagctgaaggagagccagtttccccaaaattgctgcagtgagaagaggagtttgttactttaaacagaggctgaagaaactatagaattagcagagaaagtggagaaggtagaggatggagttgcagactctacaggaggctcttaaagtggaaattcaggttcaccagaaactggttgctcaaatgaagcaggatccacagaatgctgacttaaagaaacagcttcatgaactccaagccaaaatcacagctttgagtgagaaacagaaaagagtagttgaacagctacggaagaacctgatagtaaagcaagaacaaccggacaagttccaaatacagccattgccacaatctgaaaacaaactacaaacagcacagcagcaaccactacagcaactacaacaacagcagcagtaccaccaccaccacgcccagcagtcagctgcagcctctcccaacctgactgcttcacagaagactgtaactacagcttctatgattaccacaaagacactacctctcgtcttgaaagcagcaactgcgaccatgcctgcctctgtggtgggccagagacctaccattgctatggtgaccgccatcaacagtcagaaggctgtgctcagcactgatgtgcagaacacaccagtcaacctccagacgtctagtaaggtcactgggcctggggcagaggctgtccaaattgtggcaaaaaacacagtcactctgcaggttcaggcaacacctcctcagcccatcaaagtaccacagtttatcccccctcctagactcactccacgtccaaactttcttccacaggttcgacccaagcctgtggcccagaataacattcctattgccccagcaccacctcccatgctcgcagctcctcagcttatccagaggcccgtcatgctgaccaagttcacccccacaacccttcccacatcccagaattccatccaccccgtccgtgtcgtcaatgggcagactgcaaccatagccaaaacgttccccatggcccagctcaccagcattgtgatagctactccagggaccagactcgctggacctcaaactgtacagcttagcaagccaagtcttgaaaaacagacagttaaatctcacacagaaacagatgagaaacaaacagagagccgcaccatcaccccacctgctgcacccaaaccaaaacgggaggagaaccctcagaaacttgccttcatggtgtctctagggttggtaacacatgaccatctagaagaaatccaaagcaagaggcaagagcgaaaaagaagaacaacagcaaatccggtctacagtggagcagtctttgagccagagcgtaagaagagtgcagtgacatacctaaacagcacaatgcaccctgggacccggaagagagccaatgaggaacactggccaaagggtgatattcatgaggatttttgcagcgtttgcagaaaaagtggccagttactgatgtgcgacacatgttcccgtgtatatcatttggactgcttagacccccctctgaaaacaattcccaagggcatgtggatctgtcccagatgtcaggaccagatgctgaagaaggaagaagcaattccatggcctggaactttagcaattgttcattcctatattgcctacaaagcagcaaaagaagaagagaaacagaagttacttaaatggagttcagatttaaaacaagaacgagaacaactagagcaaaaggtgaaacagctcagcaattccataagtaaatgcatggaaatgaagaacaccatcctggcccggcagaaggagatgcacagctccctggagaaggtaaaacagctgattcgcctcatccacggcatcgacctctccaaacctgtagactctgaggccactgtgggggccatctccaatggcccggactgcaccccccctgccaatgccgccacctccacgccggccccttccccctcctcccagagctgcacagcgaactgtaaccagggggaagagactaaataacagagcccctctaggagaagccacgggatcccggcggcaaggagaacagaacactgaagactctagaaaagcaaagccggatttctggaaagtgcagaattcttttggttctttggttccagagagagagaagatgcttgtgccaggtggcaccagagtttgccaattgatccttcttattctgtgtgtacatgcaaagattggaccatgttacatgaaatagtgccagctggaggttctttgccagcaccatgccaagtgaaataatatatttactctctctattatacaccagtgtgtgcctgcagcagcctccacagccacgatgggtttgtttctgttttcttgggtggggagcagggacgggcggagggaggagagcaggtttcagatccttacttgccgagccgtttgtttaggtagagaagacaagtccaaagagtgtgtgggctttcctgtttctaaactttcgctactataaaaccaaaaaaaggaattgagatttcaccaaccccagtgcccagaagagggaaggggagtggctggagggagcagggggtgggacagtgtatcaaataagcagtatttaatcacctctggcgggggcctcgtgcaaggggagactgacaccaagaacagccagtaggttcttctcccctgcactctgctccctgcgcggtaaccccaccactcctgaagcctgcccagtctccttccttccctgcttggtgagtcgcgcatctccgtggttatcccgctgtctcctctccaagaacaagcagagcccgggccactggcccttgcccaaggcagggaagaaggatgtgtgtgtccaggaaggaaaaaaaggtggatcagtgattttacttgaaaacaagctccatcccttttctatatttataagaagagaagatcttgagtgaagcagcacgcgacccaggtgtgtgtgaattgaatggagacgtttcttttctctttctttaatttttgtttttgttctttttttctttaaggaaagttttattttactgttcattttactttcttggtaacaaaaactaaaataaggaatagaaaagctgtttttcaggctgacagtccaattaagggtagccaagaccttgcatggtagagtaggaatcatagtgtcagtgaggtcccgtgagtctttgtgagtccttgtgtcatcgttcgggcactgtttttttatgcaagggcaaaaatctttgtatctggggaaaaaaaacttttttttaaattaaaaaggaaaataaaagatattgaggtcttcctagtgttacttaaattaagatcaaggtaagaaacattgtaaaaaaaaattacaaaagtgctatttgtttcctaaaaacagtgatttctattaaaaaggtgtcagaactggaaaaaaaaaaaa

SEQ ID NO: 427879 - DNA, 3088 bp, Homo sapiens
aaggtattggaaattaccgcccccccccgggcgttagtgatatgtcgaccacgcgctcggcagcagcagtaccaccaccaccacgcccagcagtcagctgcagcctctcccaacctgactgcttcacagaagactgtaactacagcttctatgattaccacaaagacactacctctcgtcttgaaagcagcaactgcgaccatgcctgcctctgtggtgggccagagacctaccattgctatggtgaccgccatcaacagtcagaaggctgtgctcagcactgatgtgcagaacacaccagtcaacctccagacgtctagtaaggtcactgggcctggggcagaggctgtccaaattgtggcaaaaaacacagtcactctgcaggttcaggcaacacctcctcagcccatcaaagtaccacagtttatcccccctcctagactcactccacgtccaaactttcttccacaggttcgacccaagcctgtggcccagaataacattcctattgccccagcaccacctcccatgctcgcagctcctcagcttatccagaggcccgtcatgctgaccaagttcacccccacaacccttcccacatcccagaattccatccaccccgtccgtgtcgtcaatgggcagactgcaaccatagccaaaacgttccccatggcccagctcaccagcattgtgatagctactccagggaccagactcgctggacctcaaactgtacagcttagcaagccaagtcttgaaaaacagacagttaaatctcacacagaaacagatgagaaacaaacagagagccgcaccatcaccccacctgctgcacccaaaccaaaacgggaggagaaccctcagaaacttgccttcatggtgtctctagggttggtaacacatgaccatctagaagaaatccaaagcaagaggcaagagcgaaaaagaagaacaacagcaaatccggtctacagtggagcagtctttgagccagagcgtaagaagagtgcagtgacatacctaaacagcacaatgcaccctgggacccggaagagagccaatgaggaacactggccaaagggtgatattcatgaggatttttgcagcgtttgcagaaaaagtggccagttactgatgtgcgacacatgttcccgtgtatatcatttggactgcttagacccccctctgaaaacaattcccaagggcatgtggatctgtcccagatgtcaggaccagatgctgaagaaggaagaagcaattccatggcctggaactttagcaattgttcattcctatattgcctacaaagcagcaaaagaagaagagaaacagaagttacttaaatggagttcagatttaaaacaagaacgagaacaactagagcaaaaggtgaaacagctcagcaattccataagtaaatgcatggaaatgaagaacaccatcctggcccggcagaaggagatgcacagctccctggagaaggtaaaacagctgattcgcctcatccacggcatcgacctctccaaacctgtagactctgaggccactgtgggggccatctccaatggcccggactgcaccccccctgccaatgccgccacctccacgccggccccttccccctcctcccagagctgcacagcgaactgtaaccagggggaagagactaaataacagagcccctctaggagaagccacgggatcccggcggcaaggagaacagaacactgaagactctagaaaagcaaagccggatttctggaaagtgcagaattcttttggttctttggttccagagagagagaagatgcttgtgccaggtggcaccagagtttgccaattgatccttcttattctgtgtgtacatgcaaagattggaccatgttacatgaaatagtgccagctggaggttctttgccagcaccatgccaagtgaaataatatatttactctctctattatacaccagtgtgtgcctgcagcagcctccacagccacgatgggtttgtttctgttttcttgggtggggagcagggacgggcggagggaggagagcaggtttcagatccttacttgccgagccgtttgtttaggtagagaagacaagtccaaagagtgtgtgggctttcctgtttctaaactttcgctactataaaaccaaaaaaaggaattgagatttcaccaaccccagtgcccagaagagggaaggggagtggctggagggagcagggggtgggacagtgtatcaaataagcagtatttaatcacctctggcgggggcctcgtgcaaggggagactgacaccaagaacagccagtaggttcttctcccctgcactctgctccctgcgcggtaaccccaccactcctgaagcctgcccagtctccttccttccctgcttggtgagtcgcgcatctccgtggttatcccgctgtctcctctccaagaacaagcagagcccgggccactggcccttgcccaaggcagggaagaaggatgtgtgtgtccaggaaggaaaaaaaggtggatcagtgattttacttgaaaacaagctccatcccttttctatatttataagaagagaagatcttgagtgaagcagcacgcgacccaggtgtgtgtgaattgaatggagacgtttcttttctctttctttaatttttgtttttgttctttttttctttaaggaaagttttattttactgttcattttactttcttggtaacaaaaactaaaataaggaatagaaaagctgtttttcaggctgacagtccaattaagggtagccaagaccttgcatggtagagtaggaatcatagtgtcagtgaggtcccgtgagtctttgtgagtccttgtgtcatcgttcgggcactgtttttttatgcaagggcaaaaatctttgtatctggggaaaaaaaacttttttttaaattaaaaaggaaaataaaagatattgaggtcttcctagtgttacttaaattaagatcaaggtaagaaacattgtaaaaaaaaattacaaaagtgctatttgtttcctaaaaacagtgatttctattaaaaaggtgtcagaactggaaaaaaaaaaaa

SEQ ID NO: 427880 - DNA, 3803 bp, Homo sapiens
gtgagagagagaggagaggagaggaggaggaggaggagggagaagggaacaacctaccatcttaacacactaatatctaaaaagtgcgagaggcccagagcagcagcagaagcagcagcagcagctccagcttcttccctcctcctcctcctcctgcttctcctgctcagagttcctgcctccagctgccaggggggacagccagccagcagcaggaggggggctagagagctgaaggagagccagtttccccaaaattgctgcagtgagaagaggagtttgttactttaaacagaggctgaagaaactatagaattagcagagaaagtggagaaggtagaggatggagttgcagactctacaggaggctcttaaagtggaaattcaggttcaccagaaactggttgctcaaatgaagcaggatccacagaatgctgacttaaagaaacagcttcatgaactccaagccaaaatcacagctttgagtgagaaacagaaaagagtagttgaacagctacggaagaacctgatagtaaagcaagaacaaccggacaagttccaaatacagccattgccacaatctgaaaacaaactacaaacagcacagcagcaaccactacagcaactacaacaacagcagcagtaccaccaccaccacgcccagcagtcagctgcagcctctcccaacctgactgcttcacagaagactgtaactacagcttctatgattaccacaaagacactacctctcgtcttgaaagcagcaactgcgaccatgcctgcctctgtggtgggccagagacctaccattgctatggtgaccgccatcaacagtcagaaggctgtgctcagcactgatgtgcagaacacaccagtcaacctccagacgtctagtaaggtcactgggcctggggcagaggctgtccaaattgtggcaaaaaacacagtcactctgcaggttcaggcaacacctcctcagcccatcaaagtaccacagtttatcccccctcctagactcactccacgtccaaactttcttccacaggttcgacccaagcctgtggcccagaataacattcctattgccccagcaccacctcccatgctcgcagctcctcagcttatccagaggcccgtcatgctgaccaagttcacccccacaacccttcccacatcccagaattccatccaccccgtccgtgtcgtcaatgggcagactgcaaccatagccaaaacgttccccatggcccagctcaccagcattgtgatagctactccagggaccagactcgctggacctcaaactgtacagcttagcaagccaagtcttgaaaaacagacagttaaatctcacacagaaacagatgagaaacaaacagagagccgcaccatcaccccacctgctgcacccaaaccaaaacgggaggagaaccctcagaaacttgccttcatggtgtctctagggttggtaacacatgaccatctagaagaaatccaaagcaagaggcaagagcgaaaaagaagaacaacagcaaatccggtctacagtggagcagtctttgagccagagcgtaagaagagtgcagtgacatacctaaacagcacaatgcaccctgggacccggaagagaggtcgtcctccaaaatacaatgcagtgctggggtttggagcccttaccccaacatccccccaatccagtcatcctgactcccctgaaaatgaaaagacagagaccacattcactttccctgcacctgttcagcctgtgtccctgcccagccccacctccacagacggtgatattcatgaggatttttgcagcgtttgcagaaaaagtggccagttactgatgtgcgacacatgttcccgtgtatatcatttggactgcttagacccccctctgaaaacaattcccaagggcatgtggatctgtcccagatgtcaggaccagatgctgaagaaggaagaagcaattccatggcctggaactttagcaattgttcattcctatattgcctacaaagcagcaaaagaagaagagaaacagaagttacttaaatggagttcagatttaaaacaagaacgagaacaactagagcaaaaggtgaaacagctcagcaattccataagtaaatgcatggaaatgaagaacaccatcctggcccggcagaaggagatgcacagctccctggagaaggtaaaacagctgattcgcctcatccacggcatcgacctctccaaacctgtagactctgaggccactgtgggggccatctccaatggcccggactgcaccccccctgccaatgccgccacctccacgccggccccttccccctcctcccagagctgcacagcgaactgtaaccagggggaagagactaaataacagagcccctctaggagaagccacgggatcccggcggcaaggagaacagaacactgaagactctagaaaagcaaagccggatttctggaaagtgcagaattcttttggttctttggttccagagagagagaagatgcttgtgccaggtggcaccagagtttgccaattgatccttcttattctgtgtgtacatgcaaagattggaccatgttacatgaaatagtgccagctggaggttctttgccagcaccatgccaagtgaaataatatatttactctctctattatacaccagtgtgtgcctgcagcagcctccacagccacgatgggtttgtttctgttttcttgggtggggagcagggacgggcggagggaggagagcaggtttcagatccttacttgccgagccgtttgtttaggtagagaagacaagtccaaagagtgtgtgggctttcctgtttctaaactttcgctactataaaaccaaaaaaaggaattgagatttcaccaaccccagtgcccagaagagggaaggggagtggctggagggagcagggggtgggacagtgtatcaaataagcagtatttaatcacctctggcgggggcctcgtgcaaggggagactgacaccaagaacagccagtaggttcttctcccctgcactctgctccctgcgcggtaaccccaccactcctgaagcctgcccagtctccttccttccctgcttggtgagtcgcgcatctccgtggttatcccgctgtctcctctccaagaacaagcagagcccgggccactggcccttgcccaaggcagggaagaaggatgtgtgtgtccaggaaggaaaaaaaggtggatcagtgattttacttgaaaacaagctccatcccttttctatatttataagaagagaagatcttgagtgaagcagcacgcgacccaggtgtgtgtgaattgaatggagacgtttcttttctctttctttaatttttgtttttgttctttttttctttaaggaaagttttattttactgttcattttactttcttggtaacaaaaactaaaataaggaatagaaaagctgtttttcaggctgacagtccaattaagggtagccaagaccttgcatggtagagtaggaatcatagtgtcagtgaggtcccgtgagtctttgtgagtccttgtgtcatcgttcgggcactgtttttttatgcaagggcaaaaatctttgtatctggggaaaaaaaacttttttttaaattaaaaaggaaaataaaagatattgaggtcttcctagtgttacttaaattaagatcaaggtaagaaacattgtaaaaaaaaattacaaaagtgctatttgtttcctaaaaacagtgatttctattaaaaaggtgtcagaactggaaaaaaaaaaaa

SEQ ID NO: 427881 - DNA, 3865 bp, Homo sapiens
gtgagagagagaggagaggagaggaggaggaggaggagggagaagggaacaacctaccatcttaacacactaatatctaaaaagtgcgagaggcccagagcagcagcagaagcagcagcagcagctccagcttcttccctccctccccatgaagaagagttccctcctcctcctcctcctgcttctcctgctcagagttcctgcctccagctgccaggggggacagccagccagcagcaggaggggggctagagagctgaaggagagccagtttccccaaaattgctgcagtgagaagaggagtttgttactttaaacagaggctgaagaaactatagaattagcagagaaagtggagaaggtagaggatggagttgcagactctacaggaggctcttaaagtggaaattcaggttcaccagaaactggttgctcaaatgaagcaggatccacagaatgctgacttaaagaaacagcttcatgaactccaagccaaaatcacagctttgagtgagaaacagaaaagagtagttgaacagctacggaagaacctgatagtaaagcaagaacaaccggacaagttccaaatacagccattgccacaatctgaaaacaaactacaaacagcacagcagcaaccactacagcaactacaacaacagcagcagtaccaccaccaccacgcccagcagtcagctgcagcctctcccaacctgactgcttcacagaagactgtaactacagcttctatgattaccacaaagacactacctctcgtcttgaaagcagcaactgcgaccatgcctgcctctgtggtgggccagagacctaccattgctatggtgaccgccatcaacagtcagaaggctgtgctcagcactgatgtgcagaacacaccagtcaacctccagacgtctagtaaggtcactgggcctggggcagaggctgtccaaattgtggcaaaaaacacagtcactctgcaggttcaggcaacacctcctcagcccatcaaagtaccacagtttatcccccctcctagactcactccacgtccaaactttcttccacaggttcgacccaagcctgtggcccagaataacattcctattgccccagcaccacctcccatgctcgcagctcctcagcttatccagaggcccgtcatgctgaccaagttcacccccacaacccttcccacatcccagaattccatccaccccgtccgtgtcgtcaatgggcagactgcaaccatagccaaaacgttccccatggcccagctcaccagcattgtgatagctactccagggaccagactcgctggacctcaaactgtacagcttagcaagccaagtcttgaaaaacagacagttaaatctcacacagaaacagatgagaaacaaacagagagccgcaccatcaccccacctgctgcacccaaaccaaaacgggaggagaaccctcagaaacttgccttcatggtgtctctagggttggtaacacatgaccatctagaagaaatccaaagcaagaggcaagagcgaaaaagaagaacaacagcaaatccggtctacagtggagcagtctttgagccagagcgtaagaagagtgcagtgacatacctaaacagcacaatgcaccctgggacccggaagagaggtcgtcctccaaaatacaatgcagtgctggggtttggagcccttaccccaacatccccccaatccagtcatcctgactcccctgaaaatgaaaagacagagaccacattcactttccctgcacctgttcagcctgtgtccctgcccagccccacctccacagacggtgatattcatgaggatttttgcagcgtttgcagaaaaagtggccagttactgatgtgcgacacatgttcccgtgtatatcatttggactgcttagacccccctctgaaaacaattcccaagggcatgtggatctgtcccagatgtcaggaccagatgctgaagaaggaagaagcaattccatggcctggaactttagcaattgttcattcctatattgcctacaaagcagcaaaagaagaagagaaacagaagttacttaaatggagttcagatttaaaacaagaacgagaacaactagagcaaaaggtgaaacagctcagcaattccataagttgtgaggaagcgggctttctagagacaagtattggaaaaatgcatggaaatgaagaacaccatcctggcccggcagaaggagatgcacagctccctggagaaggtaaaacagctgattcgcctcatccacggcatcgacctctccaaacctgtagactctgaggccactgtgggggccatctccaatggcccggactgcaccccccctgccaatgccgccacctccacgccggccccttccccctcctcccagagctgcacagcgaactgtaaccagggggaagagactaaataacagagcccctctaggagaagccacgggatcccggcggcaaggagaacagaacactgaagactctagaaaagcaaagccggatttctggaaagtgcagaattcttttggttctttggttccagagagagagaagatgcttgtgccaggtggcaccagagtttgccaattgatccttcttattctgtgtgtacatgcaaagattggaccatgttacatgaaatagtgccagctggaggttctttgccagcaccatgccaagtgaaataatatatttactctctctattatacaccagtgtgtgcctgcagcagcctccacagccacgatgggtttgtttctgttttcttgggtggggagcagggacgggcggagggaggagagcaggtttcagatccttacttgccgagccgtttgtttaggtagagaagacaagtccaaagagtgtgtgggctttcctgtttctaaactttcgctactataaaaccaaaaaaaggaattgagatttcaccaaccccagtgcccagaagagggaaggggagtggctggagggagcagggggtgggacagtgtatcaaataagcagtatttaatcacctctggcgggggcctcgtgcaaggggagactgacaccaagaacagccagtaggttcttctcccctgcactctgctccctgcgcggtaaccccaccactcctgaagcctgcccagtctccttccttccctgcttggtgagtcgcgcatctccgtggttatcccgctgtctcctctccaagaacaagcagagcccgggccactggcccttgcccaaggcagggaagaaggatgtgtgtgtccaggaaggaaaaaaaggtggatcagtgattttacttgaaaacaagctccatcccttttctatatttataagaagagaagatcttgagtgaagcagcacgcgacccaggtgtgtgtgaattgaatggagacgtttcttttctctttctttaatttttgtttttgttctttttttctttaaggaaagttttattttactgttcattttactttcttggtaacaaaaactaaaataaggaatagaaaagctgtttttcaggctgacagtccaattaagggtagccaagaccttgcatggtagagtaggaatcatagtgtcagtgaggtcccgtgagtctttgtgagtccttgtgtcatcgttcgggcactgtttttttatgcaagggcaaaaatctttgtatctggggaaaaaaaacttttttttaaattaaaaaggaaaataaaagatattgaggtcttcctagtgttacttaaattaagatcaaggtaagaaacattgtaaaaaaaaattacaaaagtgctatttgtttcctaaaaacagtgatttctattaaaaaggtgtcagaactggaaaaaaaaaaaa

SEQ ID NO: 427882 - DNA, 3954 bp, Homo sapiens
gtgagagagagaggagaggagaggaggaggaggaggagggagaagggaacaacctaccatcttaacacactaatatctaaaaagtgcgagaggcccagagcagcagcagaagcagcagcagcagctccagcttcttccctccctccccatgaagaagagttccctcctcctcctcctcctgcttctcctgctcagagttcctgcctccagctgccaggggggacagccagccagcagcaggaggggggctagagagctgaaggagagccagtttccccaaaattgctgcagtgagaagaggagtttgttactttaaacagaggctgaagaaactatagaattagcagagaaagtggagaaggtagaggatggagttgcagactctacaggaggctcttaaagtggaaattcaggttcaccagaaactggttgctcaaatgaagcaggatccacagaatgctgacttaaagaaacagcttcatgaactccaagccaaaatcacagctttgagtgagaaacagaaaagagtagttgaacagctacggaagaacctgatagtaaagcaagaacaaccggacaagttccaaatacagccattgccacaatctgaaaacaaactacaaacagcacagcagcaaccactacagcaactacaacaacagcagcagtaccaccaccaccacgcccagcagtcagctgcagcctctcccaacctgactgcttcacagaagactgtaactacagcttctatgattaccacaaagacactacctctcgtcttgaaagcagcaactgcgaccatgcctgcctctgtggtgggccagagacctaccattgctatggtgaccgccatcaacagtcagaaggctgtgctcagcactgatgtgcagaacacaccagtcaacctccagacgtctagtaaggtcactgggcctggggcagaggctgtccaaattgtggcaaaaaacacagtcactctgcaggttcaggcaacacctcctcagcccatcaaagtaccacagtttatcccccctcctagactcactccacgtccaaactttcttccacaggttcgacccaagcctgtggcccagaataacattcctattgccccagcaccacctcccatgctcgcagctcctcagcttatccagaggcccgtcatgctgaccaagttcacccccacaacccttcccacatcccagaattccatccaccccgtccgtgtcgtcaatgggcagactgcaaccatagccaaaacgttccccatggcccagctcaccagcattgtgatagctactccagggaccagactcgctggacctcaaactgtacagcttagcaagccaagtcttgaaaaacagacagttaaatctcacacagaaacagatgagaaacaaacagagagccgcaccatcaccccacctgctgcacccaaaccaaaacgggaggagaaccctcagaaacttgccttcatggtgtctctagggttggtaacacatgaccatctagaagaaatccaaagcaagaggcaagagcgaaaaagaagaacaacagcaaatccggtctacagtggagcagtctttgagccagagcgtaagaagagtgcagtgacatacctaaacagcacaatgcaccctgggacccggaagagaggtcgtcctccaaaatacaatgcagtgctggggtttggagcccttaccccaacatccccccaatccagtcatcctgactcccctgaaaatgaaaagacagagaccacattcactttccctgcacctgttcagcctgtgtccctgcccagccccacctccacagacggtgatattcatgaggatttttgcagcgtttgcagaaaaagtggccagttactgatgtgcgacacatgttcccgtgtatatcatttggactgcttagacccccctctgaaaacaattcccaagggcatgtggatctgtcccagatgtcaggaccagatgctgaagaaggaagaagcaattccatggcctggaactttagcaattgttcattcctatattgcctacaaagcagcaaaagaagaagagaaacagaagttacttaaatggagttcagatttaaaacaagaacgagaacaactagagcaaaaggtgaaacagctcagcaattccataagttcacctgagcgagtgggcccatccgtacggccctccctcgctctttcttccacaccatgctgattgcatttcccggttttcctgaccagtgtgaggaagcgggctttctagagacaagtattggaaaaatgcatggaaatgaagaacaccatcctggcccggcagaaggagatgcacagctccctggagaaggtaaaacagctgattcgcctcatccacggcatcgacctctccaaacctgtagactctgaggccactgtgggggccatctccaatggcccggactgcaccccccctgccaatgccgccacctccacgccggccccttccccctcctcccagagctgcacagcgaactgtaaccagggggaagagactaaataacagagcccctctaggagaagccacgggatcccggcggcaaggagaacagaacactgaagactctagaaaagcaaagccggatttctggaaagtgcagaattcttttggttctttggttccagagagagagaagatgcttgtgccaggtggcaccagagtttgccaattgatccttcttattctgtgtgtacatgcaaagattggaccatgttacatgaaatagtgccagctggaggttctttgccagcaccatgccaagtgaaataatatatttactctctctattatacaccagtgtgtgcctgcagcagcctccacagccacgatgggtttgtttctgttttcttgggtggggagcagggacgggcggagggaggagagcaggtttcagatccttacttgccgagccgtttgtttaggtagagaagacaagtccaaagagtgtgtgggctttcctgtttctaaactttcgctactataaaaccaaaaaaaggaattgagatttcaccaaccccagtgcccagaagagggaaggggagtggctggagggagcagggggtgggacagtgtatcaaataagcagtatttaatcacctctggcgggggcctcgtgcaaggggagactgacaccaagaacagccagtaggttcttctcccctgcactctgctccctgcgcggtaaccccaccactcctgaagcctgcccagtctccttccttccctgcttggtgagtcgcgcatctccgtggttatcccgctgtctcctctccaagaacaagcagagcccgggccactggcccttgcccaaggcagggaagaaggatgtgtgtgtccaggaaggaaaaaaaggtggatcagtgattttacttgaaaacaagctccatcccttttctatatttataagaagagaagatcttgagtgaagcagcacgcgacccaggtgtgtgtgaattgaatggagacgtttcttttctctttctttaatttttgtttttgttctttttttctttaaggaaagttttattttactgttcattttactttcttggtaacaaaaactaaaataaggaatagaaaagctgtttttcaggctgacagtccaattaagggtagccaagaccttgcatggtagagtaggaatcatagtgtcagtgaggtcccgtgagtctttgtgagtccttgtgtcatcgttcgggcactgtttttttatgcaagggcaaaaatctttgtatctggggaaaaaaaacttttttttaaattaaaaaggaaaataaaagatattgaggtcttcctagtgttacttaaattaagatcaaggtaagaaacattgtaaaaaaaaattacaaaagtgctatttgtttcctaaaaacagtgatttctattaaaaaggtgtcagaactggaaaaaaaaaaaa

SEQ ID NO: 427883 - DNA, 3664 bp, Homo sapiens
gtgagagagagaggagaggagaggaggaggaggaggagggagaagggaacaacctaccatcttaacacactaatatctaaaaagtgcgagaggcccagagcagcagcagaagcagcagcagcagctccagcttcttccctccctccccatgaagaagagttccctcctcctcctcctcctgcttctcctgctcagagttcctgcctccagctgccaggggggacagccagccagcagcaggaggggggctagagagctgaaggagagccagtttccccaaaattgctgcagtgagaagaggagtttgttactttaaacagaggctgaagaaactatagaattagcagagaaagtggagaaggtagaggatggagttgcagactctacaggaggctcttaaagtggaaattcaggttcaccagaaactggttgctcaaatgaagcaggatccacagaatgctgacttaaagaaacagcttcatgaactccaagccaaaatcacagctttgagtgagaaacagaaaagagtagttgaacagctacggaagaacctgatagtaaagcaagaacaaccggacaagttccaaatacagccattgccacaatctgaaaacaaactacaaacagcacagcagcaaccactacagcaactacaacaacagcagcagtaccaccaccaccacgcccagcagtcagctgcagcctctcccaacctgactgcttcacagaagactgtaactacagcttctatgattaccacaaagacactacctctcgtcttgaaagcagcaactgcgaccatgcctgcctctgtggtgggccagagacctaccattgctatggtgaccgccatcaacagtcagaaggctgtgctcagcactgatgtgcagaacacaccagtcaacctccagacgtctagtaaggtcactgggcctggggcagaggctgtccaaattgtggcaaaaaacacagtcactctgcaggttcaggcaacacctcctcagcccatcaaagtaccacagtttatcccccctcctagactcactccacgtccaaactttcttccacaggttcgacccaagcctgtggcccagaataacattcctattgccccagcaccacctcccatgctcgcagctcctcagcttatccagaggcccgtcatgctgaccaagttcacccccacaacccttcccacatcccagaattccatccaccccgtccgtgtcgtcaatgggcagactgcaaccatagccaaaacgttccccatggcccagctcaccagcattgtgatagctactccagggaccagactcgctggacctcaaactgtacagcttagcaagccaagtcttgaaaaacagacagttaaatctcacacagaaacagatgagaaacaaacagagagccgcaccatcaccccacctgctgcacccaaaccaaaacgggaggagaaccctcagaaacttgccttcatggtgtctctagggttggtaacacatgaccatctagaagaaatccaaagcaagaggcaagagcgaaaaagaagaacaacagcaaatccggtctacagtggagcagtctttgagccagagcgtaagaagagtgcagtgacatacctaaacagcacaatgcaccctgggacccggaagagagggtgatattcatgaggatttttgcagcgtttgcagaaaaagtggccagttactgatgtgcgacacatgttcccgtgtatatcatttggactgcttagacccccctctgaaaacaattcccaagggcatgtggatctgtcccagatgtcaggaccagatgctgaagaaggaagaagcaattccatggcctggaactttagcaattgttcattcctatattgcctacaaagcagcaaaagaagaagagaaacagaagttacttaaatggagttcagatttaaaacaagaacgagaacaactagagcaaaaggtgaaacagctcagcaattccataagtaaatgcatggaaatgaagaacaccatcctggcccggcagaaggagatgcacagctccctggagaaggtaaaacagctgattcgcctcatccacggcatcgacctctccaaacctgtagactctgaggccactgtgggggccatctccaatggcccggactgcaccccccctgccaatgccgccacctccacgccggccccttccccctcctcccagagctgcacagcgaactgtaaccagggggaagagactaaataacagagcccctctaggagaagccacgggatcccggcggcaaggagaacagaacactgaagactctagaaaagcaaagccggatttctggaaagtgcagaattcttttggttctttggttccagagagagagaagatgcttgtgccaggtggcaccagagtttgccaattgatccttcttattctgtgtgtacatgcaaagattggaccatgttacatgaaatagtgccagctggaggttctttgccagcaccatgccaagtgaaataatatatttactctctctattatacaccagtgtgtgcctgcagcagcctccacagccacgatgggtttgtttctgttttcttgggtggggagcagggacgggcggagggaggagagcaggtttcagatccttacttgccgagccgtttgtttaggtagagaagacaagtccaaagagtgtgtgggctttcctgtttctaaactttcgctactataaaaccaaaaaaaggaattgagatttcaccaaccccagtgcccagaagagggaaggggagtggctggagggagcagggggtgggacagtgtatcaaataagcagtatttaatcacctctggcgggggcctcgtgcaaggggagactgacaccaagaacagccagtaggttcttctcccctgcactctgctccctgcgcggtaaccccaccactcctgaagcctgcccagtctccttccttccctgcttggtgagtcgcgcatctccgtggttatcccgctgtctcctctccaagaacaagcagagcccgggccactggcccttgcccaaggcagggaagaaggatgtgtgtgtccaggaaggaaaaaaaggtggatcagtgattttacttgaaaacaagctccatcccttttctatatttataagaagagaagatcttgagtgaagcagcacgcgacccaggtgtgtgtgaattgaatggagacgtttcttttctctttctttaatttttgtttttgttctttttttctttaaggaaagttttattttactgttcattttactttcttggtaacaaaaactaaaataaggaatagaaaagctgtttttcaggctgacagtccaattaagggtagccaagaccttgcatggtagagtaggaatcatagtgtcagtgaggtcccgtgagtctttgtgagtccttgtgtcatcgttcgggcactgtttttttatgcaagggcaaaaatctttgtatctggggaaaaaaaacttttttttaaattaaaaaggaaaataaaagatattgaggtcttcctagtgttacttaaattaagatcaaggtaagaaacattgtaaaaaaaaattacaaaagtgctatttgtttcctaaaaacagtgatttctattaaaaaggtgtcagaactggaaaaaaaaaaaa

SEQ ID NO: 427884 - DNA, 2531 bp, Homo sapiens
  misc_feature (2513)..(2513): n is a, c, g, or t
gtgagagagagaggagaggagaggaggaggaggaggagggagaagggaacaacctaccatcttaacacactaatatctaaaaagtgcgagaggcccagagcagcagcagaagcagcagcagcagctccagcttcttccctccctccccatgaagaagagttccctcctcctcctcctcctgcttctcctgctcagagttcctgcctccagctgccaggggggacagccagccagcagcaggaggggggctagagagctgaaggagagccagtttccccaaaattgctgcagtgagaagaggagtttgttactttaaacagaggctgaagaaactatagaattagcagagaaagtggagaaggtagaggatggagttgcagactctacaggaggctcttaaagtggaaattcaggttcaccagaaactggttgctcaaatgaagcaggatccacagaatgctgacttaaagaaacagcttcatgaactccaagccaaaatcacagctttgagtgagaaacagaaaagagtagttgaacagctacggaagaacctgatagtaaagcaagaacaaccggacaagttccaaatacagccattgccacaatctgaaaacaaactacaaacagcacagcagcaaccactacagcaactacaacaacagcagcagtaccaccaccaccacgcccagcagtcagctgcagcctctcccaacctgactgcttcacagaagactgtaactacagcttctatgattaccacaaagacactacctctcgtcttgaaagcagcaactgcgaccatgcctgcctctgtggtgggccagagacctaccattgctatggtgaccgccatcaacagtcagaaggctgtgctcagcactgatgtgcagaacacaccagtcaacctccagacgtctagtaaggtcactgggcctggggcagaggctgtccaaattgtggcaaaaaacacagtcactctgcaggttcaggcaacacctcctcagcccatcaaagtaccacagtttatcccccctcctagactcactccacgtccaaactttcttccacaggttcgacccaagcctgtggcccagaataacattcctattgccccagcaccacctcccatgctcgcagctcctcagcttatccagaggcccgtcatgctgaccaagttcacccccacaacccttcccacatcccagaattccatccaccccgtccgtgtcgtcaatgggcagactgcaaccatagccaaaacgttccccatggcccagctcaccagcattgtgatagctactccagggaccagactcgctggacctcaaactgtacagcttagcaagccaagtcttgaaaaacagacagttaaatctcacacagaaacagatgagaaacaaacagagagccgcaccatcaccccacctgctgcacccaaaccaaaacgggaggagaaccctcagaaacttgccttcatggtgtctctagggttggtaacacatgaccatctagaagaaatccaaagcaagaggcaagagcgaaaaagaagaacaacagcaaatccggtctacagtggagcagtctttgagccagagcgtaagaagagtgcagtgacatacctaaacagcacaatgcaccctgggacccggaagagaggtcgtcctccaaaatacaatgcagtgctggggtttggagcccttaccccaacatccccccaatccagtcatcctgactcccctgaaaatgaaaagacagagaccacattcactttccctgcacctgttcagcctgtgtccctgcccagccccacctccacagacggtgatattcatgaggatttttgcagcgtttgcagaaaaagtggccagttactgatgtgcgacacatgttcccgtgtatatcatttggactgcttagacccccctctgaaaacaattcccaagggcatgtggatctgtcccagatgtcaggaccagatgctgaagaaggaagaagcaattccatggcctggaactttagcaattgttcattcctatattgcctacaaagcagcaaaagaagaagagaaacagaagttacttaaatggagttcagatttaaaacaagaacgagaacaactagagcaaaaggtgaaacagctcagcaattccataagtaaatgcatggaaatgaagaacaccatcctggcccggcagaaggagatgcacagctccctggagaaggtaaaacagctgattcgcctcatccacggcatcgacctctccaaacctgtagactctgaggccactgtgggggccatctccaatggcccggactgcaccccccctgccaatgccgccgggatcccgtggcttctcccacagtttatcccccctcctagactcactccacgtccaaactttcttccacaggttcgacccaagcctgtggcccagaataacattcctattgccccagcaccacctcccatgctcgcagctcctcagcttatccagaggcgcgtcatgctgacnagttcaccccacaacctt

SEQ ID NO: 427885 - DNA, 3687 bp, Homo sapiens
gtgagagagagaggagaggagaggaggaggaggaggagggagaagggaacaacctaccatcttaacacactaatatctaaaaagtgcgagaggcccagagcagcagcagaagcagcagcagcagctccagcttcttccctccctccccatgaagaagagttccctcctcctcctcctcctgcttctcctgctcagagttcctgcctccagctgccaggggggacagccagccagcagcaggaggggggctagagagctgaaggagagccagtttccccaaaattgctgcagtgagaagaggagtttgttactttaaacagaggctgaagaaactatagaattagcagagaaagtggagaaggtagaggatggagttgcagactctacaggaggctcttaaagtggaaattcaggttcaccagaaactggttgctcaaatgaagcaggatccacagaatgctgacttaaagaaacagcttcatgaactccaagccaaaatcacagctttgagtgagaaacagaaaagagtagttgaacagctacggaagaacctgatagtaaagcaagaacaaccggacaagttccaaatacagccattgccacaatctgaaaacaaactacaaacagcacagcagcaaccactacagcaactacaacaacagcagcagtaccaccaccaccacgcccagcagtcagctgcagcctctcccaacctgactgcttcacagaagactgtaactacagcttctatgattaccacaaagacactacctctcgtcttgaaagcagcaactgcgaccatgcctgcctctgtggtgggccagagacctaccattgctatggtgaccgccatcaacagtcagaaggctgtgctcagcactgatgtgcagaacacaccagtcaacctccagacgtctagtaaggtcactgggcctggggcagaggctgtccaaattgtggcaaaaaacacagtcactctgcaggttcaggcaacacctcctcagcccatcaaagtaccacagtttatcccccctcctagactcactccacgtccaaactttcttccacaggttcgacccaagcctgtggcccagaataacattcctattgccccagcaccacctcccatgctcgcagctcctcagcttatccagaggcccgtcatgctgaccaagttcacccccacaacccttcccacatcccagaattccatccaccccgtccgtgtcgtcaatgggcagactgcaaccatagccaaaacgttccccatggcccagctcaccagcattgtgatagctactccagggaccagactcgctggacctcaaactgtacagcttagcaagccaagtcttgaaaaacagacagttaaatctcacacagaaacagatgagaaacaaacagagagccgcaccatcaccccacctgctgcacccaaaccaaaacgggaggagaaccctcagaaacttgccttcatggtgtctctagggttggtaacacatgaccatctagaagaaatccaaagcaagaggcaagagcgaaaaagaagaacaacagcaaatccggtctacagtggagcagtctttgagccagagcgtaagaagagtgcagtgacatacctaaacagcacaatgcaccctgggacccggaagagagccaatgaggaacactggccaaagggtgatattcatgaggatttttgcagcgtttgcagaaaaagtggccagttactgatgtgcgacacatgttcccgtgtatatcatttggactgcttagacccccctctgaaaacaattcccaagggcatgtggatctgtcccagatgtcaggaccagatgctgaagaaggaagaagcaattccatggcctggaactttagcaattgttcattcctatattgcctacaaagcagcaaaagaagaagagaaacagaagttacttaaatggagttcagatttaaaacaagaacgagaacaactagagcaaaaggtgaaacagctcagcaattccataagtaaatgcatggaaatgaagaacaccatcctggcccggcagaaggagatgcacagctccctggagaaggtaaaacagctgattcgcctcatccacggcatcgacctctccaaacctgtagactctgaggccactgtgggggccatctccaatggcccggactgcaccccccctgccaatgccgccacctccacgccggccccttccccctcctcccagagctgcacagcgaactgtaaccagggggaagagactaaataacagagcccctctaggagaagccacgggatcccggcggcaaggagaacagaacactgaagactctagaaaagcaaagccggatttctggaaagtgcagaattcttttggttctttggttccagagagagagaagatgcttgtgccaggtggcaccagagtttgccaattgatccttcttattctgtgtgtacatgcaaagattggaccatgttacatgaaatagtgccagctggaggttctttgccagcaccatgccaagtgaaataatatatttactctctctattatacaccagtgtgtgcctgcagcagcctccacagccacgatgggtttgtttctgttttcttgggtggggagcagggacgggcggagggaggagagcaggtttcagatccttacttgccgagccgtttgtttaggtagagaagacaagtccaaagagtgtgtgggctttcctgtttctaaactttcgctactataaaaccaaaaaaaggaattgagatttcaccaaccccagtgcccagaagagggaaggggagtggctggagggagcagggggtgggacagtgtatcaaataagcagtatttaatcacctctggcgggggcctcgtgcaaggggagactgacaccaagaacagccagtaggttcttctcccctgcactctgctccctgcgcggtaaccccaccactcctgaagcctgcccagtctccttccttccctgcttggtgagtcgcgcatctccgtggttatcccgctgtctcctctccaagaacaagcagagcccgggccactggcccttgcccaaggcagggaagaaggatgtgtgtgtccaggaaggaaaaaaaggtggatcagtgattttacttgaaaacaagctccatcccttttctatatttataagaagagaagatcttgagtgaagcagcacgcgacccaggtgtgtgtgaattgaatggagacgtttcttttctctttctttaatttttgtttttgttctttttttctttaaggaaagttttattttactgttcattttactttcttggtaacaaaaactaaaataaggaatagaaaagctgtttttcaggctgacagtccaattaagggtagccaagaccttgcatggtagagtaggaatcatagtgtcagtgaggtcccgtgagtctttgtgagtccttgtgtcatcgttcgggcactgtttttttatgcaagggcaaaaatctttgtatctggggaaaaaaaacttttttttaaattaaaaaggaaaataaaagatattgaggtcttcctagtgttacttaaattaagatcaaggtaagaaacattgtaaaaaaaaattacaaaagtgctatttgtttcctaaaaacagtgatttctattaaaaaggtgtcagaactggaaaaaaaaaaaa

SEQ ID NO: 427886 - DNA, 3658 bp, Homo sapiens
gtccatcctttttcctattcagtcttctggaaggagctgcctctgaaatactcttcttctgcttacatgaagatctctaaatgctatccagcaggaggtgctacagcaagataaaggaaatttttgaattttgagggtcttgctacttattacagctctgcttagcttcagctaagcaacaggattaacaccttaaagttccagaaagattttgaggggctagagagctgaaggagagccagtttccccaaaattgctgcagtgagaagaggagtttgttactttaaacagaggctgaagaaactatagaattagcagagaaagtggagaaggtagaggatggagttgcagactctacaggaggctcttaaagtggaaattcaggttcaccagaaactggttgctcaaatgaagcaggatccacagaatgctgacttaaagaaacagcttcatgaactccaagccaaaatcacagctttgagtgagaaacagaaaagagtagttgaacagctacggaagaacctgatagtaaagcaagaacaaccggacaagttccaaatacagccattgccacaatctgaaaacaaactacaaacagcacagcagcaaccactacagcaactacaacaacagcagcagtaccaccaccaccacgcccagcagtcagctgcagcctctcccaacctgactgcttcacagaagactgtaactacagcttctatgattaccacaaagacactacctctcgtcttgaaagcagcaactgcgaccatgcctgcctctgtggtgggccagagacctaccattgctatggtgaccgccatcaacagtcagaaggctgtgctcagcactgatgtgcagaacacaccagtcaacctccagacgtctagtaaggtcactgggcctggggcagaggctgtccaaattgtggcaaaaaacacagtcactctgcaggttcaggcaacacctcctcagcccatcaaagtaccacagtttatcccccctcctagactcactccacgtccaaactttcttccacaggttcgacccaagcctgtggcccagaataacattcctattgccccagcaccacctcccatgctcgcagctcctcagcttatccagaggcccgtcatgctgaccaagttcacccccacaacccttcccacatcccagaattccatccaccccgtccgtgtcgtcaatgggcagactgcaaccatagccaaaacgttccccatggcccagctcaccagcattgtgatagctactccagggaccagactcgctggacctcaaactgtacagcttagcaagccaagtcttgaaaaacagacagttaaatctcacacagaaacagatgagaaacaaacagagagccgcaccatcaccccacctgctgcacccaaaccaaaacgggaggagaaccctcagaaacttgccttcatggtgtctctagggttggtaacacatgaccatctagaagaaatccaaagcaagaggcaagagcgaaaaagaagaacaacagcaaatccggtctacagtggagcagtctttgagccagagcgtaagaagagtgcagtgacatacctaaacagcacaatgcaccctgggacccggaagagagccaatgaggaacactggccaaagggtgatattcatgaggatttttgcagcgtttgcagaaaaagtggccagttactgatgtgcgacacatgttcccgtgtatatcatttggactgcttagacccccctctgaaaacaattcccaagggcatgtggatctgtcccagatgtcaggaccagatgctgaagaaggaagaagcaattccatggcctggaactttagcaattgttcattcctatattgcctacaaagcagcaaaagaagaagagaaacagaagttacttaaatggagttcagatttaaaacaagaacgagaacaactagagcaaaaggtgaaacagctcagcaattccataagtaaatgcatggaaatgaagaacaccatcctggcccggcagaaggagatgcacagctccctggagaaggtaaaacagctgattcgcctcatccacggcatcgacctctccaaacctgtagactctgaggccactgtgggggccatctccaatggcccggactgcaccccccctgccaatgccgccacctccacgccggccccttccccctcctcccagagctgcacagcgaactgtaaccagggggaagagactaaataacagagcccctctaggagaagccacgggatcccggcggcaaggagaacagaacactgaagactctagaaaagcaaagccggatttctggaaagtgcagaattcttttggttctttggttccagagagagagaagatgcttgtgccaggtggcaccagagtttgccaattgatccttcttattctgtgtgtacatgcaaagattggaccatgttacatgaaatagtgccagctggaggttctttgccagcaccatgccaagtgaaataatatatttactctctctattatacaccagtgtgtgcctgcagcagcctccacagccacgatgggtttgtttctgttttcttgggtggggagcagggacgggcggagggaggagagcaggtttcagatccttacttgccgagccgtttgtttaggtagagaagacaagtccaaagagtgtgtgggctttcctgtttctaaactttcgctactataaaaccaaaaaaaggaattgagatttcaccaaccccagtgcccagaagagggaaggggagtggctggagggagcagggggtgggacagtgtatcaaataagcagtatttaatcacctctggcgggggcctcgtgcaaggggagactgacaccaagaacagccagtaggttcttctcccctgcactctgctccctgcgcggtaaccccaccactcctgaagcctgcccagtctccttccttccctgcttggtgagtcgcgcatctccgtggttatcccgctgtctcctctccaagaacaagcagagcccgggccactggcccttgcccaaggcagggaagaaggatgtgtgtgtccaggaaggaaaaaaaggtggatcagtgattttacttgaaaacaagctccatcccttttctatatttataagaagagaagatcttgagtgaagcagcacgcgacccaggtgtgtgtgaattgaatggagacgtttcttttctctttctttaatttttgtttttgttctttttttctttaaggaaagttttattttactgttcattttactttcttggtaacaaaaactaaaataaggaatagaaaagctgtttttcaggctgacagtccaattaagggtagccaagaccttgcatggtagagtaggaatcatagtgtcagtgaggtcccgtgagtctttgtgagtccttgtgtcatcgttcgggcactgtttttttatgcaagggcaaaaatctttgtatctggggaaaaaaaacttttttttaaattaaaaaggaaaataaaagatattgaggtcttcctagtgttacttaaattaagatcaaggtaagaaacattgtaaaaaaaaattacaaaagtgctatttgtttcctaaaaacagtgatttctattaaaaaggtgtcagaactggaaaaaaaaaaaa

SEQ ID NO: 427887 - DNA, 3097 bp, Homo sapiens
tacgacctggacttttacagggagaccgtctatatcttgcagtccggaacacacctcgtgagtactacacagcagcagtaccaccaccaccacgcccagcagtcagctgcagcctctcccaacctgactgcttcacagaagactgtaactacagcttctatgattaccacaaagacactacctctcgtcttgaaagcagcaactgcgaccatgcctgcctctgtggtgggccagagacctaccattgctatggtgaccgccatcaacagtcagaaggctgtgctcagcactgatgtgcagaacacaccagtcaacctccagacgtctagtaaggtcactgggcctggggcagaggctgtccaaattgtggcaaaaaacacagtcactctgcaggttcaggcaacacctcctcagcccatcaaagtaccacagtttatcccccctcctagactcactccacgtccaaactttcttccacaggttcgacccaagcctgtggcccagaataacattcctattgccccagcaccacctcccatgctcgcagctcctcagcttatccagaggcccgtcatgctgaccaagttcacccccacaacccttcccacatcccagaattccatccaccccgtccgtgtcgtcaatgggcagactgcaaccatagccaaaacgttccccatggcccagctcaccagcattgtgatagctactccagggaccagactcgctggacctcaaactgtacagcttagcaagccaagtcttgaaaaacagacagttaaatctcacacagaaacagatgagaaacaaacagagagccgcaccatcaccccacctgctgcacccaaaccaaaacgggaggagaaccctcagaaacttgccttcatggtgtctctagggttggtaacacatgaccatctagaagaaatccaaagcaagaggcaagagcgaaaaagaagaacaacagcaaatccggtctacagtggagcagtctttgagccagagcgtaagaagagtgcagtgacatacctaaacagcacaatgcaccctgggacccggaagagagccaatgaggaacactggccaaagggtgatattcatgaggatttttgcagcgtttgcagaaaaagtggccagttactgatgtgcgacacatgttcccgtgtatatcatttggactgcttagacccccctctgaaaacaattcccaagggcatgtggatctgtcccagatgtcaggaccagatgctgaagaaggaagaagcaattccatggcctggaactttagcaattgttcattcctatattgcctacaaagcagcaaaagaagaagagaaacagaagttacttaaatggagttcagatttaaaacaagaacgagaacaactagagcaaaaggtgaaacagctcagcaattccataagtaaatgcatggaaatgaagaacaccatcctggcccggcagaaggagatgcacagctccctggagaaggtaaaacagctgattcgcctcatccacggcatcgacctctccaaacctgtagactctgaggccactgtgggggccatctccaatggcccggactgcaccccccctgccaatgccgccacctccacgccggccccttccccctcctcccagagctgcacagcgaactgtaaccagggggaagagactaaataacagagcccctctaggagaagccacgggatcccggcggcaaggagaacagaacactgaagactctagaaaagcaaagccggatttctggaaagtgcagaattcttttggttctttggttccagagagagagaagatgcttgtgccaggtggcaccagagtttgccaattgatccttcttattctgtgtgtacatgcaaagattggaccatgttacatgaaatagtgccagctggaggttctttgccagcaccatgccaagtgaaataatatatttactctctctattatacaccagtgtgtgcctgcagcagcctccacagccacgatgggtttgtttctgttttcttgggtggggagcagggacgggcggagggaggagagcaggtttcagatccttacttgccgagccgtttgtttaggtagagaagacaagtccaaagagtgtgtgggctttcctgtttctaaactttcgctactataaaaccaaaaaaaggaattgagatttcaccaaccccagtgcccagaagagggaaggggagtggctggagggagcagggggtgggacagtgtatcaaataagcagtatttaatcacctctggcgggggcctcgtgcaaggggagactgacaccaagaacagccagtaggttcttctcccctgcactctgctccctgcgcggtaaccccaccactcctgaagcctgcccagtctccttccttccctgcttggtgagtcgcgcatctccgtggttatcccgctgtctcctctccaagaacaagcagagcccgggccactggcccttgcccaaggcagggaagaaggatgtgtgtgtccaggaaggaaaaaaaggtggatcagtgattttacttgaaaacaagctccatcccttttctatatttataagaagagaagatcttgagtgaagcagcacgcgacccaggtgtgtgtgaattgaatggagacgtttcttttctctttctttaatttttgtttttgttctttttttctttaaggaaagttttattttactgttcattttactttcttggtaacaaaaactaaaataaggaatagaaaagctgtttttcaggctgacagtccaattaagggtagccaagaccttgcatggtagagtaggaatcatagtgtcagtgaggtcccgtgagtctttgtgagtccttgtgtcatcgttcgggcactgtttttttatgcaagggcaaaaatctttgtatctggggaaaaaaaacttttttttaaattaaaaaggaaaataaaagatattgaggtcttcctagtgttacttaaattaagatcaaggtaagaaacattgtaaaaaaaaattacaaaagtgctatttgtttcctaaaaacagtgatttctattaaaaaggtgtcagaactggaaaaaaaaaaaa

SEQ ID NO: 427888 - DNA, 3828 bp, Homo sapiens
gtgagagagagaggagaggagaggaggaggaggaggagggagaagggaacaacctaccatcttaacacactaatatctaaaaagtgcgagaggcccagagcagcagcagaagcagcagcagcagctccagcttcttccctccctccccatgaagaagagttccctcctcctcctcctcctgcttctcctgctcagagttcctgcctccagctgccaggggggacagccagccagcagcaggaggggggctagagagctgaaggagagccagtttccccaaaattgctgcagtgagaagaggagtttgttactttaaacagaggctgaagaaactatagaattagcagagaaagtggagaaggtagaggatggagttgcagactctacaggaggctcttaaagtggaaattcaggttcaccagaaactggttgctcaaatgaagcaggatccacagaatgctgacttaaagaaacagcttcatgaactccaagccaaaatcacagctttgagtgagaaacagaaaagagtagttgaacagctacggaagaacctgatagtaaagcaagaacaaccggacaagttccaaatacagccattgccacaatctgaaaacaaactacaaacagcacagcagcaaccactacagcaactacaacaacagcagcagtaccaccaccaccacgcccagcagtcagctgcagcctctcccaacctgactgcttcacagaagactgtaactacagcttctatgattaccacaaagacactacctctcgtcttgaaagcagcaactgcgaccatgcctgcctctgtggtgggccagagacctaccattgctatggtgaccgccatcaacagtcagaaggctgtgctcagcactgatgtgcagaacacaccagtcaacctccagacgtctagtaaggtcactgggcctggggcagaggctgtccaaattgtggcaaaaaacacagtcactctgcaggttcaggcaacacctcctcagcccatcaaagtaccacagtttatcccccctcctagactcactccacgtccaaactttcttccacaggttcgacccaagcctgtggcccagaataacattcctattgccccagcaccacctcccatgctcgcagctcctcagcttatccagaggcccgtcatgctgaccaagttcacccccacaacccttcccacatcccagaattccatccaccccgtccgtgtcgtcaatgggcagactgcaaccatagccaaaacgttccccatggcccagctcaccagcattgtgatagctactccagggaccagactcgctggacctcaaactgtacagcttagcaagccaagtcttgaaaaacagacagttaaatctcacacagaaacagatgagaaacaaacagagagccgcaccatcaccccacctgctgcacccaaaccaaaacgggaggagaaccctcagaaacttgccttcatggtgtctctagggttggtaacacatgaccatctagaagaaatccaaagcaagaggcaagagcgaaaaagaagaacaacagcaaatccggtctacagtggagcagtctttgagccagagcgtaagaagagtgcagtgacatacctaaacagcacaatgcaccctgggacccggaagagaggtcgtcctccaaaatacaatgcagtgctggggtttggagcccttaccccaacatccccccaatccagtcatcctgactcccctgaaaatgaaaagacagagaccacattcactttccctgcacctgttcagcctgtgtccctgcccagccccacctccacagacggtgatattcatgaggatttttgcagcgtttgcagaaaaagtggccagttactgatgtgcgacacatgttcccgtgtatatcatttggactgcttagacccccctctgaaaacaattcccaagggcatgtggatctgtcccagatgtcaggaccagatgctgaagaaggaagaagcaattccatggcctggaactttagcaattgttcattcctatattgcctacaaagcagcaaaagaagaagagaaacagaagttacttaaatggagttcagatttaaaacaagaacgagaacaactagagcaaaaggtgaaacagctcagcaattccataagtaaatgcatggaaatgaagaacaccatcctggcccggcagaaggagatgcacagctccctggagaaggtaaaacagctgattcgcctcatccacggcatcgacctctccaaacctgtagactctgaggccactgtgggggccatctccaatggcccggactgcaccccccctgccaatgccgccacctccacgccggccccttccccctcctcccagagctgcacagcgaactgtaaccagggggaagagactaaataacagagcccctctaggagaagccacgggatcccggcggcaaggagaacagaacactgaagactctagaaaagcaaagccggatttctggaaagtgcagaattcttttggttctttggttccagagagagagaagatgcttgtgccaggtggcaccagagtttgccaattgatccttcttattctgtgtgtacatgcaaagattggaccatgttacatgaaatagtgccagctggaggttctttgccagcaccatgccaagtgaaataatatatttactctctctattatacaccagtgtgtgcctgcagcagcctccacagccacgatgggtttgtttctgttttcttgggtggggagcagggacgggcggagggaggagagcaggtttcagatccttacttgccgagccgtttgtttaggtagagaagacaagtccaaagagtgtgtgggctttcctgtttctaaactttcgctactataaaaccaaaaaaaggaattgagatttcaccaaccccagtgcccagaagagggaaggggagtggctggagggagcagggggtgggacagtgtatcaaataagcagtatttaatcacctctggcgggggcctcgtgcaaggggagactgacaccaagaacagccagtaggttcttctcccctgcactctgctccctgcgcggtaaccccaccactcctgaagcctgcccagtctccttccttccctgcttggtgagtcgcgcatctccgtggttatcccgctgtctcctctccaagaacaagcagagcccgggccactggcccttgcccaaggcagggaagaaggatgtgtgtgtccaggaaggaaaaaaaggtggatcagtgattttacttgaaaacaagctccatcccttttctatatttataagaagagaagatcttgagtgaagcagcacgcgacccaggtgtgtgtgaattgaatggagacgtttcttttctctttctttaatttttgtttttgttctttttttctttaaggaaagttttattttactgttcattttactttcttggtaacaaaaactaaaataaggaatagaaaagctgtttttcaggctgacagtccaattaagggtagccaagaccttgcatggtagagtaggaatcatagtgtcagtgaggtcccgtgagtctttgtgagtccttgtgtcatcgttcgggcactgtttttttatgcaagggcaaaaatctttgtatctggggaaaaaaaacttttttttaaattaaaaaggaaaataaaagatattgaggtcttcctagtgttacttaaattaagatcaaggtaagaaacattgtaaaaaaaaattacaaaagtgctatttgtttcctaaaaacagtgatttctattaaaaaggtgtcagaactggaaaaaaaaaaaa

SEQ ID NO: 427889 - DNA, 3672 bp, Homo sapiens
gtgagagagagaggagaggagaggaggaggaggaggagggagaagggaacaacctaccatcttaacacactaatatctaaaaagtgcgagaggcccagagcagcagcagaagcagcagcagcagctccagcttcttccctccctccccatgaagaagagttccctcctcctcctcctcctgcttctcctgctcagagttcctgcctccagctgccaggggggacagccagccagcagcaggaggggggctagagagctgaaggagagccagtttccccaaaattgctgcagtgagaagaggagtttgttactttaaacagaggctgaagaaactatagaattagcagagaaagtggagaaggtagaggatggagttgcagactctacaggaggctcttaaagtggaaattcaggttcaccagaaactggttgctcaaatgaagcaggatccacagaatgctgacttaaagaaacagcttcatgaactccaagccaaaatcacagctttgagtgagaaacagaaaagagtagttgaacagctacggaagaacctgatagtaaagcaagaacaaccggacaagttccaaatacagccattgccacaatctgaaaacaaactacaaacagcacagcagcaaccactacagcaactacaacaacagcagcagtaccaccaccaccacgcccagcagtcagctgcagcctctcccaacctgactgcttcacagaagactgtaactacagcttctatgattaccacaaagacactacctctcgtcttgaaagcagcaactgcgaccatgcctgcctctgtggtgggccagagacctaccattgctatggtgaccgccatcaacagtcagaaggctgtgctcagcactgatgtgcagaacacaccagtcaacctccagacgtctagtaaggtcactgggcctggggcagaggctgtccaaattgtggcaaaaaacacagtcactctgcaggttcaggcaacacctcctcagcccatcaaagtaccacagtttatcccccctcctagactcactccacgtccaaactttcttccacaggttcgacccaagcctgtggcccagaataacattcctattgccccagcaccacctcccatgctcgcagctcctcagcttatccagaggcccgtcatgctgaccaagttcacccccacaacccttcccacatcccagaattccatccaccccgtccgtgtcgtcaatgggcagactgcaaccatagccaaaacgttccccatggcccagctcaccagcattgtgatagctactccagggaccagactcgctggacctcaaactgtacagcttagcaagccaagtcttgaaaaacagacagttaaatctcacacagaaacagatgagaaacaaacagagagccgcaccatcaccccacctgctgcacccaaaccaaaacgggaggagaaccctcagaaacttgccttcatggtgtctctagggttggtaacacatgaccatctagaagaaatccaaagcaagaggcaagagcgaaaaagaagaacaacagcaaatccggtctacagtggagcagtctttgagccagagcgtaagaagagtgcagtgacatacctaaacagcacaatgcaccctgggacccggaagagaggtcgtcctccaaaatacaatgcagtgctggggtttggagcccttaccccaacatccccccaatccagtcatcctgactcccctgaaaatgaaaagacagagaccacattcactttccctgcacctgttcagcctgtgtccctgcccagccccacctccacagacatgctgaagaaggaagaagcaattccatggcctggaactttagcaattgttcattcctatattgcctacaaagcagcaaaagaagaagagaaacagaagttacttaaatggagttcagatttaaaacaagaacgagaacaactagagcaaaaggtgaaacagctcagcaattccataagtaaatgcatggaaatgaagaacaccatcctggcccggcagaaggagatgcacagctccctggagaaggtaaaacagctgattcgcctcatccacggcatcgacctctccaaacctgtagactctgaggccactgtgggggccatctccaatggcccggactgcaccccccctgccaatgccgccacctccacgccggccccttccccctcctcccagagctgcacagcgaactgtaaccagggggaagagactaaataacagagcccctctaggagaagccacgggatcccggcggcaaggagaacagaacactgaagactctagaaaagcaaagccggatttctggaaagtgcagaattcttttggttctttggttccagagagagagaagatgcttgtgccaggtggcaccagagtttgccaattgatccttcttattctgtgtgtacatgcaaagattggaccatgttacatgaaatagtgccagctggaggttctttgccagcaccatgccaagtgaaataatatatttactctctctattatacaccagtgtgtgcctgcagcagcctccacagccacgatgggtttgtttctgttttcttgggtggggagcagggacgggcggagggaggagagcaggtttcagatccttacttgccgagccgtttgtttaggtagagaagacaagtccaaagagtgtgtgggctttcctgtttctaaactttcgctactataaaaccaaaaaaaggaattgagatttcaccaaccccagtgcccagaagagggaaggggagtggctggagggagcagggggtgggacagtgtatcaaataagcagtatttaatcacctctggcgggggcctcgtgcaaggggagactgacaccaagaacagccagtaggttcttctcccctgcactctgctccctgcgcggtaaccccaccactcctgaagcctgcccagtctccttccttccctgcttggtgagtcgcgcatctccgtggttatcccgctgtctcctctccaagaacaagcagagcccgggccactggcccttgcccaaggcagggaagaaggatgtgtgtgtccaggaaggaaaaaaaggtggatcagtgattttacttgaaaacaagctccatcccttttctatatttataagaagagaagatcttgagtgaagcagcacgcgacccaggtgtgtgtgaattgaatggagacgtttcttttctctttctttaatttttgtttttgttctttttttctttaaggaaagttttattttactgttcattttactttcttggtaacaaaaactaaaataaggaatagaaaagctgtttttcaggctgacagtccaattaagggtagccaagaccttgcatggtagagtaggaatcatagtgtcagtgaggtcccgtgagtctttgtgagtccttgtgtcatcgttcgggcactgtttttttatgcaagggcaaaaatctttgtatctggggaaaaaaaacttttttttaaattaaaaaggaaaataaaagatattgaggtcttcctagtgttacttaaattaagatcaaggtaagaaacattgtaaaaaaaaattacaaaagtgctatttgtttcctaaaaacagtgatttctattaaaaaggtgtcagaactggaaaaaaaaaaaa

SEQ ID NO: 427890 - DNA, 2178 bp, Homo sapiens
gggtgtcatgtggcgtcacgagaaaagataggaatgctcagccaagtcccagctccttctaagcctgggctcaagtgtcctggctcttcctgccttgaacttgattctcctaagctgatatttggaactttttagtccagaaactatagaccagggttttgcaacactgctaccataaatccttcctggattttatctgccagtagccacagataccactgctagctgttacatagaggatgtgtgtttaaacctccttctcaaggtaaaattctaaaaatcttttcagatgctgaagaaggaagaagcaattccatggcctggaactttagcaattgttcattcctatattgcctacaaagcagcaaaagaagaagagaaacagaagttacttaaatggagttcagatttaaaacaagaacgagaacaactagagcaaaaggtgaaacagctcagcaattccataagttgtgaggaagcgggctttctagagacaagtattggaaaaatgcatggaaatgaagaacaccatcctggcccggcagaaggagatgcacagctccctggagaaggtaaaacagctgattcgcctcatccacggcatcgacctctccaaacctgtagactctgaggccactgtgggggccatctccaatggcccggactgcaccccccctgccaatgccgccacctccacgccggccccttccccctcctcccagagctgcacagcgaactgtaaccagggggaagagactaaataacagagcccctctaggagaagccacgggatcccggcggcaaggagaacagaacactgaagactctagaaaagcaaagccggatttctggaaagtgcagaattcttttggttctttggttccagagagagagaagatgcttgtgccaggtggcaccagagtttgccaattgatccttcttattctgtgtgtacatgcaaagattggaccatgttacatgaaatagtgccagctggaggttctttgccagcaccatgccaagtgaaataatatatttactctctctattatacaccagtgtgtgcctgcagcagcctccacagccacgatgggtttgtttctgttttcttgggtggggagcagggacgggcggagggaggagagcaggtttcagatccttacttgccgagccgtttgtttaggtagagaagacaagtccaaagagtgtgtgggctttcctgtttctaaactttcgctactataaaaccaaaaaaaggaattgagatttcaccaaccccagtgcccagaagagggaaggggagtggctggagggagcagggggtgggacagtgtatcaaataagcagtatttaatcacctctggcgggggcctcgtgcaaggggagactgacaccaagaacagccagtaggttcttctcccctgcactctgctccctgcgcggtaaccccaccactcctgaagcctgcccagtctccttccttccctgcttggtgagtcgcgcatctccgtggttatcccgctgtctcctctccaagaacaagcagagcccgggccactggcccttgcccaaggcagggaagaaggatgtgtgtgtccaggaaggaaaaaaaggtggatcagtgattttacttgaaaacaagctccatcccttttctatatttataagaagagaagatcttgagtgaagcagcacgcgacccaggtgtgtgtgaattgaatggagacgtttcttttctctttctttaatttttgtttttgttctttttttctttaaggaaagttttattttactgttcattttactttcttggtaacaaaaactaaaataaggaatagaaaagctgtttttcaggctgacagtccaattaagggtagccaagaccttgcatggtagagtaggaatcatagtgtcagtgaggtcccgtgagtctttgtgagtccttgtgtcatcgttcgggcactgtttttttatgcaagggcaaaaatctttgtatctggggaaaaaaaacttttttttaaattaaaaaggaaaataaaagatattgaggtcttcctagtgttacttaaattaagatcaaggtaagaaacattgtaaaaaaaaattacaaaagtgctatttgtttcctaaaaacagtgatttctattaaaaaggtgtcagaactggaaaaaaaaaaaa

SEQ ID NO: 427891 - DNA, 1807 bp, Homo sapiens
gtgagagagagaggagaggagaggaggaggaggaggagggagaagggaacaacctaccatcttaacacactaatatctaaaaagtgcgagaggcccagagcagcagcagaagcagcagcagcagctccagcttcttccctccctccccatgaagaagagttccctcctcctcctcctcctgcttctcctgctcagagttcctgcctccagctgccaggggggacagccagccagcagcaggaggggggctagagagctgaaggagagccagtttccccaaaattgctgcagtgagaagaggagtttgttactttaaacagaggctgaagaaactatagaattagcagagaaagtggagaaggtagaggatggagttgcagactctacaggaggctcttaaagtggaaattcaggttcaccagaaactggttgctcaaatgaagcaggatccacagaatgctgacttaaagaaacagcttcatgaactccaagccaaaatcacagctttgagtgagaaacagaaaagagtagttgaacagctacggaagaacctgatagtaaagcaagaacaaccggacaagttccaaatacagccattgccacaatctgaaaacaaactacaaacagcacagcagcaaccactacagcaactacaacaacagcagcagtaccaccaccaccacgcccagcagtcagctgcagcctctcccaacctgactgcttcacagaagactgtaactacagcttctatgattaccacaaagacactacctctcgtcttgaaagcagcaactgcgaccatgcctgcctctgtggtgggccagagacctaccattgctatggtgaccgccatcaacagtcagaaggctgtgctcagcactgatgtgcagaacacaccagtcaacctccagacgtctagtaaggtcactgggcctggggcagaggctgtccaaattgtggcaaaaaacacagtcactctgcaggttcaggcaacacctcctcagcccatcaaagtaccacagtttatcccccctcctagactcactccacgtccaaactttcttccacaggttcgacccaagcctgtggcccagaataacattcctattgccccagcaccacctcccatgctcgcagctcctcagcttatccagaggcccgtcatgctgaccaagttcacccccacaacccttcccacatcccagaattccatccaccccgtccgtgtcgtcaatgggcagactgcaaccatagccaaaacgttccccatggcccagctcaccagcattgtgatagctactccagggaccagactcgctggacctcaaactgtacagcttagcaagccaagtcttgaaaaacagacagttaaatctcacacagaaacagatgagaaacaaacagagagccgcaccatcaccccacctgctgcacccaaaccaaaacgggaggagaaccctcagaaacttgccttcatggtgtctctagggttggtaacacatgaccatctagaagaaatccaaagcaagaggcaagagcgaaaaagaagaacaacagcaaatccggtctacagtggagcagtctttgagccagagcgtaagaagagtgcagtgacatacctaaacagcacaatgcaccctgggacccggaagagagccaatgaggaacactggccaaagggtgatattcatgaggatttttgcagcgtttgcagaaaaagtggccagttactgatgtgcgacacatgttcccgtgtatatcatttggactgcttagaccccctctaccccctctagagcaaaaaaaa

SEQ ID NO: 427892 - DNA, 1275 bp, Homo sapiens
caattagcggcccaacgccccttccgcgcctcatccgggttcccgggacgggaaagtggcgtggtaaccaggcaactactgatcaatcccctccccggctgatttgcgcatcaggaggaggactgagcttatctgactccagagctttcaggagggaagaaagatgtcagatgaagatgatctagaagactctgagccagaccaggatgattctgagaaagaagaggacgagaaggagacagaggagggggaggactacagaaaagagggggaagagttccctgaggaatggctgcccacccccctcacggaggacatgatgaaggaagggctttctctgctctgtaagacaggcaatgggctggctcatgcttatgtcaagctggaggttaaagagagggacctgacagacatctacttgctgcgctcctacatccatctgcgctatgtggatatttctgagaaccacctgacagacctgtctccactcaactacctcacccacctgctctggctcaaggctgatggcaatcggctgcgaagtgcccagatgaatgaactgccctacctgcagattgctagttttgcttataaccagattactgacactgaaggcatctctcatcctcgtcttgaaaccctgaatctcaaagggaacagcatccacatggtgacaggtctggaccccgagaagttgatcagcctgcacacagtggagcttcgggggaaccagctggaaagcaccctgggaatcaatcttcctaagctgaagaacctctacctggcccaaaacatgctgaagaaggtggaaggcttggaggatctgagcaatctcaccaccttgcatcttcgagacaaccagattgacaccctgagtggcttctccagagaaatgaaatcattgcagtacctcaacctgaggagatcaaagacgctggccttcagacctgatcagactcccaggggcagccaccacatgtatgacagagaacagaggatgcctgtttttgccccaaagctggaaattcatcacaacctgaggcccaggatctgctctgtgccggtcctctgggcagtgtggggtgcagaatggggtgcctaggcctgagcgttgcctggagcctaggccgggggccgccctcgggcaggcgtgggtgagagccaagaccgcgtgggccgcggggtgctggtaggagtggttggagagacttgcgaaggcggctggggtgttcggatttccaataaagaaacagagtgatgctcctgtgtctgacc

SEQ ID NO: 427893 - DNA, 1165 bp, Homo sapiens
caattagcggcccaacgccccttccgcgcctcatccgggttcccgggacgggaaagtggcgtggtaaccaggcaactactgatcaatcccctccccggctgatttgcgcatcaggaggaggactgagcttatctgactccagagctttcaggagggaagaaagatgtcagatgaagatgatctagaagactctgagccagaccaggatgattctgagaaagaagaggacgagaaggagacagaggagggggaggactacagaaaagagggggaagagttccctgaggaaggacctgacagacatctacttgctgcgctcctacatccatctgcgctatgtggatatttctgagaaccacctgacagacctgtctccactcaactacctcacccacctgctctggctcaaggctgatggcaatcggctgcgaagtgcccagatgaatgaactgccctacctgcagattgctagttttgcttataaccagattactgacactgaaggcatctctcatcctcgtcttgaaaccctgaatctcaaagggaacagcatccacatggtgacaggtctggaccccgagaagttgatcagcctgcacacagtggagcttcgggggaaccagctggaaagcaccctgggaatcaatcttcctaagctgaagaacctctacctggcccaaaacatgctgaagaaggtggaaggcttggaggatctgagcaatctcaccaccttgcatcttcgagacaaccagattgacaccctgagtggcttctccagagaaatgaaatcattgcagtacctcaacctgaggagatcaaagacgctggccttcagacctgatcagactcccaggggcagccaccacatgtatgacagagaacagaggatgcctgtttttgccccaaagctggaaattcatcacaacctgaggcccaggatctgctctgtgccggtcctctgggcagtgtggggtgcagaatggggtgcctaggcctgagcgttgcctggagcctaggccgggggccgccctcgggcaggcgtgggtgagagccaagaccgcgtgggccgcggggtgctggtaggagtggttggagagacttgcgaaggcggctggggtgttcggatttccaataaagaaacagagtgatgctcctgtgtctgacc

SEQ ID NO: 427894 - DNA, 1060 bp, Homo sapiens
caattagcggcccaacgccccttccgcgcctcatccgggttcccgggacgggaaagtggcgtggtaaccaggcaactactgatcaatcccctccccggctgatttgcgcatcaggaggaggactgagcttatctgactccagagctttcaggagggaagaaagatgtcagatgaagatgatctagaagactctgagccagaccaggatgattctgagaaagaagaggacgagaaggagacagaggagggggaggactacagaaaagagggggaagagttccctgaggaaggacctgacagacatctacttgctgcgctcctacatccatctgcgctatgtggatatttctgagaaccacctgacagacctgtctccactcaactacctcacccacctgctctggctcaaggctgatggcaatcggctgcgaagtgcccagatgaatgaactgccctacctgcagattgctagttttgcttataaccagattactgacactgaaggcatctctcatcctcgtcttgaaaccctgaatctcaaagggaacagcatccacatggtgacaggtctggaccccgagaagttgatcagcctgcacacagtggagcttcgggggaaccagctggaaagcaccctgggaatcaatcttcctaagctgaagaacctctacctggtagctcactgggtcagagggtggtgcagggaagagggcactgtcctgggggtcaggatgcctgctttctagtaggctcagctactaacttcatcattatgataataactggtattattatcaagaccatagttggttccagatgctgtggagatacacagccacctagcagggctgataatatataatgtgtggataatacagagataatttaccttgatacaggtagtagcaaaatggaccataattgaggtacaaacatcagtctgtggaaatgttttaggaaaaccctcctctcagactgggtttttcttcagctcttacactaccaccacaacaatcatcaacatacgacttccgggaccaaaggtgtgggggtttctccc

SEQ ID NO: 427895 - DNA, 804 bp, Homo sapiens
tcgtctagaggattccctctggatgcaagtgtcagatgaatgactgccctacctgcagattgctagttttgcttataaccagattactgacactgaaggcatctctcatcctcgtcttgaaaccctgagaaccacctgacagacctgtctccactcaactacctcacccacctgctctggctcaaggctgatggcaatcggctgcgaagtgcccagatgaatgaactgccctacctgcagattgctagttttgcttataaccagattactgacactgaaggcatctctcatcctcgtcttgaaaccctgaatctcaaagggaacagcatccacatggtgacaggtctggaccccgagaagttgatcagcctgcacacagtggagcttcgggggaaccagctggaaagcaccctgggaatcaatcttcctaagctgaagaacctctacctggagatcaaagacgctggccttcagacctgatcagactcccaggggcagccaccacatgtatgacagagaacagaggatgcctgtttttgccccaaagctggaaattcatcacaacctgaggcccaggatctgctctgtgccggtcctctgggcagtgtggggtgcagaatggggtgcctaggcctgagcgttgcctggagcctaggccgggggccgccctcgggcaggcgtgggtgagagccaagaccgcgtgggccgcggggtgctggtaggagtggttggagagacttgcgaaggcggctggggtgttcggatttccaataaagaaacagagtgatgctcctgtgtctgacc

SEQ ID NO: 427896 - DNA, 524 bp, Homo sapiens
tccactgtgccctgggggtctaggcccaaaacatgctgaagaaggtggaaggcttggaggatctgagcaatctcaccaccttgcatcttcgagacaaccagattgacaccctgagtggcttctccagagaaatgaaatcattgcagtacctcaacctgaggtatgcaccctctccaagccccaccttgcccctacccctgaccaggtgcagcttttgagtctgtgttcttccctggcccaatcccccagtcctagcccacagctggattctcaaggaaagcccggctttccttcctttcttctgcactgagttgcaacactaaatcccttatagcttgtgacccctgaatttttattcattcaatccacaattattgagaatgtgctatgtgccaggccttgtgctgtgttttggggacatttaaagcaatcagaggctgggcatggtggttcatgcctgtactcccagcactttaggaggaaggatcacttgaggccaggagttcaggaccagcctgggcaac

SEQ ID NO: 427897 - DNA, 1463 bp, Homo sapiens
caattagcggcccaacgccccttccgcgcctcatccgggttcccgggacgggaaagtggcgtggtaaccaggcaactactgatcaatcccctccccggctgatttgcgcatcaggaggaggactgagcttatctgactccagagctttcaggagggaagaaagatgtcagatgaagatgatctagaagactctgagccagaccaggatgattctgagaaagaagaggacgagaaggagacagaggagggggaggactacagaaaagagggggaagagttccctgaggaaggacctgacagacatctacttgctgcgctcctacatccatctgcgctatgtggatatttctgagaaccacctgacagacctgtctccactcaactacctcacccacctgctctggctcaaggctgatggcaatcggctgcgaagtgcccagatgaatgaactgccctacctgcagattgctagttttgcttataaccagattactgacactgaaggcatctctcatcctcgtcttgaaaccctgaatctcaaagggaacagcatccacatggtgacaggtctggaccccgagaagttgatcagcctgcacacagtggagcttcgggggaaccagctggaaagcaccctgggaatcaatcttcctaagctgaagaacctctacctggcccaaaacatgctgaagaaggtggaaggcttggaggatctgagcaatctcaccaccttgcatcttcgagacaaccagattgacaccctgagtggcttctccagagaaatgaaatcattgcagtacctcaacctgaggggcaacatggtggccaacctgggggagctggccaagcttcgagacctgcccaagctgcgagcgttggtgctgcttgataacccatgcacggacgaaaccagctaccgccaggaggccctggtgcagatgccataccttgaacgcctggacaaggaattctatgaggaggaggaacgggctgaggctgatgtgattcgacagaggctgaaggaagaaaaggagcaggagcctgagccccagcgtgacctggaacccgaacagtcattgatctagcagcagttctagcctctaaagatagagatcaaagacgctggccttcagacctgatcagactcccaggggcagccaccacatgtatgacagagaacagaggatgcctgtttttgccccaaagctggaaattcatcacaacctgaggcccaggatctgctctgtgccggtcctctgggcagtgtggggtgcagaatggggtgcctaggcctgagcgttgcctggagcctaggccgggggccgccctcgggcaggcgtgggtgagagccaagaccgcgtgggccgcggggtgctggtaggagtggttggagagacttgcgaaggcggctggggtgttcggatttccaataaagaaacagagtgatgctcctgtgtctgacc

SEQ ID NO: 427898 - DNA, 1573 bp, Homo sapiens
caattagcggcccaacgccccttccgcgcctcatccgggttcccgggacgggaaagtggcgtggtaaccaggcaactactgatcaatcccctccccggctgatttgcgcatcaggaggaggactgagcttatctgactccagagctttcaggagggaagaaagatgtcagatgaagatgatctagaagactctgagccagaccaggatgattctgagaaagaagaggacgagaaggagacagaggagggggaggactacagaaaagagggggaagagttccctgaggaatggctgcccacccccctcacggaggacatgatgaaggaagggctttctctgctctgtaagacaggcaatgggctggctcatgcttatgtcaagctggaggttaaagagagggacctgacagacatctacttgctgcgctcctacatccatctgcgctatgtggatatttctgagaaccacctgacagacctgtctccactcaactacctcacccacctgctctggctcaaggctgatggcaatcggctgcgaagtgcccagatgaatgaactgccctacctgcagattgctagttttgcttataaccagattactgacactgaaggcatctctcatcctcgtcttgaaaccctgaatctcaaagggaacagcatccacatggtgacaggtctggaccccgagaagttgatcagcctgcacacagtggagcttcgggggaaccagctggaaagcaccctgggaatcaatcttcctaagctgaagaacctctacctggcccaaaacatgctgaagaaggtggaaggcttggaggatctgagcaatctcaccaccttgcatcttcgagacaaccagattgacaccctgagtggcttctccagagaaatgaaatcattgcagtacctcaacctgaggggcaacatggtggccaacctgggggagctggccaagcttcgagacctgcccaagctgcgagcgttggtgctgcttgataacccatgcacggacgaaaccagctaccgccaggaggccctggtgcagatgccataccttgaacgcctggacaaggaattctatgaggaggaggaacgggctgaggctgatgtgattcgacagaggctgaaggaagaaaaggagcaggagcctgagccccagcgtgacctggaacccgaacagtcattgatctagcagcagttctagcctctaaagatagagatcaaagacgctggccttcagacctgatcagactcccaggggcagccaccacatgtatgacagagaacagaggatgcctgtttttgccccaaagctggaaattcatcacaacctgaggcccaggatctgctctgtgccggtcctctgggcagtgtggggtgcagaatggggtgcctaggcctgagcgttgcctggagcctaggccgggggccgccctcgggcaggcgtgggtgagagccaagaccgcgtgggccgcggggtgctggtaggagtggttggagagacttgcgaaggcggctggggtgttcggatttccaataaagaaacagagtgatgctcctgtgtctgacc

SEQ ID NO: 427899 - DNA, 1288 bp, Homo sapiens
caattagcggcccaacgccccttccgcgcctcatccgggttcccgggacgggaaagtggcgtggtaaccaggcaactactgatcaatcccctccccggctgatttgcgcatcagggacctgacagacatctacttgctgcgctcctacatccatctgcgctatgtggatatttctgagaaccacctgacagacctgtctccactcaactacctcacccacctgctctggctcaaggctgatggcaatcggctgcgaagtgcccagatgaatgaactgccctacctgcagattgctagttttgcttataaccagattactgacactgaaggcatctctcatcctcgtcttgaaaccctgaatctcaaagggaacagcatccacatggtgacaggtctggaccccgagaagttgatcagcctgcacacagtggagcttcgggggaaccagctggaaagcaccctgggaatcaatcttcctaagctgaagaacctctacctggcccaaaacatgctgaagaaggtggaaggcttggaggatctgagcaatctcaccaccttgcatcttcgagacaaccagattgacaccctgagtggcttctccagagaaatgaaatcattgcagtacctcaacctgaggggcaacatggtggccaacctgggggagctggccaagcttcgagacctgcccaagctgcgagcgttggtgctgcttgataacccatgcacggacgaaaccagctaccgccaggaggccctggtgcagatgccataccttgaacgcctggacaaggaattctatgaggaggaggaacgggctgaggctgatgtgattcgacagaggctgaaggaagaaaaggagcaggagcctgagccccagcgtgacctggaacccgaacagtcattgatctagcagcagttctagcctctaaagatagagatcaaagacgctggccttcagacctgatcagactcccaggggcagccaccacatgtatgacagagaacagaggatgcctgtttttgccccaaagctggaaattcatcacaacctgaggcccaggatctgctctgtgccggtcctctgggcagtgtggggtgcagaatggggtgcctaggcctgagcgttgcctggagcctaggccgggggccgccctcgggcaggcgtgggtgagagccaagaccgcgtgggccgcggggtgctggtaggagtggttggagagacttgcgaaggcggctggggtgttcggatttccaataaagaaacagagtgatgctcctgtgtctgacc

SEQ ID NO: 427900 - DNA, 1810 bp, Homo sapiens
caattagcggcccaacgccccttccgcgcctcatccgggttcccgggacgggaaagtggcgtggtaaccaggcaactactgatcaatcccctccccggctgatttgcgcatcaggtagtcgccgctctactctcaacggtggcgagctgcagttgccaagtgccccgtccccgttgccataacagcagtacacaacccctccttcccctcgcccgcttgctaaacagtccttccctctcgggaccaagggcctctccagaactgcttctgattgagcagaaacagggtctgagcccctttgctaaggcgaattgagtgggagggttggagactgcgctttaggctggtgtaccagagggcccaaggaaattggcccagtggggagggaaaagtagaagaaatgaatggagcagggattacggatggcgcaatgggagctgagaggagaggaggaggaattggaggaggactgagcttatctgactccagagctttcaggagggaagaaagatgtcagatgaagatgatctagaagactctgagccagaccaggatgattctgagaaagaagaggacgagaaggagacagaggagggggaggactacagaaaagagggggaagagttccctgaggaaggacctgacagacatctacttgctgcgctcctacatccatctgcgctatgtggatatttctgagaaccacctgacagacctgtctccactcaactacctcacccacctgctctggctcaaggctgatggcaatcggctgcgaagtgcccagatgaatgaactgccctacctgcagattgctagttttgcttataaccagattactgacactgaaggcatctctcatcctcgtcttgaaaccctgaatctcaaagggaacagcatccacatggtgacaggtctggaccccgagaagttgatcagcctgcacacagtggagcttcgggggaaccagctggaaagcaccctgggaatcaatcttcctaagctgaagaacctctacctggcccaaaacatgctgaagaaggtggaaggcttggaggatctgagcaatctcaccaccttgcatcttcgagacaaccagattgacaccctgagtggcttctccagagaaatgaaatcattgcagtacctcaacctgaggggcaacatggtggccaacctgggggagctggccaagcttcgagacctgcccaagctgcgagcgttggtgctgcttgataacccatgcacggacgaaaccagctaccgccaggaggccctggtgcagatgccataccttgaacgcctggacaaggaattctatgaggaggaggaacgggctgaggctgatgtgattcgacagaggctgaaggaagaaaaggagcaggagcctgagccccagcgtgacctggaacccgaacagtcattgatctagcagcagttctagcctctaaagatagagatcaaagacgctggccttcagacctgatcagactcccaggggcagccaccacatgtatgacagagaacagaggatgcctgtttttgccccaaagctggaaattcatcacaacctgaggcccaggatctgctctgtgccggtcctctgggcagtgtggggtgcagaatggggtgcctaggcctgagcgttgcctggagcctaggccgggggccgccctcgggcaggcgtgggtgagagccaagaccgcgtgggccgcggggtgctggtaggagtggttggagagacttgcgaaggcggctggggtgttcggatttccaataaagaaacagagtgatgctcctgtgtctgacc

SEQ ID NO: 427901 - DNA, 1239 bp, Homo sapiens
tcgtctagaggattccctctggatgcaagtgtcagatgaatgactgccctacctgcagattgctagttttgcttataaccagattactgacactgaaggcatctctcatcctcgtcttgaaaccctgagaaccacctgacagacctgtctccactcaactacctcacccacctgctctggctcaaggctgatggcaatcggctgcgaagtgcccagatgaatgaactgccctacctgcagattgctagttttgcttataaccagattactgacactgaaggcatctctcatcctcgtcttgaaaccctgaatctcaaagggaacagcatccacatggtgacaggtctggaccccgagaagttgatcagcctgcacacagtggagcttcgggggaaccagctggaaagcaccctgggaatcaatcttcctaagctgaagaacctctacctggcccaaaacatgctgaagaaggtggaaggcttggaggatctgagcaatctcaccaccttgcatcttcgagacaaccagattgacaccctgagtggcttctccagagaaatgaaatcattgcagtacctcaacctgaggggcaacatggtggccaacctgggggagctggccaagcttcgagacctgcccaagctgcgagcgttggtgctgcttgataacccatgcacggacgaaaccagctaccgccaggaggccctggtgcagatgccataccttgaacgcctggacaaggaattctatgaggaggaggaacgggctgaggctgatgtgattcgacagaggctgaaggaagaaaaggagcaggagcctgagccccagcgtgacctggaacccgaacagtcattgatctagcagcagttctagcctctaaagatagagatcaaagacgctggccttcagacctgatcagactcccaggggcagccaccacatgtatgacagagaacagaggatgcctgtttttgccccaaagctggaaattcatcacaacctgaggcccaggatctgctctgtgccggtcctctgggcagtgtggggtgcagaatggggtgcctaggcctgagcgttgcctggagcctaggccgggggccgccctcgggcaggcgtgggtgagagccaagaccgcgtgggccgcggggtgctggtaggagtggttggagagacttgcgaaggcggctggggtgttcggatttccaataaagaaacagagtgatgctcctgtgtctgacc

SEQ ID NO: 427902 - DNA, 1175 bp, Homo sapiens
caattagcggcccaacgccccttccgcgcctcatccgggttcccgggacgggaaagtggcgtggtaaccaggcaactactgatcaatcccctccccggctgatttgcgcatcaggaggaggactgagcttatctgactccagagctttcaggagggaagaaagatgtcagatgaagatgatctagaagactctgagccagaccaggatgattctgagaaagaagaggacgagaaggagacagaggagggggaggactacagaaaagagggggaagagttccctgaggaaggacctgacagacatctacttgctgcgctcctacatccatctgcgctatgtggatatttctgagaaccacctgacagacctgtctccactcaactacctcacccacctgctctggctcaaggctgatggcaatcggctgcgaagtgcccagatgaatgaactgccctacctgcagattgctagttttgcttataaccagattactgacactgaaggcatctctcatcctcgtcttgaaaccctgaatctcaaagggaacagcatccacatggtgacaggtctggaccccgagaagttgatcagcctgcacacagtggagcttcgggggaaccagctggaaagcaccctgggaatcaatcttcctaagctgaagaacctctacctggcccaaaacatgctgaagaaggtggaaggcttggaggatctgagcaatctcaccaccttgcatcttcgagacaaccagattgacaccctgagtggcttctccagagaaatgaaatcattgcagtacctcaacctgaggtatgcaccctctccaagccccaccttgcccctacccctgaccaggtgcagcttttgagtctgtgttcttccctggcccaatcccccagtcctagcccacagctggattctcaaggaaagcccggctttccttcctttcttctgcactgagttgcaacactaaatcccttatagcttgtgacccctgaatttttattcattcaatccacaattattgagaatgtgctatgtgccaggccttgtgctgtgttttggggacatttaaagcaatcagaggctgggcatggtggttcatgcctgtactcccagcactttaggaggaaggatcacttgaggccaggagttcaggaccagcctgggcaac

SEQ ID NO: 427903 - DNA, 815 bp, Homo sapiens
caattagcggcccaacgccccttccgcgcctcatccgggttcccgggacgggaaagtggcgtggtaaccaggcaactactgatcaatcccctccccggctgatttgcgcatcaggaggaggactgagcttatctgactccagagctttcaggagggaagaaagatgtcagatgaagatgatctagaagactctgagccagaccaggatgattctgagaaagaagaggacgagaaggagacagaggagggggaggactacagaaaagagggggaagagttccctgaggaaggacctgacagacatctacttgctgcgctcctacatccatctgcgctatgtggatatttctgagaaccacctgacagacctgtctccactcaactacctcacccacctgctctggctcaaggctgatggcaatcggctgcgaagtgcccagatgaatgaactgccctacctgcagattgctagttttgcttataaccagattactgacactgaaggcatctctcatcctcgtcttgaaaccctgaatctcaaaggtgggtctttaggatgggctacacaagattctttccttcctagcctgaggccaacagaagtgggcagtatggtccttggctagggcacatggcagtctgcattcattcattcattcagatacgcaatatgattcattatgacagttctacatgctaaccatataggatccaataagacaaggaacgtccctattctcatatagcttatattctaattgggagagacaaacaagtaacaacaaacacagtaagtacattcatgtagcatgtta

SEQ ID NO: 427904 - DNA, 1745 bp, Homo sapiens
caattagcggcccaacgccccttccgcgcctcatccgggttcccgggacgggaaagtggcgtggtaaccaggcaactactgatcaatcccctccccggctgatttgcgcatcaggtagtcgccgctctactctcaacggtggcgagctgcagttgccaagtgccccgtccccgttgccataacagcagtacacaacccctccttcccctcgcccgcttgctaaacagtccttccctctcgggaccaagggcctctccagaactgcttctgattgagcagaaacagggaggaggactgagcttatctgactccagagctttcaggagggaagaaagatgtcagatgaagatgatctagaagactctgagccagaccaggatgattctgagaaagaagaggacgagaaggagacagaggagggggaggactacagaaaagagggggaagagttccctgaggaatggctgcccacccccctcacggaggacatgatgaaggaagggctttctctgctctgtaagacaggcaatgggctggctcatgcttatgtcaagctggaggttaaagagagggacctgacagacatctacttgctgcgctcctacatccatctgcgctatgtggatatttctgagaaccacctgacagacctgtctccactcaactacctcacccacctgctctggctcaaggctgatggcaatcggctgcgaagtgcccagatgaatgaactgccctacctgcagattgctagttttgcttataaccagattactgacactgaaggcatctctcatcctcgtcttgaaaccctgaatctcaaagggaacagcatccacatggtgacaggtctggaccccgagaagttgatcagcctgcacacagtggagcttcgggggaaccagctggaaagcaccctgggaatcaatcttcctaagctgaagaacctctacctggcccaaaacatgctgaagaaggtggaaggcttggaggatctgagcaatctcaccaccttgcatcttcgagacaaccagattgacaccctgagtggcttctccagagaaatgaaatcattgcagtacctcaacctgaggggcaacatggtggccaacctgggggagctggccaagcttcgagacctgcccaagctgcgagcgttggtgctgcttgataacccatgcacggacgaaaccagctaccgccaggaggccctggtgcagatgccataccttgaacgcctggacaaggaattctatgaggaggaggaacgggctgaggctgatgtgattcgacagaggctgaaggaagaaaaggagcaggagcctgagccccagcgtgacctggaacccgaacagtcattgatctagcagcagttctagcctctaaagatagagatcaaagacgctggccttcagacctgatcagactcccaggggcagccaccacatgtatgacagagaacagaggatgcctgtttttgccccaaagctggaaattcatcacaacctgaggcccaggatctgctctgtgccggtcctctgggcagtgtggggtgcagaatggggtgcctaggcctgagcgttgcctggagcctaggccgggggccgccctcgggcaggcgtgggtgagagccaagaccgcgtgggccgcggggtgctggtaggagtggttggagagacttgcgaaggcggctggggtgttcggatttccaataaagaaacagagtgatgctcctgtgtctgacc

SEQ ID NO: 427905 - DNA, 1028 bp, Homo sapiens
caattagcggcccaacgccccttccgcgcctcatccgggttcccgggacgggaaagtggcgtggtaaccaggcaactactgatcaatcccctccccggctgatttgcgcatcaggaggaggactgagcttatctgactccagagctttcaggagggaagaaagatgtcagatgaagatgatctagaagactctgagccagaccaggatgattctgagaaagaagaggacgagaaggagacagaggagggggaggactacagaaaagagggggaagagttccctgaggaaggacctgacagacatctacttgctgcgctcctacatccatctgcgctatgtggatatttctgagaaccacctgacagacctgtctccactcaactacctcacccacctgctctggctcaaggctgatggcaatcggctgcgaagtgcccagatgaatgaactgccctacctgcagattgctagttttgcttataaccagattactgacactgaaggcatctctcatcctcgtcttgaaaccctgaatctcaaagggaacagcatccacatggtgacaggtctggaccccgagaagttgatcagcctgcacacagtggagcttcgggggaaccagctggaaagcaccctgggaatcaatcttcctaagctgaagaacctctacctggagatcaaagacgctggccttcagacctgatcagactcccaggggcagccaccacatgtatgacagagaacagaggatgcctgtttttgccccaaagctggaaattcatcacaacctgaggcccaggatctgctctgtgccggtcctctgggcagtgtggggtgcagaatggggtgcctaggcctgagcgttgcctggagcctaggccgggggccgccctcgggcaggcgtgggtgagagccaagaccgcgtgggccgcggggtgctggtaggagtggttggagagacttgcgaaggcggctggggtgttcggatttccaataaagaaacagagtgatgctcctgtgtctgacc

SEQ ID NO: 427906 - DNA, 1310 bp, Homo sapiens
caattagcggcccaacgccccttccgcgcctcatccgggttcccgggacgggaaagtggcgtggtaaccaggcaactactgatcaatcccctccccggctgatttgcgcatcaggtagtcgccgctctactctcaacggtggcgagctgcagttgccaagtgccccgtccccgttgccataacagcagtacacaacccctccttcccctcgcccgcttgctaaacagtccttccctctcgggaccaagggcctctccagaactgcttctgattgagcagaaacagggaggaggactgagcttatctgactccagagctttcaggagggaagaaagatgtcagatgaagatgatctagaagactctgagccagaccaggatgattctgagaaagaagaggacgagaaggagacagaggagggggaggactacagaaaagagggggaagagttccctgaggaatggctgcccacccccctcacggaggacatgatgaaggaagggctttctctgctctgtaagacaggcaatgggctggctcatgcttatgtcaagctggaggttaaagagagggacctgacagacatctacttgctgcgctcctacatccatctgcgctatgtggatatttctgagaaccacctgacagacctgtctccactcaactacctcacccacctgctctggctcaaggctgatggcaatcggctgcgaagtgcccagatgaatgaactgccctacctgcagattgctagttttgcttataaccagattactgacactgaaggcatctctcatcctcgtcttgaaaccctgaatctcaaagggaacagcatccacatggtgacaggtctggaccccgagaagttgatcagcctgcacacagtggagcttcgggggaaccagctggaaagcaccctgggaatcaatcttcctaagctgaagaacctctacctggagatcaaagacgctggccttcagacctgatcagactcccaggggcagccaccacatgtatgacagagaacagaggatgcctgtttttgccccaaagctggaaattcatcacaacctgaggcccaggatctgctctgtgccggtcctctgggcagtgtggggtgcagaatggggtgcctaggcctgagcgttgcctggagcctaggccgggggccgccctcgggcaggcgtgggtgagagccaagaccgcgtgggccgcggggtgctggtaggagtggttggagagacttgcgaaggcggctggggtgttcggatttccaataaagaaacagagtgatgctcctgtgtctgacc

SEQ ID NO: 427907 - DNA, 2753 bp, Homo sapiens
  misc_feature (233)..(233): n is a, c, g, or t
  misc_feature (267)..(267): n is a, c, g, or t
  misc_feature (332)..(332): n is a, c, g, or t
gaaaaaagtcgtggggactgagttcaggacaccctgaaactatgcgaccagtaatttttttaaggtactttttcctacaagtaaggtatctgaaaagtcaacgttttgagggtggaatcaagacttttcacttctcctggcaaagagcaacaaggctcttgtctcgtgtccttctgtgtgtctctgtcaggatcacagcagctgtgctcttggtctgcttactcctctgtaanccacgtatgcagaagggagttaataaggtgatcnccatctccccagaattcaaaggtctttgcctctataaggtctgcccctatggggccaggaaaatntaaacctatataaggacttgcaagagagcataaagaaggtagaaaaggtttacttgttgggttttcaagccttcaagttgaatgagtcttagcttttgctgggcagttgttctggacaagtcatcagtttcatgtggagaactcagtgtaagcccaaggctaatgaatgagaggggtcccatggaaacacagctgaaatgaaatgggactttatccatcttctttgagaatggaagagcttttgtgaagcagtacatcattgctcaagataatggttgataagcattagattttatagatctaataaggaaaatattttattatctcaagttaacaaaacatttttttacctctcgagtgcctcataggaccaactattactctttggcttttatttttctttttgtattatttttatatattctttaaccttgctgagctagtattgactgaaatctttagaactttgcctctgggcaatgaagtaatgtttctctaccctaagatatctatttgtataatctctggctgtaatgatcactttggaagatttcctttgcatctctaattatttctttttaatggaataaggcataagggggaataaatatattgtaaccaatgttatgtaaacccatatccatacaggccaggaaagccaaatgaagtcatttccagaattctagtgtgaaaaacctatttttgaaaagtggggagatggctttgtgtagaactgggtgggttttctctgcagactaagtctagccatgagcttccagatcctttagttttatcagccttgtgcttaccccattttcataaatgctactttaacagccagtcttcataagtcatggttcctaggttttcctgtcacctcattgtattcatctgtggtaggatattaacgggctcattcaaccaaatgtaatgtgtgcctcagacctatttagcatggttggggggcatcagcaggacaaaccaacaggtactccgcaagtgtactggcacagcaagcccaccaattattagcagctcttcatcagcctgctgtctactcagacgcttgcctactgaagggacctgtccagagatcttctggaatcccaggttgggaatctctgcagaatgtcgtgacagttgtggcccaactagcttctgagtagaaacaaggaagctaccctgagatatagtcagctgcccacctgccatagtatttgctactgaatgccagccttttaacataccatttcagatttgtccttcaacaaaaatataaattgcaagtcataccatttaagggtcttttacaaatatgtctaaattgtgtgtcatttttaagttccaaaggtctactggactaagtactatcagaccagctgtagaacctgatggcgctgatccggggtggaataaccctcagtactggtgtgtagaagatgaattgtaggcaggttttgctgatcagcagcctaaggattgatgggctctcttttggcctctgatcctgagcactatggaggcagcatcagagaatggggacctgagctacataggttctcaatgttaaaacaactctgttcggagtgacatataagagcaagaaatctacagctggtgtaaaatacctttgccttttctatcccgaaagtaacaaatggcatctgtacatgtaggggtaaaaactcagatgtctactcctccaggccatggacaagaaaaagtacagcagtcagaacagtggaacaagtgatttgcattctcttcttcacgctttcctagatctgccattggtagcgcagccctcgccctccagacataatgcatcgagcccagttgcagggaacatcactgtgtgtgtgtgatgtcatggtgttatatgtgttgagtttaatgttgagctgaagcaagttggtgaccttcctctttgctctttgtaaagaagacaccaatgtttgtcagagaaaaatccccagcagtcgtgttgaagaggcagtgtcatccacctactgtcccctttggaacagttcaactgcagaaaggtcggattgaggttttgtgctttgtcgtttttcttttttaaacaaaacatgacaaccttggcttttccgatatggaacacttttgttgttgtggagttccctcttgctgtatcttctatgcaattccttttctaaaaaaaccccccggcagaggcagagtgccctccggatatctgtccggcgccttgctgagtggtggaggtgagggataccagctccgggtgtgcctcttttctctccctggctgccaatcctgattttccctgcagtccccttggtttgtaaattgcctgcatttattctgtcagccaacatgtacaaaatgtaagaaagaatttttaaacaggtaataaattatatttataagcaacaaaaaaat

SEQ ID NO: 427908 - DNA, 2145 bp, Homo sapiens
ctcaagcaatctgcctgccttggcttcccaaagtgctaggattacaggcgggagccaccatgcctggcctctttgttttttgagacagagtcccgctctgtcgcccaggccagagtgcagtggtgcgatctcggctcactgcaacctccacctctcaggttcaggcaattctcctgcctcagtctcccaagtagctgggattacaggcgcgcatcaccatacttggctaatttttgtgttttttagggtttcgccatgttggccagggtgggtctcaaactcctgacctcaggtgatctgcccacctcgacctcccaaagtgctgggattacaggcatgagccaccatgcccggccacaatgaatccaattctgtgtccccagtgtccagccaacagcccggttcctagtggatgttaagccaccttggttgggtggacggacagatagatgaatggacagatgggtgtgcaggaagttgagccaagggcacagaacagagatcaccatttctcatcccatcagacagtgacataacttccatggtttccggggtctctgtccccagccaagcctagaccagtgccagccgcgtctgtgatgtgagagacagccccttgccagcagctctgcctgagtgttggtgtccagcgactactttggagcaagcccagctggcatcgtaaatgcatgctcttcctacatcagccttgtacccagcagtgtatcacctacagctagggctaggccagcgtgtgccacgaatatgcaggggggaaagtgggcgtgtggatgggagaggaacagagatgagccggtaacagaggggcaaacctccagcctcattttcgggtttagcatctaatccttttgtcagggtttccctggaccccgaggagagaaaggtgatcggagcgagcgtggagagaagggagaacgaggggtccccggccggaaaggagtgaagggccagaagggcgagccgggaccaccaggcctggaccagccgtgtcccgtgggccccgacgggctgcctgtgcctggctgctggcataagtgacccacaggcccagctcacacctgtacagatccgtgtggacatttttaatttttgtaaaaacaaaacagtaatatattgatcttttttcatggaatgcgctacctgtggccttttaacattcaagagtatgcccacccagccccaaagccaccggcatgtgaagctgccggaaagtggacaggccagaccagggagatgtgtacctgaggggcacccttgggcctgggctttcccaggaaggagatgaaggtagaagcacctggctcgggcaaggctagaaagatgctacgttgggccttcagtcacctgatcagcagagagactctcagctgtggtactgccctgtaagaacctgctcccgcaaaactctggagtccctgggacacaccctatccaagaagacccaggggtggaacagcggctgctgttgctcctggcctcatcagcctccaaactcaaccacaaccagctgcctctgcagttggacaagacttggcccccggacaagactcgcccagcacttgcggctgggcccggggagcagtgagtggaaatcccccacgagggtctagctctaccacattcaggaggcctcaggaggccagcctgccatgagagcacatgtcctctggccaggagtagtggctgagctctgtgatcgctgtgatgtggacccagctccagggagcagagtgtcggggatggaggggcccagcctggactgactgctacttcctgtctctgtttccattatcacccagagagggacaagataggacatggcctggaccagggaggcaggcctcccactcagagtctgggtctcactggccccaagtctcccacccagaactctggccaaaaatggctctctaggtgggctgtgcaggcaaagcaaagctcagggctggttcccagctggcctgagcagggggcctgccaccagacccacccacgctctgacgagaggcttttccacctccagcaagtgttcccagcaaccagctccatcctggctgcttgccttccatttccgtgtagatggagatcactgtgtgtaataaaccacaagtgcgtgtcaaagtg

SEQ ID NO: 427909 - DNA, 1934 bp, Homo sapiens
ctcaagcaatctgcctgccttggcttcccaaagtgctaggattacaggcgggagccaccatgcctggcctctttgttttttgagacagagtcccgctctgtcgcccaggccagagtgcagtggtgcgatctcggctcactgcaacctccacctctcaggttcaggcaattctcctgcctcagtctcccaagtagctgggattacaggcgcgcatcaccatacttggctaatttttgtgttttttagggtttcgccatgttggccagggtgggtctcaaactcctgacctcaggtgatctgcccacctcgacctcccaaagtgctgggattacaggcatgagccaccatgcccggccacaatgaatccaattctgtgtccccagtgtccagccaacagcccggttcctagtggatgttaagccaccttggttgggtggacggacagatagatgaatggacagatgggtgtgcaggaagttgagccaagggcacagaacagagatcaccatttctcatcccatcagacagtgacataacttccatggtttccggggtctctgtccccagccaagcctagaccagtgccagccgcgtctgtgatgtgagagacagccccttgccagcagctctgcctgagtgttggtgtccagcgactactttggagcaagcccagctggcatcgtaaatgcatgctcttcctacatcagccttgtacccagcagtgtatcacctacagctagggctaggccagcgtgtgccacgaatatgcaggggggaaagtgggcgtgtggatgggagaggaacagagatgagccggtaacagaggggcaaacctccagcctcattttcgggtttagcatctaatccttttgtcagggtttccctggaccccgaggagagaaaggtgatcggagcgagcgtggagagaagggagaacgaggggtccccggccggaaaggagtgaagggccagaagggcgagccgggaccaccaggcctggaccagccgtgtcccgtgggccccgacgggctgcctgtgcctggctgctggcataagtgacccacaggcccagctcacacctgtacagatccgtgtggacatttttaatttttgtaaaaacaaaacagtaatatattgatcttttttcatggaatgcgctacctgtggccttttaacattcaagagtatgcccacccagccccaaagccaccggcatgtgaagctgccggaaagtggacaggccagaccagggagatgtgtacctgaggggcacccttgggcctgggctttcccaggaaggagatgaaggtagaagcacctggctcgggcaaggctagaaagatgctacgttgggccttcagtcacctgatcagcagagagactctcagctgtggtactgccctgtaagaacctgctcccgcaaaactctggagtccctgggacacaccctatccaagaagacccaggggtggaacagcggctgctgttgctcctggcctcatcagcctccaaactcaaccacaaccagctgcctctgcagttggacaagacttggcccccggacaagactcgcccagcacttgcggctgggcccggggagcagtgagtggaaatcccccacgagggtctagctctaccacattcaggaggcctcccactcagagtctgggtctcactggccccaagtctcccacccagaactctggccaaaaatggctctctaggtgggctgtgcaggcaaagcaaagctcagggctggttcccagctggcctgagcagggggcctgccaccagacccacccacgctctgacgagaggcttttccacctccagcaagtgttcccagcaaccagctccatcctggctgcttgccttccatttccgtgtagatggagatcactgtgtgtaataaaccacaagtgcgtgtcaaagtg

SEQ ID NO: 427910 - DNA, 1549 bp, Homo sapiens
  misc_feature (1503)..(1503): n is a, c, g, or t
ctcaagcaatctgcctgccttggcttcccaaagtgctaggattacaggcgggagccaccatgcctggcctctttgttttttgagacagagtcccgctctgtcgcccaggccagagtgcagtggtgcgatctcggctcactgcaacctccacctctcaggttcaggcaattctcctgcctcagtctcccaagtagctgggattacaggcgcgcatcaccatacttggctaatttttgtgttttttagggtttcgccatgttggccagggtgggtctcaaactcctgacctcaggtgatctgcccacctcgacctcccaaagtgctgggattacaggcatgagccaccatgcccggccacaatgaatccaattctgtgtccccagtgtccagccaacagcccggttcctagtggatgttaagccaccttggttgggtggacggacagatagatgaatggacagatgggtgtgcaggaagttgagccaagggcacagaacagagatcaccatttctcatcccatcagacagtgacataacttccatggtttccggggtctctgtccccagccaagcctagaccagtgccagccgcgtctgtgatgtgagagacagccccttgccagcagctctgcctgagtgttggtgtccagcgactactttggagcaagcccagctggcatcgtaaatgcatgctcttcctacatcagccttgtacccagcagtgtatcacctacagctagggctaggccagcgtgtgccacgaatatgcaggggggaaagtgggcgtgtggatgggagaggaacagagatgagccggtaacagaggggcaaacctccagcctcattttcgggtttagcatctaatccttttgtcagggtttccctggaccccgaggagagaaaggtgatcggagcgagcgtggagagaagggagaacgaggggtccccggccggaaaggagtgaagggccagaagggcgagccgggaccaccaggcctggaccagccgtgtcccgtgggccccgacgggctgcctgtgcctggctgctggcataagtgacccacaggcccagctcacacctgtacagatccgtgtggacatttttaatttttgtaaaaacaaaacagtaatatattgatcttttttcatggaatgcgctacctgtggccttttaacattcaagagtatgcccacccagccccaaagccaccggcatgtgaagctgccggaaagtggacaggccagaccagggagatgtgtacctgaggggcacccttgggcctgggctttcccaggaaggagatgaaggtagaagcacctggctcgggcaaggctagaaagatgctacgttgggccttcagtcacctgatcagcagagagactctcagctgtggtactgccctgtaagaacctgctcccgcaaaactctggagtccctgggacacacccttcgtgcgcacgacggggtgtcccagtgtgtgcacgggagtgcctcgcagggcncagtgtcaaggttgtgtcctccagcataaggacaccccgtgggtac

SEQ ID NO: 427911 - DNA, 390 bp, Homo sapiens
agtcaggcagatctggtcccggcatcgttgttcctgggctctgtgacctgaagcaagtcacttaaccctccaagcctcagcgcccgaatctgtgacataacaacttacaggtgatagccatgggctacatctgctcgtgatgggctgaggaaacagaggaggcggtgggtcctggcacagctagaggtccaactgcaaagacccaccctgggccgggtgcacagtgtgtcctggccctctggctgctgacacctctttaggaaaggaaggcataacccctcttgccatctcttcccttccagggcgagcttggattgcccggtgccccaggaatcgatggagagaaggtctctgggcctttcatttccttggtgatgccagtgcctggta

SEQ ID NO: 427912 - DNA, 409 bp, Homo sapiens
tcctgcccatttatctcaagagaaagagccaacaactttgaagtcaggcagatctggtcccggcatcgttgttcctgggctctgtgacctgaagcaagtcacttaaccctccaagcctcagcgcccgaatctgtgacataacaacttacaggtgatagccatgggctacatctgctcgtgatgggctgaggaaacagaggaggcggtgggtcctggcacagctagaggtccaactgcaaagacccaccctgggccgggtgcacagtgtgtcctggccctctggctgctgacacctctttaggaaaggaaggcataacccctcttgccatctcttcccttccagggcgagcttggattgcccggtgccccaggaatcgatggagagaaggtctctgggcctttcatttcc

SEQ ID NO: 427913 - DNA, 1695 bp, Homo sapiens
ggcgagcttggattgcccggtgccccaggaatcgatggagagaagggccccaaaggacagaaaggagacccaggagagcctgggccagcaggactcaaaggggaagcaggcgagatgggcttgtccggcctcccgggcgctgacggcctcaagggggagaagggggagtcggcatctgacagcctacaggagagcctggctcagctcatagtggagccagggccccctggcccccctggccccccaggcccgatgggcctccagggaatccagggtcccaagggcttggatggagcaaagggagagaagggtgcgtcgggtgagagaggccccagcggcctgcctgggccagttggcccaccgggccttattgggctgccaggaaccaaaggagagaagggcagacccggggagccaggactagatggtttccctggaccccgaggagagaaaggtgatcggagcgagcgtggagagaagggagaacgaggggtccccggccggaaaggagtgaagggccagaagggcgagccgggaccaccaggcctggaccagccgtgtcccgtgggccccgacgggctgcctgtgcctggctgctggcataagtgacccacaggcccagctcacacctgtacagatccgtgtggacatttttaatttttgtaaaaacaaaacagtaatatattgatcttttttcatggaatgcgctacctgtggccttttaacattcaagagtatgcccacccagccccaaagccaccggcatgtgaagctgccggaaagtggacaggccagaccagggagatgtgtacctgaggggcacccttgggcctgggctttcccaggaaggagatgaaggtagaagcacctggctcgggcaaggctagaaagatgctacgttgggccttcagtcacctgatcagcagagagactctcagctgtggtactgccctgtaagaacctgctcccgcaaaactctggagtccctgggacacaccctatccaagaagacccaggggtggaacagcggctgctgttgctcctggcctcatcagcctccaaactcaaccacaaccagctgcctctgcagttggacaagacttggcccccggacaagactcgcccagcacttgcggctgggcccggggagcagtgagtggaaatcccccacgagggtctagctctaccacattcaggaggcctcaggaggccagcctgccatgagagcacatgtcctctggccaggagtagtggctgagctctgtgatcgctgtgatgtggacccagctccagggagcagagtgtcggggatggaggggcccagcctggactgactgctacttcctgtctctgtttccattatcacccagagagggacaagataggacatggcctggaccagggaggcaggcctcccactcagagtctgggtctcactggccccaagtctcccacccagaactctggccaaaaatggctctctaggtgggctgtgcaggcaaagcaaagctcagggctggttcccagctggcctgagcagggggcctgccaccagacccacccacgctctgacgagaggcttttccacctccagcaagtgttcccagcaaccagctccatcctggctgcttgccttccatttccgtgtagatggagatcactgtgtgtaataaaccacaagtgcgtgtcaaagtg

SEQ ID NO: 427914 - DNA, 2363 bp, Homo sapiens
tttgagaaccactgccttgaaaaaatttccaacttctacctttaagatcagcctgacttatcaaacgctagagaaaaactgaatctacccttgggcagatgacttgggattggattctatacagcagtcttgctcaatcttcccagtttccagttttattataccaacaattggtttttacaagctagaagacaatgaatgtataagttctatggaacagtgagataaatctaagcttcttgtctttgtatttagaaacattgattctatggatgatcatttgtatcatgttgaccctttgacttgtactgaaggtgattttaaatttaagtatgtagtgtttgaatttcttccatccatgtcgttttaatgagatgtttccatgtcagctcctttacagccttggctcctggcttacagatttttgaatagttgtttgcttgccagttgttttacatctttcattggccaccaaaatattagccatttgagatgagatgagactacttgttgtaccttcatctttcatttaattttctggcgtaaattaacattttaatttcatatatatctgtaaagagtctacccaaaggcttcacggaaatttgcaaaatgaactaattcccttttaagcagcaggtgtgcctgtttttgacttttcagtaaatatgttgtttgtgcacatatctacatggtggagaccatattcattatttcatcttccaaataatgggaaaaatataaaagtgaatcagtgtgctttgggaattcagtgaaatcatgttaactcatatagagggggccttagtttatctcttctttactgaattaattagttttggaaattcttttaccattaaaaaaaattaaggaccatacagagaatgatttaagaaaaaacaagtcacttaaaaatcatcacctatttataaactgtattaattacacataatgcttattgattcaatgaggtttctctaaagacttctgcttaataaatatgctgacttcatttaaattagtttagactattgtaggaatggaaggaaatgattatatttactagaattagtgagatcagaaagcatatcagaatgttgatgatatcaaggagacaatctacagagtttttgcctctgtggatggaaataagggtgtttttttttggttttttttttactttagtttcccataatttttggaaattatgtgtgcatttagttcttttagtaacactgattttaaaattaaatttcaaaagtcaatctctaagagtaatttatttttgttttaccaaccagtgccaaaaaggagaggagggaatccaaaagccaatcttttgaaccaatgtgtaaaagattatgttttttcttaaagttagggaggctcgggccctgacactgccagccccagtgagcatccctggctacctcgggattatgtgcaagctgctttgtcctacatttctttcatctggttcttattgggagtgcttctctctaataaaaattgatttcccacaaaataggcaaagctgaacaaagatgaatgcttttgataagttgggtttcacttcagttgaaacaatgtgatagaatatccaggtgtggcatgatggggcaggaggaggtgcctagagggaaaagttatttttgtttcttagtgttgtgttgtggggatgggacagataagaataagatgtttattgccctaatcatgctaagagactattattcaatatgcttttcccgcttttctaagaggaataaacttagacaaattacattataaacagttcccctactactatctcccactctagataaagccagtgggtggtatgggtccttttattccttatagtattatgccaaagaatcaacttattttcattgaagattataaataaatgaagcttgttatagccataatgatttgagtcagtataccattttacctataaaatgcaaaattcatccttgcaaccccattcaccaggagccttgaagcattttgtttactccaaaggccttgtcaaggaagcataattttttgttttgccttcttatttagtcagtttggtcatatttacttaaaaaaacaaactgaaaatcacactcctttatatgttgatataactgattttatagaatctgtctgttctttgtttaacaggtctctgtaagcaagcttgcaagtgtattttgtgtacattttatctgaggtggaaatgaaaattctaaagagaaaatattttaaaagatattgtatttatgttgcttgtgttgtagaataaagattcaaatgcattaaaaatctggtacatgaaacaattgtgtttactgaataaatatatataaata

SEQ ID NO: 427915 - DNA, 3479 bp, Homo sapiens
cctggaccctggggcgtgaggagggcgcggtgcgtcccgtggttgtgcttggaagccccccgagggtgcgcgcgcgtgggtatgagtgcgtgcgtgtgcctgggtgtgcgtgtgtgtaagtgtgcacgtgtgtgtgtgagagtgcgcgcggggaaggaggcacagagacagcccggacaggccactgcgcagccctggtggcccccgctccacctctcgctccgcagacccgcgccagggaggcctctgggccgcagcgggcaccggagcggagcgggcgcggcagcgggcgctgggaggtggggctgggggaggagagggggagggagagaggcgggcgggaggggaggatccgggaagctccggggtatttgacaggagcgagggcggacgcaaagaacgcggaggacctctgggtgcctgcaggggagctgctccagccgggccgccgggagcggtggggagagcatcgcggagccgcccctccacgcgcccgcccagccgcgctcgcccactgggctctcccggctgcagtgccagggcgcagggcgcggccgatctcccgctcccgccacctccgccaccatgctgctcccccagctctgctggctgccgctgctcgctgggctgctcccgccggtgcccgcgcagaagttctcggcgctcacgtttttgagagtggatcaagataaagacaaggattgtagcttggactgtgcgggttcgccccagaaacctctctgcgcatctgacggaaggaccttcctttcccgttgtgaatttcaacgtgccaagtgcaaagatccccagctagagattgcatatcgaggaaactgcaaagacgtgtccaggtgtgtggccgaaaggaagtatacccaggagcaagcccggaaggagtttcagcaagtgttcattcctgagtgcaatgacgacggcacctacagtcaggtccagtgtcacagctacacgggatactgctggtgcgtcacgcccaacgggaggcccatcagcggcactgccgtggcccacaagacgccccggtgcccgggttccgtaaatgaaaagttaccccaacgcgaaggcacaggaaaaacagatgatgccgcagctccagcgttggagactcagcctcaaggagatgaagaagatattgcatcacgttaccctaccctttggactgaacaggttaaaagtcggcagaacaaaaccaataagaattcagtgtcatcctgtgaccaagagcaccagtctgccctggaggaagccaagcagcccaagaacgacaatgtggtgatccctgagtgtgcgcacggcggcctctacaagccagtgcagtgccacccctccacggggtactgctggtgcgtcctggtggacacggggcgccccattcccggcacatccacaaggtacgagcagccgaaatgtgacaacacggccagggcccacccagccaaagcccgggacctgtacaagggccgccagctacaaggttgtccgggtgccaaaaagcatgagtttctgaccagcgttctggacgcgctgtccacggacatggtccacgccgcctccgacccctcctcctcgtcaggcaggctctcagaacccgaccccagccataccctagaggagcgggtggtgcactggtacttcaaactactggataaaaactccagtggagacatcggcaaaaaggaaatcaaacccttcaagaggttccttcgcaaaaaatcaaagcccaaaaaatgtgtgaagaagtttgttgaatactgtgacgtgaataatgacaaatccatctccgtacaagaactgatgggctgcctgggcgtggcgaaagaggacggcaaagcggacaccaagaaacgccacacccccagaggtcatgctgaaagtacgtctaatagacagccaaggaaacaaggataaatggctcataccccgaaggcagttcctagacacatgggaaatttccctcaccaaagagcaattaagaaaacaaaaacagaaacacatagtatttgcactttgtactttaaatgtaaattcactttgtagaaatgagctatttaaacagactgttttaatctgtgaaaatggagagctggcttcagaaaattaatcacatacaatgtatgtgtcctcttttgaccttggaaatctgtatgtggtggagaagtatttgaatgcatttaggcttaatttcttcgccttccacatgttaacagtagagctctatgcactccggctgcaatcgtatggctttctctaacccctgcagtcacttccagatgcctgtgcttacagcattgtggaatcatgttggaagctccacatgtccatggaagtttgtgatgtacggccgaccctacaggcagttaacatgcatgggctggtttgtttcttgggattttctgttagtttgtcttgttttgctttccagagatcttgctcatacaatgaatcacgcaaccactaaagctatccagttaagtgcaggtagttcccctggaggaaataatattttcaaactgtcgttggtgtgatactttggctcaaaggatctttgcttttccattttaagcttctgttttgagttttgccctggggcttgaatgagtcccagagagtcgttcggatggtgggaggctgcctaggaggcagtaaatccagtcacagtgcctgggaggggcccatccttccaaaatgtaaatccagtcgcggtgtgaccgagctggctaacaggcttgtctgcctggttttcctcctacacgtggacattattctcctgatcctcctacctggtccaccccagggctaccggaaggtaaaatcttcacctgaaccaattatgagcagtctccttactgaaggtacagccggatacgtggtgcccccggggctggtgttggcagccggggggaggtgcctgagggtccccacggttcctttctgcttttctgaatgcatcaagggtacgagaacttgccaatgggaaattcatccgagtggcactggcagagaaggataggagtggaatgcccacacagtgaccaacagaactggtctgcgtgcataaccagctgccaccctcaggcctgggccccagagctcagggcacccagtgtcttaaggaaccatttggaggacagtctgagagcaggaacttcaagctgtgattctatctcggctcagacttttggttggaaaaagatcttcatggccccaaatcccctgagacatgccttgtagaatgattttgtgatgttgtgatgcttgtggagcatcgcgtaaggcttcttgcttatttaaactgtgcaaggtaaaaatcaagcctttggagccacagaaccagctcaagtacatgccaatgttgtttaagaaacagttatgatcctaaactttttggataatcttttatatttctgacctttgaatttaatcattgttcttagattaaaataaaatatgctattgaaact

SEQ ID NO: 427916 - DNA, 268 bp, Homo sapiens
gcacgaggtctcaggggatttggggccatgccttgtagaatgattttgtgatgttgtgatgcttgtggagcatcgcgtaaggcttcttgcttatttaaactgtgcaaggtaaaaatcaagcctttggagccacagaaccagctcaagtacatgccaatgttgtttaagaaacagttatgatcctaaactttttggataatcttttatatttctgacctttgaatttaatcattgttcttagattaaaataaaatatgctattgaaact

SEQ ID NO: 427917 - DNA, 3574 bp, Homo sapiens
cctggaccctggggcgtgaggagggcgcggtgcgtcccgtggttgtgcttggaagccccccgagggtgcgcgcgcgtgggtatgagtgcgtgcgtgtgcctgggtgtgcgtgtgtgtaagtgtgcacgtgtgtgtgtgagagtgcgcgcggggaaggaggcacagagacagcccggacaggccactgcgcagccctggtggcccccgctccacctctcgctccgcagacccgcgccagggaggcctctgggccgcagcgggcaccggagcggagcgggcgcggcagcgggcgctgggaggtggggctgggggaggagagggggagggagagaggcgggcgggaggggaggatccgggaagctccggggtatttgacaggagcgagggcggacgcaaagaacgcggaggacctctgggtgcctgcaggggagctgctccagccgggccgccgggagcggtggggagagcatcgcggagccgcccctccacgcgcccgcccagccgcgctcgcccactgggctctcccggctgcagtgccagggcgcagggcgcggccgatctcccgctcccgccacctccgccaccatgctgctcccccagctctgctggctgccgctgctcgctgggctgctcccgccggtgcccgcgcagaagttctcggcgctcacgtttttgagagtggatcaagataaagacaaggattgtagcttggactgtgcgggttcgccccagaaacctctctgcgcatctgacggaaggaccttcctttcccgttgtgaatttcaacgtgccaagtgcaaagatccccagctagagattgcatatcgaggaaactgcaaagacgtgtccaggtgtgtggccgaaaggaagtatacccaggagcaagcccggaaggagtttcagcaagtgttcattcctgagtgcaatgacgacggcacctacagtcaggtccagtgtcacagctacacgggatactgctggtgcgtcacgcccaacgggaggcccatcagcggcactgccgtggcccacaagacgccccggtgcccgggttccgtaaatgaaaagttaccccaacgcgaaggcacaggaaaaacagatgatgccgcagctccagcgttggagactcagcctcaaggagatgaagaagatattgcatcacgttaccctaccctttggactgaacaggttaaaagtcggcagaacaaaaccaataagaattcagtgtcatcctgtgaccaagagcaccagtctgccctggaggaagccaagcagcccaagaacgacaatgtggtgatccctgagtgtgcgcacggcggcctctacaagccagtgcagtgccacccctccacggggtactgctggtgcgtcctggtggacacggggcgccccattcccggcacatccacaaggtacgagcagccgaaatgtgacaacacggccagggcccacccagccaaagcccgggacctgtacaagggccgccagctacaaggttgtccgggtgccaaaaagcatgagtttctgaccagcgttctggacgcgctgtccacggacatggtccacgccgcctccgacccctcctcctcgtcaggcaggctctcagaacccgaccccagccataccctagaggagcgggtggtgcactggtacttcaaactactggataaaaactccagtggagacatcggcaaaaaggaaatcaaacccttcaagaggttccttcgcaaaaaatcaaagcccaaaaaatgtgtgaagaagtttgttgaatactgtgacgtgaataatgacaaatccatctccgtacaagaactgatgggctgcctgggcgtggcgaaagaggacggcaaagcggacaccaagaaacgccacagaagtaagagaaacctgtgatggccagagcccagatgttcttaggaggcaagccaggagaagccgggtctgacttttcagctcagagacagcactcccccagaggtcatgctgaaagtacgtctaatagacagccaaggaaacaaggataaatggctcataccccgaaggcagttcctagacacatgggaaatttccctcaccaaagagcaattaagaaaacaaaaacagaaacacatagtatttgcactttgtactttaaatgtaaattcactttgtagaaatgagctatttaaacagactgttttaatctgtgaaaatggagagctggcttcagaaaattaatcacatacaatgtatgtgtcctcttttgaccttggaaatctgtatgtggtggagaagtatttgaatgcatttaggcttaatttcttcgccttccacatgttaacagtagagctctatgcactccggctgcaatcgtatggctttctctaacccctgcagtcacttccagatgcctgtgcttacagcattgtggaatcatgttggaagctccacatgtccatggaagtttgtgatgtacggccgaccctacaggcagttaacatgcatgggctggtttgtttcttgggattttctgttagtttgtcttgttttgctttccagagatcttgctcatacaatgaatcacgcaaccactaaagctatccagttaagtgcaggtagttcccctggaggaaataatattttcaaactgtcgttggtgtgatactttggctcaaaggatctttgcttttccattttaagcttctgttttgagttttgccctggggcttgaatgagtcccagagagtcgttcggatggtgggaggctgcctaggaggcagtaaatccagtcacagtgcctgggaggggcccatccttccaaaatgtaaatccagtcgcggtgtgaccgagctggctaacaggcttgtctgcctggttttcctcctacacgtggacattattctcctgatcctcctacctggtccaccccagggctaccggaaggtaaaatcttcacctgaaccaattatgagcagtctccttactgaaggtacagccggatacgtggtgcccccggggctggtgttggcagccggggggaggtgcctgagggtccccacggttcctttctgcttttctgaatgcatcaagggtacgagaacttgccaatgggaaattcatccgagtggcactggcagagaaggataggagtggaatgcccacacagtgaccaacagaactggtctgcgtgcataaccagctgccaccctcaggcctgggccccagagctcagggcacccagtgtcttaaggaaccatttggaggacagtctgagagcaggaacttcaagctgtgattctatctcggctcagacttttggttggaaaaagatcttcatggccccaaatcccctgagacatgccttgtagaatgattttgtgatgttgtgatgcttgtggagcatcgcgtaaggcttcttgcttatttaaactgtgcaaggtaaaaatcaagcctttggagccacagaaccagctcaagtacatgccaatgttgtttaagaaacagttatgatcctaaactttttggataatcttttatatttctgacctttgaatttaatcattgttcttagattaaaataaaatatgctattgaaact

SEQ ID NO: 427918 - DNA, 2066 bp, Homo sapiens
ggagtacacactcacaacattgttggaaggacagaaagtgatagcggtcaaagctgctgctgggctactgcagacaaaggttgtccgggtgccaaaaagcatgagtttctgaccagcgttctggacgcgctgtccacggacatggtccacgccgcctccgacccctcctcctcgtcaggcaggctctcagaacccgaccccagccataccctagaggagcgggtggtgcactggtacttcaaactactggataaaaactccagtggagacatcggcaaaaaggaaatcaaacccttcaagaggttccttcgcaaaaaatcaaagcccaaaaaatgtgtgaagaagtttgttgaatactgtgacgtgaataatgacaaatccatctccgtacaagaactgatgggctgcctgggcgtggcgaaagaggacggcaaagcggacaccaagaaacgccacacccccagaggtcatgctgaaagtacgtctaatagacagccaaggaaacaaggataaatggctcataccccgaaggcagttcctagacacatgggaaatttccctcaccaaagagcaattaagaaaacaaaaacagaaacacatagtatttgcactttgtactttaaatgtaaattcactttgtagaaatgagctatttaaacagactgttttaatctgtgaaaatggagagctggcttcagaaaattaatcacatacaatgtatgtgtcctcttttgaccttggaaatctgtatgtggtggagaagtatttgaatgcatttaggcttaatttcttcgccttccacatgttaacagtagagctctatgcactccggctgcaatcgtatggctttctctaacccctgcagtcacttccagatgcctgtgcttacagcattgtggaatcatgttggaagctccacatgtccatggaagtttgtgatgtacggccgaccctacaggcagttaacatgcatgggctggtttgtttcttgggattttctgttagtttgtcttgttttgctttccagagatcttgctcatacaatgaatcacgcaaccactaaagctatccagttaagtgcaggtagttcccctggaggaaataatattttcaaactgtcgttggtgtgatactttggctcaaaggatctttgcttttccattttaagcttctgttttgagttttgccctggggcttgaatgagtcccagagagtcgttcggatggtgggaggctgcctaggaggcagtaaatccagtcacagtgcctgggaggggcccatccttccaaaatgtaaatccagtcgcggtgtgaccgagctggctaacaggcttgtctgcctggttttcctcctacacgtggacattattctcctgatcctcctacctggtccaccccagggctaccggaaggtaaaatcttcacctgaaccaattatgagcagtctccttactgaaggtacagccggatacgtggtgcccccggggctggtgttggcagccggggggaggtgcctgagggtccccacggttcctttctgcttttctgaatgcatcaagggtacgagaacttgccaatgggaaattcatccgagtggcactggcagagaaggataggagtggaatgcccacacagtgaccaacagaactggtctgcgtgcataaccagctgccaccctcaggcctgggccccagagctcagggcacccagtgtcttaaggaaccatttggaggacagtctgagagcaggaacttcaagctgtgattctatctcggctcagacttttggttggaaaaagatcttcatggccccaaatcccctgagacatgccttgtagaatgattttgtgatgttgtgatgcttgtggagcatcgcgtaaggcttcttgcttatttaaactgtgcaaggtaaaaatcaagcctttggagccacagaaccagctcaagtacatgccaatgttgtttaagaaacagttatgatcctaaactttttggataatcttttatatttctgacctttgaatttaatcattgttcttagattaaaataaaatatgctattgaaact

SEQ ID NO: 427919 - DNA, 2129 bp, Homo sapiens
aattggcactcttggaaaactaagtctaggagatcatatattgctttttttttttcattctaaattacttttaattgaaagtcaagatgctgagttacagttgtttatcattataataagcaaactttttaagttggatttcttcttaaagaggtaaactagtgaacaaaaaagataaaaaggaaaattaagaatcaactatgcctttatcaaatttgaagcataagttatattattaaaattatttttgtataatcaaggtgataagacattctggaaaacatttaatgtatttagtacttagaatatttacagtggatgttacttttttgaaacgatatatttttcccaatttttctatcatgtcaaggaaggaaactgttaagaagttaccagtgtccaaaatgtcttcattgtttcttactcatacttacacctcacatgacctgcccagccctctttggttcagttcattcccagaagccaagccttagtcttcacagatgagcgacacacacctctgaatataatgtctcttttttgttttttccttttcagccaaggaaacaaggataaatggctcataccccgaaggcagttcctagacacatgggaaatttccctcaccaaagagcaattaagaaaacaaaaacagaaacacatagtatttgcactttgtactttaaatgtaaattcactttgtagaaatgagctatttaaacagactgttttaatctgtgaaaatggagagctggcttcagaaaattaatcacatacaatgtatgtgtcctcttttgaccttggaaatctgtatgtggtggagaagtatttgaatgcatttaggcttaatttcttcgccttccacatgttaacagtagagctctatgcactccggctgcaatcgtatggctttctctaacccctgcagtcacttccagatgcctgtgcttacagcattgtggaatcatgttggaagctccacatgtccatggaagtttgtgatgtacggccgaccctacaggcagttaacatgcatgggctggtttgtttcttgggattttctgttagtttgtcttgttttgctttccagagatcttgctcatacaatgaatcacgcaaccactaaagctatccagttaagtgcaggtagttcccctggaggaaataatattttcaaactgtcgttggtgtgatactttggctcaaaggatctttgcttttccattttaagcttctgttttgagttttgccctggggcttgaatgagtcccagagagtcgttcggatggtgggaggctgcctaggaggcagtaaatccagtcacagtgcctgggaggggcccatccttccaaaatgtaaatccagtcgcggtgtgaccgagctggctaacaggcttgtctgcctggttttcctcctacacgtggacattattctcctgatcctcctacctggtccaccccagggctaccggaaggtaaaatcttcacctgaaccaattatgagcagtctccttactgaaggtacagccggatacgtggtgcccccggggctggtgttggcagccggggggaggtgcctgagggtccccacggttcctttctgcttttctgaatgcatcaagggtacgagaacttgccaatgggaaattcatccgagtggcactggcagagaaggataggagtggaatgcccacacagtgaccaacagaactggtctgcgtgcataaccagctgccaccctcaggcctgggccccagagctcagggcacccagtgtcttaaggaaccatttggaggacagtctgagagcaggaacttcaagctgtgattctatctcggctcagacttttggttggaaaaagatcttcatggccccaaatcccctgagacatgccttgtagaatgattttgtgatgttgtgatgcttgtggagcatcgcgtaaggcttcttgcttatttaaactgtgcaaggtaaaaatcaagcctttggagccacagaaccagctcaagtacatgccaatgttgtttaagaaacagttatgatcctaaactttttggataatcttttatatttctgacctttgaatttaatcattgttcttagattaaaataaaatatgctattgaaact

SEQ ID NO: 427920 - DNA, 3881 bp, Homo sapiens
cctggaccctggggcgtgaggagggcgcggtgcgtcccgtggttgtgcttggaagccccccgagggtgcgcgcgcgtgggtatgagtgcgtgcgtgtgcctgggtgtgcgtgtgtgtaagtgtgcacgtgtgtgtgtgagagtgcgcgcggggaaggaggcacagagacagcccggacaggccactgcgcagccctggtggcccccgctccacctctcgctccgcagacccgcgccagggaggcctctgggccgcagcgggcaccggagcggagcgggcgcggcagcgggcgctgggaggtggggctgggggaggagagggggagggagagaggcgggcgggaggggaggatccgggaagctccggggtatttgacaggagcgagggcggacgcaaagaacgcggaggacctctgggtgcctgcaggggagctgctccagccgggccgccgggagcggtggggagagcatcgcggagccgcccctccacgcgcccgcccagccgcgctcgcccactgggctctcccggctgcagtgccagggcgcagggcgcggccgatctcccgctcccgccacctccgccaccatgctgctcccccagctctgctggctgccgctgctcgctgggctgctcccgccggtgcccgcgcagaagttctcggcgctcacgtttttgagagtggatcaagataaagacaaggattgtagcttggactgtgcgggttcgccccagaaacctctctgcgcatctgacggaaggaccttcctttcccgttgtgaatttcaacgtgccaagtgcaaagatccccagctagagattgcatatcgaggaaactgcaaagacgtgtccaggtgtgtggccgaaaggaagtatacccaggagcaagcccggaaggagtttcagcaagtgttcattcctgagtgcaatgacgacggcacctacagtcaggtccagtgtcacagctacacgggatactgctggtgcgtcacgcccaacgggaggcccatcagcggcactgccgtggcccacaagacgccccggtgcccgggttccgtaaatgaaaagttaccccaacgcgaaggcacaggaaaaacagatgatgccgcagctccagcgttggagactcagcctcaaggagatgaagaagatattgcatcacgttaccctaccctttggactgaacaggttaaaagtcggcagaacaaaaccaataagaattcagtgtcatcctgtgaccaagagcaccagtctgccctggaggaagccaagcagcccaagaacgacaatgtggtgatccctgagtgtgcgcacggcggcctctacaagccagtgcagtgccacccctccacggggtactgctggtgcgtcctggtggacacggggcgccccattcccggcacatccacaaggtacgagcagccgaaatgtgacaacacggccagggcccacccagccaaagcccgggacctgtacaagggccgccagctacaaggttgtccgggtgccaaaaagcatgagtttctgaccagcgttctggacgcgctgtccacggacatggtccacgccgcctccgacccctcctcctcgtcaggcaggctctcagaacccgaccccagccataccctagaggagcgggtggtgcactggtacttcaaactactggataaaaactccagtggagacatcggcaaaaaggaaatcaaacccttcaagaggttccttcgcaaaaaatcaaagcccaaaaaatgtgtgaagaagtttgttgaatactgtgacgtgaataatgacaaatccatctccgtacaagaactgatgggctgcctgggcgtggcgaaagaggacggcaaagcggacaccaagaaacgccacacccccagaggtcatgctgaaagtacgtctaatagacagccaaggaaacaaggataaatggctcataccccgaaggcagttcctagacacatgggaaatttccctcaccaaagagcaattaagaaaacaaaaacagaaacacatagtatttgcactttgtactttaaatgtaaattcactttgtagaaatgagctatttaaacagactgttttaatctgtgaaaatggagagctggcttcagaaaattaatcacatacaatgtatgtgtcctcttttgaccttggaaatctgtatgtggtggagaagtatttgaatgcatttaggcttaatttcttcgccttccacatgttaacagtagagctctatgcactccggctgcaatcgtatggctttctctaacccctgcagtcacttccagatgcctgtgcttacagcattgtggaatcatgttggaagctccacatgtccatggaagtttgtgatgtacggccgaccctacaggcagttaacatgcatgggctggtttgtttcttgggattttctgttagtttgtcttgttttgctttccagagatcttgctcatacaatgaatcacgcaaccactaaagctatccagttaagtgcaggtagttcccctggaggaaataatattttcaaactgtcgttggtgtgatactttggctcaaaggatctttgcttttccattttaagcttctgttttgagttttgccctggggcttgaatgagtcccagagagtcgttcggatggtgggaggctgcctaggaggcagtaaatccagtcacagtgcctgggaggggcccatccttccaaaatgtaaatccagtcgcggtgtgaccgagctggctaacaggcttgtctgcctggttttcctcctacacgtggacattattctcctgatcctcctacctggtccaccccagggctaccggaaggtaaaatcttcacctgaaccaattatgagcagtctccttactgaaggtacagccggatacgtggtgcccccggggctggtgttggcagccggggggaggtgcctgagggtccccacggttcctttctgcttttctgaatgcatcaagggtacgagaacttgccaatgggaaattcatccgagtggcactggcagagaaggataggagtggaatgcccacacagtgaccaacagaactggtctgcgtgcataaccagctgccaccctcaggcctgggccccagagctcagggcacccagtgtcttaaggaaccatttggaggacagtctgagagcaggaacttcaagctgtgattctatctcggctcagacttttggttggaaaaagatcttcatggccccaaatcccctgagacatgccttgtagaatgattttgtgatgttgtgatgcttgtggagcatcgcgtaaggcttcttgcttatttaaactgtgcaaggtaaaaatcaagcctttggagccacagaaccagctcaagtacatgccaatgttgtttaagaaacagttatgatcctaaactttttggataatcttttatatttctgacctttgaatttaatcattgttcttagattaaaataaaatatgctattgaaactaaaaaagccaaaaaaaaacacaaaaagaacaaacgaagaatagataaagaacacagaaatcaaatggtgaggggcgccggcaccacaagaaatagacctcccgagggaggccgccacaactgtagactccacaacgaactaacagccagagaagaaaagaaggaggcgcccagagaatgaggaacacagtatgccaatcagcagaggcaacgataccacgcagcggaaaacaaaccctactcgacgatgggaatacaaaccgagggtacaaggtaggaataccttcgggaacgcgaaaacaacctaccgcggaaggggggcaaacaccaggcacgcacacaagaccccacagaacaaaacaacgactataggtcggagacaaaacaaacagcacgatcccta

SEQ ID NO: 427921 - DNA, 204 bp, Homo sapiens
gtaagatgctgcctgatgtcactttgtaaggagtgatttaatagatctagaaaatgatggggtttttttttggagttaagtgtattgtacagttgacccttgaacaacatgggggtgaggggtgcagacctggcacaaacatctgaggataactttcaactccccccaaaataataacctcttgtagactggcagccttaccca

SEQ ID NO: 427922 - DNA, 3512 bp, Homo sapiens
cctggaccctggggcgtgaggagggcgcggtgcgtcccgtggttgtgcttggaagccccccgagggtgcgcgcgcgtgggtatgagtgcgtgcgtgtgcctgggtgtgcgtgtgtgtaagtgtgcacgtgtgtgtgtgagagtgcgcgcggggaaggaggcacagagacagcccggacaggccactgcgcagccctggtggcccccgctccacctctcgctccgcagacccgcgccagggaggcctctgggccgcagcgggcaccggagcggagcgggcgcggcagcgggcgctgggaggtggggctgggggaggagagggggagggagagaggcgggcgggaggggaggatccgggaagctccggggtatttgacaggagcgagggcggacgcaaagaacgcggaggacctctgggtgcctgcaggggagctgctccagccgggccgccgggagcggtggggagagcatcgcggagccgcccctccacgcgcccgcccagccgcgctcgcccactgggctctcccggctgcagtgccagggcgcagggcgcggccgatctcccgctcccgccacctccgccaccatgctgctcccccagctctgctggctgccgctgctcgctgggctgctcccgccggtgcccgcgcagaagttctcggcgctcacgtttttgagagtggatcaagataaagacaaggattgtagcttggactgtgcgggttcgccccagaaacctctctgcgcatctgacggaaggaccttcctttcccgttgtgaatttcaacgtgccaagtgcaaagatccccagctagagattgcatatcgaggaaactgcaaagacgtgtccaggtgtgtggccgaaaggaagtatacccaggagcaagcccggaaggagtttcagcaagtgttcattcctgagtgcaatgacgacggcacctacagtcaggtccagtgtcacagctacacgggatactgctggtgcgtcacgcccaacgggaggcccatcagcggcactgccgtggcccacaagacgccccggtgcccgggttccgtaaatgaaaagttaccccaacgcgaaggcacaggaaaaacagtctccttgcaaatcttttccgttctgaattcagatgatgccgcagctccagcgttggagactcagcctcaaggagatgaagaagatattgcatcacgttaccctaccctttggactgaacaggttaaaagtcggcagaacaaaaccaataagaattcagtgtcatcctgtgaccaagagcaccagtctgccctggaggaagccaagcagcccaagaacgacaatgtggtgatccctgagtgtgcgcacggcggcctctacaagccagtgcagtgccacccctccacggggtactgctggtgcgtcctggtggacacggggcgccccattcccggcacatccacaaggtacgagcagccgaaatgtgacaacacggccagggcccacccagccaaagcccgggacctgtacaagggccgccagctacaaggttgtccgggtgccaaaaagcatgagtttctgaccagcgttctggacgcgctgtccacggacatggtccacgccgcctccgacccctcctcctcgtcaggcaggctctcagaacccgaccccagccataccctagaggagcgggtggtgcactggtacttcaaactactggataaaaactccagtggagacatcggcaaaaaggaaatcaaacccttcaagaggttccttcgcaaaaaatcaaagcccaaaaaatgtgtgaagaagtttgttgaatactgtgacgtgaataatgacaaatccatctccgtacaagaactgatgggctgcctgggcgtggcgaaagaggacggcaaagcggacaccaagaaacgccacacccccagaggtcatgctgaaagtacgtctaatagacagccaaggaaacaaggataaatggctcataccccgaaggcagttcctagacacatgggaaatttccctcaccaaagagcaattaagaaaacaaaaacagaaacacatagtatttgcactttgtactttaaatgtaaattcactttgtagaaatgagctatttaaacagactgttttaatctgtgaaaatggagagctggcttcagaaaattaatcacatacaatgtatgtgtcctcttttgaccttggaaatctgtatgtggtggagaagtatttgaatgcatttaggcttaatttcttcgccttccacatgttaacagtagagctctatgcactccggctgcaatcgtatggctttctctaacccctgcagtcacttccagatgcctgtgcttacagcattgtggaatcatgttggaagctccacatgtccatggaagtttgtgatgtacggccgaccctacaggcagttaacatgcatgggctggtttgtttcttgggattttctgttagtttgtcttgttttgctttccagagatcttgctcatacaatgaatcacgcaaccactaaagctatccagttaagtgcaggtagttcccctggaggaaataatattttcaaactgtcgttggtgtgatactttggctcaaaggatctttgcttttccattttaagcttctgttttgagttttgccctggggcttgaatgagtcccagagagtcgttcggatggtgggaggctgcctaggaggcagtaaatccagtcacagtgcctgggaggggcccatccttccaaaatgtaaatccagtcgcggtgtgaccgagctggctaacaggcttgtctgcctggttttcctcctacacgtggacattattctcctgatcctcctacctggtccaccccagggctaccggaaggtaaaatcttcacctgaaccaattatgagcagtctccttactgaaggtacagccggatacgtggtgcccccggggctggtgttggcagccggggggaggtgcctgagggtccccacggttcctttctgcttttctgaatgcatcaagggtacgagaacttgccaatgggaaattcatccgagtggcactggcagagaaggataggagtggaatgcccacacagtgaccaacagaactggtctgcgtgcataaccagctgccaccctcaggcctgggccccagagctcagggcacccagtgtcttaaggaaccatttggaggacagtctgagagcaggaacttcaagctgtgattctatctcggctcagacttttggttggaaaaagatcttcatggccccaaatcccctgagacatgccttgtagaatgattttgtgatgttgtgatgcttgtggagcatcgcgtaaggcttcttgcttatttaaactgtgcaaggtaaaaatcaagcctttggagccacagaaccagctcaagtacatgccaatgttgtttaagaaacagttatgatcctaaactttttggataatcttttatatttctgacctttgaatttaatcattgttcttagattaaaataaaatatgctattgaaact

SEQ ID NO: 427923 - DNA, 3538 bp, Homo sapiens
cctggaccctggggcgtgaggagggcgcggtgcgtcccgtggttgtgcttggaagccccccgagggtgcgcgcgcgtgggtatgagtgcgtgcgtgtgcctgggtgtgcgtgtgtgtaagtgtgcacgtgtgtgtgtgagagtgcgcgcggggaaggaggcacagagacagcccggacaggccactgcgcagccctggtggcccccgctccacctctcgctccgcagacccgcgccagggaggcctctgggccgcagcgggcaccggagcggagcgggcgcggcagcgggcgctgggaggtggggctgggggaggagagggggagggagagaggcgggcgggaggggaggatccgggaagctccggggtatttgacaggagcgagggcggacgcaaagaacgcggaggacctctgggtgcctgcaggggagctgctccagccgggccgccgggagcggtggggagagcatcgcggagccgcccctccacgcgcccgcccagccgcgctcgcccactgggctctcccggctgcagtgccagggcgcagggcgcggccgatctcccgctcccgccacctccgccaccatgctgctcccccagctctgctggctgccgctgctcgctgggctgctcccgccggtgcccgcgcagaagttctcggcgctcacgtttttgagagtggatcaagataaagacaaggattgtagcttggactgtgcgggttcgccccagaaacctctctgcgcatctgacggaaggaccttcctttcccgttgtgaatttcaacgtgccaagtgcaaagatccccagctagagattgcatatcgaggaaactgcaaagacgtgtccaggtgtgtggccgaaaggaagtatacccaggagcaagcccggaaggagtttcagcaagtgttcattcctgagtgcaatgacgacggcacctacagtcaggtccagtgtcacagctacacgggatactgctggtgcgtcacgcccaacgggaggcccatcagcggcactgccgtggcccacaagacgccccggtgcccgggttccgtaaatgaaaagttaccccaacgcgaaggcacaggaaaaacagatgatgccgcagctccagcgttggagactcagcctcaaggagatgaagaagatattgcatcacgttaccctaccctttggactgaacaggttaaaagtcggcagaacaaaaccaataagaattcagtgtcatcctgtgaccaagagcaccagtctgccctggaggaagccaagcagcccaagaacgacaatgtggtgatccctgagtgtgcgcacggcggcctctacaagccagtgcagtgccacccctccacggggtactgctggtgcgtcctggtggacacggggcgccccattcccggcacatccacaaggtacgagcagccgaaatgtgacaacacggccagggcccacccagccaaagcccgggacctgtacaagggccgccagctacaaggttgtccgggtgccaaaaagcatgagtttctgaccagcgttctggacgcgctgtccacggacatggtccacgccgcctccgacccctcctcctcgtcaggcaggctctcagaacccgaccccagccataccctagaggagcgggtggtgcactggtacttcaaactactggataaaaactccagtggagacatcggcaaaaaggaaatcaaacccttcaagaggttccttcgcaaaaaatcaaagcccaaaaaatgtgtgaagaagtttgttgaatactgtgacgtgaataatgacaaatccatctccgtacaagaactgatgggctgcctgggcgtggcgaaagaggacggcaaagcggacaccaagaaacgccacacccccagaggtcatgctgaaagtacgtctaatagacagccaaggaaacaaggataaatggctcataccccgaaggcagttcctagacacatgggaaatttccctcaccaaagagcaattaagaaaacaaaaacagaaacacatagtatttgcactttgtactttaaatgtaaattcactttgtagaaatgagctatttaaacagactgttttaatctgtgaaaatggagagctggcttcagaaaattaatcacatacaatgtatgtgtcctcttttgaccttggaaatctgtatgtggtggagaagtatttgaatgcatttaggcttaatttcttcgccttccacatgttaacagtagagctctatgcactccggctgcaatcgtatggctttctctaacccctgcagtcacttccagatgcctgtgcttacagcattgtggaatcatgttggaagctccacatgtccatggaagtttgtgatgtacggccgaccctacaggcagttaacatgcatgggctggtttgtttcttgggattttctgttagtttgtcttgttttgctttccagagatcttgctcatacaatgaatcacgcaaccactaaagctatccagttaagtgcaggtagttcccctggaggaaataatattttcaaactgtcgttggtgtgatactttggctcaaaggatctttgcttttccattttaagcttctgttttgagttttgccctggggcttgaatgagtcccagagagtcgttcggatggtgggaggctgcctaggaggcagtaaatccagtcacagtgcctgggaggggcccatccttccaaaatgtaaatccagtcgcggtgtgaccgagctggctaacaggcttgtctgcctggttttcctcctacacgtggacattattctcctgatcctcctacctggtccaccccagggctaccggaaggtaaaatcttcacctgaaccaattatgagcagtctccttactgaaggtacagccggatacgtggtgcccccggggctggtgttggcagccggggggaggtgcctgagggtccccacggttcctttctgcttttctgaatgcatcaagggtacgagaacttgccaatgggaaattcatccgagtggcactggcagagaaggataggagtggaatgcccacacagtgaccaacagaactggtctgcgtgcataaccagctgccaccctcaggcctgggccccagagctcagggcacccagtgtcttaaggaaccatttggaggacagtctgagagcaggaacttcaagctgtgattctatctcggctcagacttttggttggaaaaagatcttcatggccccaaatcccctgagacatgccttgtagaatgattttgtgatgttgtgatgcttgtggagcatcgcgtaaggcttcttgcttatttaaactgtgcaaggtaaaaatcaagcctttggagccacagaaccagctcaagtacatgccaatgttgtttaagaaacagttatgatcctaaactttttggataatcttttatatttctgacctttgaatttaatcattgttcttagattaaaataaaatatgctattgaaactaaaaaaacgaaaacatcagacaaaatcacgaataaacacaaaaacgaaaaaaatcgaag

SEQ ID NO: 427924 - DNA, 340 bp, Homo sapiens
ccacgcgtccgcgttgctataaatacattgtgtatttggcattatgtataatttgcaaagatggactttaaaagatgctgtgtaactaaactgaaataattcaattacttattatttagaatgttaaagcttatgatagtcttttctaattcttaacactcatacttgaaatctttctgagtttccccagaagagaatatgggattttttttgacatttttgactcatttaataatgctcttgtgtttacctagtatatgtagactttgtcttatgtgtcaaaagtcctaggaaagtggttgatgtttcttatagcaattaaaaattatttttgaactga

SEQ ID NO: 427925 - DNA, 3077 bp, Homo sapiens
ccagtgtgtataggtgcggcctggtgtatattcgtgcgacgggggcgtgcgtgtgatttgaacgaagtactttcagtttcatattactctaaatccattacaaatctgcttagcttctaaatatttcatcaatgaggaaatcccagccctacaacttcggaacagtgaaatattagtccagggatccagtgagagacacagaagtgctagaagccagtgctcgtgaactaaggagaaaaagaacagacaagggaacagcctggacatggcatcagagatccacatgacaggcccaatgtgcctcattgagaacactaatgggcgactgatggcgaatccagaagctctgaagatcctttctgccattacacagcctatggtggtggtggcaattgtgggcctctaccgcacaggcaaatcctacctgatgaacaagctggctggaaagaaaaagggcttctctctgggctccacggtgcagtctcacactaaaggaatctggatgtggtgtgtgccccaccccaagaagccaggccacatcctagttctgctggacaccgagggtctgggagatgtagagaagggtgacaaccagaatgactcctggatcttcgccctggccgtcctcctgagcagcaccttcgtgtacaatagcataggaaccatcaaccagcaggctatggaccaactgtactatgtgacagagctgacacatagaatccgatcaaaatcctcacctgatgagaatgagaatgaggttgaggattcagctgactttgtgagcttcttcccagactttgtgtggacactgagagatttctccctggacttggaagcagatggacaacccctcacaccagatgagtacctgacatactccctgaagctgaagaaaggtaccagtcaaaaagatgaaacttttaacctgcccagactctgtatccggaaattcttcccaaagaaaaaatgctttgtctttgatcggcccgttcaccgcaggaagcttgcccagctcgagaaactacaagatgaagagctggaccccgaatttgtgcaacaagtagcagacttctgttcctacatctttagtaattccaaaactaaaactctttcaggaggcatccaggtcaacgggcctcgtctagagagcctggtgctgacctacgtcaatgccatcagcagtggggatctgccgtgcatggagaacgcagtcctggccttggcccagatagagaactcagctgcagtgcaaaaggctattgcccactatgaacagcagatgggccagaaggtgcagctgcccacagaaagcctccaggagctgctggacctgcacagggacagtgagagagaggccattgaagtcttcatcaggagttccttcaaagatgtggaccatctatttcaaaaggagttagcggcccagctagaaaaaaagcgggatgacttttgtaaacagaatcaggaagcatcatcagatcgttgctcaggtttacttcaggtcattttcagtcctctagaagaagaagtgaaggcgggaatttattcgaaaccagggggctatcgtctctttgttcagaagctacaagacctgaagaaaaagtactatgaggaaccgaggaaggggatacaggctgaagagattctgcagacatacttgaaatccaaggagtctatgactgatgcaattctccagacagaccagactctcacagaaaaagaaaaggagattgaagtggaacgtgtgaaagctgagtctgcacaggcttcagcaaaaatgttgcaggaaatgcaaagaaagaatgagcagatgatggaacagaaggagaggagttatcaggaacacttgaaacaactgactgagaagatggagaacgacagggtccagttgctgaaagagcaagagaggaccctcgctcttaaacttcaggaacaggagcaactactaaaagagggatttcaaaaagaaagcagaataatgaaaaatgagatacaggatctccagacgaaaatgagacgacgaaaggcatgtaccataagctaaagaccagagccttcctgtcacccctaaccaaggcataattgaaacaattttagaatttggaacaagcgtcactacatttgataataattagatcttgcatcataacaccaaaagtttataaaggcatgtggtacaatgatcaaaatcatgttttttcttaaaaaaaaaaaaagactgtaaattgtgcaacaaagatgcatttacctctgtatcaactcaggaaatctcataagctggtaccactcaggagaagtttattcttccagatgaccagcagtagacaaatggatactgagcagagtcttaggtaaaagtcttgggaaatatttgggcattggtctggccaagtctacaatgtcccaatatcaaggacaaccaccctagcttcttagtgaagacaatgtacagttatccattagatcaagactacacggtctatgagcaataatgtgatttctggacattgcccatgtataatcctcactgatgatttcaagctaaagcaaaccaccttatacagagatctagaatctctttatgttctccagaggaaggtggaagaaaccatgggcaggagtaggaattgagtgataaacaattgggctaatgaagaaaacttctcttattgttcagttcatccagattataacttcaatgggacactttagaccattagacaattgacactggattaaacaaattcacataatgccaaatacacaatgtatttatagcaacgtataatttgcaaagatggactttaaaagatgctgtgtaactaaactgaaataattcaattacttattatttagaatgttaaagcttatgatagtcttttctaattcttaacactcatacttgaaatctttctgagtttccccagaagagaatatgggattttttttgacatttttgactcatttaataatgctcttgtgtttacctagtatatgtagactttgtcttatgtgtcaaaagtcctaggaaagtggttgatgtttcttatagcaattaaaaattatttttgaactga

SEQ ID NO: 427926 - DNA, 3023 bp, Homo sapiens
ccagtgtgtataggtgcggcctggtgtatattcgtgcgacgggggcgtgcgtgtgatttgaacgaagtactttcagtttcatattactctaaatccattacaaatctgcttagcttctaaatatttcatcaatgaggaaatcccagccctacaacttcggaacagtgaaatattagtccagggatccagtgagagacacagaagtgctagaagccagtgctcgtgaactaaggagaaaaagaacagacaagggaacagcctggacatggcatcagagatccacatgacaggcccaatgtgcctcattgagaacactaatgggcgactgatggcgaatccagaagctctgaagatcctttctgccattacacagcctatggtggtggtggcaattgtgggcctctaccgcacaggcaaatcctacctgatgaacaagctggctggaaagaaaaagggcttctctctgggctccacggtgcagtctcacactaaaggaatctggatgtggtgtgtgccccaccccaagaagccaggccacatcctagttctgctggacaccgagggtctgggagatgtagagaagggtgacaaccagaatgactcctggatcttcgccctggccgtcctcctgagcagcaccttcgtgtacaatagcataggaaccatcaaccagcaggctatggaccaactgtactatgtgacagagctgacacatagaatccgatcaaaatcctcacctgatgagaatgagaatgaggttgaggattcagctgactttgtgagcttcttcccagactttgtgtggacactgagagatttctccctggacttggaagcagatggacaacccctcacaccagatgagtacctgacatactccctgaagctgaagaaaggtaccagtcaaaaagatgaaacttttaacctgcccagactctgtatccggaaattcttcccaaagaaaaaatgctttgtctttgatcggcccgttcaccgcaggaagcttgcccagctcgagaaactacaagatgaagagctggaccccgaatttgtgcaacaagtagcagacttctgttcctacatctttagtaattccaaaactaaaactctttcaggaggcatccaggtcaacgggcctcgtctagagagcctggtgctgacctacgtcaatgccatcagcagtggggatctgccgtgcatggagaacgcagtcctggccttggcccagatagagaactcagctgcagtgcaaaaggctattgcccactatgaacagcagatgggccagaaggtgcagctgcccacagaaagcctccaggagctgctggacctgcacagggacagtgagagagaggccattgaagtcttcatcaggagttccttcaaagatgtggaccatctatttcaaaaggagttagcggcccagctagaaaaaaagcgggatgacttttgtaaacagaatcaggaagcatcatcagatcgttgctcaggtttacttcaggtcattttcagtcctctagaagaagaagtgaaggcgggaatttattcgaaaccagggggctatcgtctctttgttcagaagctacaagacctgaagaaaaagtactatgaggaaccgaggaaggggatacaggctgaagagattctgcagacatacttgaaatccaaggagtctatgactgatgcaattctccagacagaccagactctcacagaaaaagaaaaggagattgaagtggaacgtgtgaaagctgagtctgcacaggcttcagcaaaaatgttgcaggaaatgcaaagaaagaatgagcagatgatggaacagaaggagaggagttatcaggaacacttgaaacaactgactgagaagatggagaacgacagggtccagttgctgaaagagcaagagaggaccctcgctcttaaacttcaggaacaggagcaactactaaaagagggatttcaaaaagaaagcagaataatgaaaaatgagatacaggatctccagacgaaaatgagacgacgaaaggcatgtaccataagctaaagaccagagccttcctgtcacccctaaccaaggcataattgaaacaattttagaatttggaacaagcgtcactacatttgataataattagatcttgcatcataacaccaaaagtttataaaggcatgtggtacaatgatcaaaatcatgttttttcttaaaaaaaaaaaaagactgtaaattgtgcaacaaagatgcatttacctctgtatcaactcaggaaatctcataagctggtaccactcaggagaagtttattcttccagatgaccagcagtagacaaatggatactgagcagagtcttaggttatcaaggacaaccaccctagcttcttagtgaagacaatgtacagttatccattagatcaagactacacggtctatgagcaataatgtgatttctggacattgcccatgtataatcctcactgatgatttcaagctaaagcaaaccaccttatacagagatctagaatctctttatgttctccagaggaaggtggaagaaaccatgggcaggagtaggaattgagtgataaacaattgggctaatgaagaaaacttctcttattgttcagttcatccagattataacttcaatgggacactttagaccattagacaattgacactggattaaacaaattcacataatgccaaatacacaatgtatttatagcaacgtataatttgcaaagatggactttaaaagatgctgtgtaactaaactgaaataattcaattacttattatttagaatgttaaagcttatgatagtcttttctaattcttaacactcatacttgaaatctttctgagtttccccagaagagaatatgggattttttttgacatttttgactcatttaataatgctcttgtgtttacctagtatatgtagactttgtcttatgtgtcaaaagtcctaggaaagtggttgatgtttcttatagcaattaaaaattatttttgaactga

SEQ ID NO: 427927 - DNA, 3350 bp, Homo sapiens
ccagtgtgtataggtgcggcctggtgtatattcgtgcgacgggggcgtgcgtgtgatttgaacgaagtactttcagtttcatattactctaaatccattacaaatctgcttagcttctaaatatttcatcaatgaggaaatcccagccctacaacttcggaacagtgaaatattagtccagggatccagtgagagacacagaagtgctagaagccagtgctcgtgaactaaggagaaaaagaacagacaagggaacagcctggacatggcatcagagatccacatgacaggcccaatgtgcctcattgagaacactaatgggcgactgatggcgaatccagaagctctgaagatcctttctgccattacacagcctatggtggtggtggcaattgtgggcctctaccgcacaggcaaatcctacctgatgaacaagctggctggaaagaaaaagggcttctctctgggctccacggtgcagtctcacactaaaggaatctggatgtggtgtgtgccccaccccaagaagccaggccacatcctagttctgctggacaccgagggtctgggagatgtagagaagggtgacaaccagaatgactcctggatcttcgccctggccgtcctcctgagcagcaccttcgtgtacaatagcataggaaccatcaaccagcaggctatggaccaactgtagtatccttttgtgacccagaacagcaccaaggtcagaggggacacctgtattcatacaccagctgcctgactgtgaatcctgatgaatcaagctcaaaaggagaaaacaaaaaataatgcaagtacagaggagagatcccatgtatccactttagaactgacactgacacttaggttaggagcaaaggaaaatggaaggtttgggtatgtgttgaactaacatgggatgaggtccctgttcattttgtcacatttccttagttagctactcagctatgtgacagagctgacacatagaatccgatcaaaatcctcacctgatgagaatgagaatgaggttgaggattcagctgactttgtgagcttcttcccagactttgtgtggacactgagagatttctccctggacttggaagcagatggacaacccctcacaccagatgagtacctgacatactccctgaagctgaagaaaggtaccagtcaaaaagatgaaacttttaacctgcccagactctgtatccggaaattcttcccaaagaaaaaatgctttgtctttgatcggcccgttcaccgcaggaagcttgcccagctcgagaaactacaagatgaagagctggaccccgaatttgtgcaacaagtagcagacttctgttcctacatctttagtaattccaaaactaaaactctttcaggaggcatccaggtcaacgggcctcgtctagagagcctggtgctgacctacgtcaatgccatcagcagtggggatctgccgtgcatggagaacgcagtcctggccttggcccagatagagaactcagctgcagtgcaaaaggctattgcccactatgaacagcagatgggccagaaggtgcagctgcccacagaaagcctccaggagctgctggacctgcacagggacagtgagagagaggccattgaagtcttcatcaggagttccttcaaagatgtggaccatctatttcaaaaggagttagcggcccagctagaaaaaaagcgggatgacttttgtaaacagaatcaggaagcatcatcagatcgttgctcaggtttacttcaggtcattttcagtcctctagaagaagaagtgaaggcgggaatttattcgaaaccagggggctatcgtctctttgttcagaagctacaagacctgaagaaaaagtactatgaggaaccgaggaaggggatacaggctgaagagattctgcagacatacttgaaatccaaggagtctatgactgatgcaattctccagacagaccagactctcacagaaaaagaaaaggagattgaagtggaacgtgtgaaagctgagtctgcacaggcttcagcaaaaatgttgcaggaaatgcaaagaaagaatgagcagatgatggaacagaaggagaggagttatcaggaacacttgaaacaactgactgagaagatggagaacgacagggtccagttgctgaaagagcaagagaggaccctcgctcttaaacttcaggaacaggagcaactactaaaagagggatttcaaaaagaaagcagaataatgaaaaatgagatacaggatctccagacgaaaatgagacgacgaaaggcatgtaccataagctaaagaccagagccttcctgtcacccctaaccaaggcataattgaaacaattttagaatttggaacaagcgtcactacatttgataataattagatcttgcatcataacaccaaaagtttataaaggcatgtggtacaatgatcaaaatcatgttttttcttaaaaaaaaaaaaagactgtaaattgtgcaacaaagatgcatttacctctgtatcaactcaggaaatctcataagctggtaccactcaggagaagtttattcttccagatgaccagcagtagacaaatggatactgagcagagtcttaggtaaaagtcttgggaaatatttgggcattggtctggccaagtctacaatgtcccaatatcaaggacaaccaccctagcttcttagtgaagacaatgtacagttatccattagatcaagactacacggtctatgagcaataatgtgatttctggacattgcccatgtataatcctcactgatgatttcaagctaaagcaaaccaccttatacagagatctagaatctctttatgttctccagaggaaggtggaagaaaccatgggcaggagtaggaattgagtgataaacaattgggctaatgaagaaaacttctcttattgttcagttcatccagattataacttcaatgggacactttagaccattagacaattgacactggattaaacaaattcacataatgccaaatacacaatgtatttatagcaacgtataatttgcaaagatggactttaaaagatgctgtgtaactaaactgaaataattcaattacttattatttagaatgttaaagcttatgatagtcttttctaattcttaacactcatacttgaaatctttctgagtttccccagaagagaatatgggattttttttgacatttttgactcatttaataatgctcttgtgtttacctagtatatgtagactttgtcttatgtgtcaaaagtcctaggaaagtggttgatgtttcttatagcaattaaaaattatttttgaactga

SEQ ID NO: 427928 - DNA, 3626 bp, Homo sapiens
ccagtgtgtataggtgcggcctggtgtatattcgtgcgacgggggcgtgcgtgtgatttgaacgaagtactttcagtttcatattactctaaatccattacaaatctgcttagcttctaaatatttcatcaatgaggaaatcccagccctacaacttcggaacagtgaaatattagtccagggatccagtgagagacacagaagtgctagaagccagtgctcgtgaactaaggagaaaaagaacagacaagggaacagcctggacatggcatcagagatccacatgacaggcccaatgtgcctcattgagaacactaatgggcgactgatggcgaatccagaagctctgaagatcctttctgccattacacagcctatggtggtggtggcaattgtgggcctctaccgcacaggcaaatcctacctgatgaacaagctggctggaaagaaaaagggcttctctctgggctccacggtgcagtctcacactaaaggaatctggatgtggtgtgtgccccaccccaagaagccaggccacatcctagttctgctggacaccgagggtctgggagatgtagagaagggtgacaaccagaatgactcctggatcttcgccctggccgtcctcctgagcagcaccttcgtgtacaatagcataggaaccatcaaccagcaggctatggaccaactgtactatgtgacagagctgacacatagaatccgatcaaaatcctcacctgatgagaatgagaatgaggttgaggattcagctgactttgtgagcttcttcccagactttgtgtggacactgagagatttctccctggacttggaagcagatggacaacccctcacaccagatgagtacctgacatactccctgaagctgaagaaaggtaacagagagcttcaactgataaatgaggatgagaaaacacaagaaattatcatttttcagtttactattgctagttttccagcatttgcagttttctatgtcttcagctggctattcctagaaattaatacttgctgaatatccaaattaatagatgttattttaaattacatttgtcattgttctagaacaagtttcttgttctttcacctttgtgtatgctgtgattaggttaattttatctccctgcctagggtttgtgatcttctacttagccatagagtatggagtacaatggatatttatttaaagaacatagactaaaacatgaaccgtgtgctagtccaagcattggcaaactacagcccaagacaaatcatggcaaatcctgcctgccagctgtctttgtaaataaggtttttttggaataatgctatgcccattcatttacatgttgtctaaagctgttgtcatgcttcaataacagagttgaatacttggaaaagagaccatccagcctgaagagcctaaaatatttactatttggccctttacagaaacacttatattaggcaattttataattttttaaatgtttttctaggtaccagtcaaaaagatgaaacttttaacctgcccagactctgtatccggaaattcttcccaaagaaaaaatgctttgtctttgatcggcccgttcaccgcaggaagcttgcccagctcgagaaactacaagatgaagagctggaccccgaatttgtgcaacaagtagcagacttctgttcctacatctttagtaattccaaaatgacctacgtcaatgccatcagcagtggggatctgccgtgcatggagaacgcagtcctggccttggcccagatagagaactcagctgcagtgcaaaaggctattgcccactatgaacagcagatgggccagaaggtgcagctgcccacagaaagcctccaggagctgctggacctgcacagggacagtgagagagaggccattgaagtcttcatcaggagttccttcaaagatgtggaccatctatttcaaaaggagttagcggcccagctagaaaaaaagcgggatgacttttgtaaacagaatcaggaagcatcatcagatcgttgctcaggtttacttcaggtcattttcagtcctctagaagaagaagtgaaggcgggaatttattcgaaaccagggggctatcgtctctttgttcagaagctacaagacctgaagaaaaagtactatgaggaaccgaggaaggggatacaggctgaagagattctgcagacatacttgaaatccaaggagtctatgactgatgcaattctccagacagaccagactctcacagaaaaagaaaaggagattgaagtggaacgtgtgaaagctgagtctgcacaggcttcagcaaaaatgttgcaggaaatgcaaagaaagaatgagcagatgatggaacagaaggagaggagttatcaggaacacttgaaacaactgactgagaagatggagaacgacagggtccagttgctgaaagagcaagagaggaccctcgctcttaaacttcaggaacaggagcaactactaaaagagggatttcaaaaagaaagcagaataatgaaaaatgagatacaggatctccagacgaaaatgagacgacgaaaggcatgtaccataagctaaagaccagagccttcctgtcacccctaaccaaggcataattgaaacaattttagaatttggaacaagcgtcactacatttgataataattagatcttgcatcataacaccaaaagtttataaaggcatgtggtacaatgatcaaaatcatgttttttcttaaaaaaaaaaaaagactgtaaattgtgcaacaaagatgcatttacctctgtatcaactcaggaaatctcataagctggtaccactcaggagaagtttattcttccagatgaccagcagtagacaaatggatactgagcagagtcttaggtaaaagtcttgggaaatatttgggcattggtctggccaagtctacaatgtcccaatatcaaggacaaccaccctagcttcttagtgaagacaatgtacagttatccattagatcaagactacacggtctatgagcaataatgtgatttctggacattgcccatgtataatcctcactgatgatttcaagctaaagcaaaccaccttatacagagatctagaatctctttatgttctccagaggaaggtggaagaaaccatgggcaggagtaggaattgagtgataaacaattgggctaatgaagaaaacttctcttattgttcagttcatccagattataacttcaatgggacactttagaccattagacaattgacactggattaaacaaattcacataatgccaaatacacaatgtatttatagcaacgtataatttgcaaagatggactttaaaagatgctgtgtaactaaactgaaataattcaattacttattatttagaatgttaaagcttatgatagtcttttctaattcttaacactcatacttgaaatctttctgagtttccccagaagagaatatgggattttttttgacatttttgactcatttaataatgctcttgtgtttacctagtatatgtagactttgtcttatgtgtcaaaagtcctaggaaagtggttgatgtttcttatagcaattaaaaattatttttgaactga

SEQ ID NO: 427929 - DNA, 3314 bp, Homo sapiens
ccagtgtgtataggtgcggcctggtgtatattcgtgcgacgggggcgtgcgtgtgatttgaacgaagtactttcagtttcatattactctaaatccattacaaatctgcttagcttctaaatatttcatcaatgaggaaatcccagccctacaacttcggaacagtgaaatattagtccagggatccagtgagagacacagaagtgctagaagccagtgctcgtgaactaaggagaaaaagaacagacaagggaacagcctggacatggcatcagagatccacatgacaggcccaatgtgcctcattgagaacactaatgggcgactgatggcgaatccagaagctctgaagatcctttctgccattacacagcctatggtggtggtggcaattgtgggcctctaccgcacaggcaaatcctacctgatgaacaagctggctggaaagaaaaagggcttctctctgggctccacggtgcagtctcacactaaaggaatctggatgtggtgtgtgccccaccccaagaagccaggccacatcctagttctgctggacaccgagggtctgggagatgtagagaagggtgacaaccagaatgactcctggatcttcgccctggccgtcctcctgagcagcaccttcgtgtacaatagcataggaaccatcaaccagcaggctatggaccaactgtactatgtgacagagctgacacatagaatccgatcaaaatcctcacctgatgagaatgagaatgaggttgaggattcagctgactttgtgagcttcttcccagactttgtgtggacactgagagatttctccctggacttggaagcagatggacaacccctcacaccagatgagtacctgacatactccctgaagctgaagaaaggtaccagtcaaaaagatgaaacttttaacctgcccagactctgtatccggaaattcttcccaaagaaaaaatgctttgtctttgatcggcccgttcaccgcaggaagcttgcccagctcgagaaactacaagatgaagagctggaccccgaatttgtgcaacaagtagcagacttctgttcctacatctttagtaattccaaaactaaaactctttcaggaggcatccaggtcaacgggcctcgtctagagagcctggtgctgacctacgtcaatgccatcagcagtggggatctgccgtgcatggagaacgcagtcctggccttggcccagatagagaactcagctgcagtgcaaaaggctattgcccactatgaacagcagatgggccagaaggtgcagctgcccacagaaagcctccaggagctgctggacctgcacagggacagtgagagagaggccattgaagtcttcatcaggagttccttcaaagatgtggaccatctatttcaaaaggagttagcggcccagctagaaaaaaagcgggatgacttttgtaaacagaatcaggaagcatcatcagatcgttgctcaggtttacttcaggtcattttcagtcctctagaagaagaagtgaaggcgggaatttattcgaaaccagggggctatcgtctctttgttcagaagctacaagacctgaagaaaaagtactatgaggaaccgaggaaggggatacaggctgaagagattctgcagacatacttgaaatccaaggagtctatgactgatgcaattctccagacagaccagactctcacagaaaaagaaaaggagattgaaggtgaggagtgagttaagagattagatggcctcaaaagctccaaaaattgaaataacttgactggataaacatgggaccctttaactagagcaagatccacaaaggtgtgtcttacttgccgaggtcatctctgagtagggcatatgcagtcaacaacaatgacaggtaagtgtataaggaagaatgaggcaacaagataaccccacacaaatttttcttcttccttttcctcctcagtggaacgtgtgaaagctgagtctgcacaggcttcagcaaaaatgttgcaggaaatgcaaagaaagaatgagcagatgatggaacagaaggagaggagttatcaggaacacttgaaacaactgactgagaagatggagaacgacagggtccagttgctgaaagagcaagagaggaccctcgctcttaaacttcaggaacaggagcaactactaaaagagggatttcaaaaagaaagcagaataatgaaaaatgagatacaggatctccagacgaaaatgagacgacgaaaggcatgtaccataagctaaagaccagagccttcctgtcacccctaaccaaggcataattgaaacaattttagaatttggaacaagcgtcactacatttgataataattagatcttgcatcataacaccaaaagtttataaaggcatgtggtacaatgatcaaaatcatgttttttcttaaaaaaaaaaaaagactgtaaattgtgcaacaaagatgcatttacctctgtatcaactcaggaaatctcataagctggtaccactcaggagaagtttattcttccagatgaccagcagtagacaaatggatactgagcagagtcttaggtaaaagtcttgggaaatatttgggcattggtctggccaagtctacaatgtcccaatatcaaggacaaccaccctagcttcttagtgaagacaatgtacagttatccattagatcaagactacacggtctatgagcaataatgtgatttctggacattgcccatgtataatcctcactgatgatttcaagctaaagcaaaccaccttatacagagatctagaatctctttatgttctccagaggaaggtggaagaaaccatgggcaggagtaggaattgagtgataaacaattgggctaatgaagaaaacttctcttattgttcagttcatccagattataacttcaatgggacactttagaccattagacaattgacactggattaaacaaattcacataatgccaaatacacaatgtatttatagcaacgtataatttgcaaagatggactttaaaagatgctgtgtaactaaactgaaataattcaattacttattatttagaatgttaaagcttatgatagtcttttctaattcttaacactcatacttgaaatctttctgagtttccccagaagagaatatgggattttttttgacatttttgactcatttaataatgctcttgtgtttacctagtatatgtagactttgtcttatgtgtcaaaagtcctaggaaagtggttgatgtttcttatagcaattaaaaattatttttgaactga

SEQ ID NO: 427930 - DNA, 1794 bp, Homo sapiens
gagtcactctgatatttgctttctcaatgatggcttcattccccagcaggctcagcccatatgggaccacagcattaacagttccaaacttagagcccttaatctaaacaggacagagactctccttttcccagtatctatattagcctactaaaaatgactgctaagtaggatgttctgatcggcttgccaggagcatgtgtctgtcgctccgacagggaatttgaccaccaaggacaatagggccaagagaaagaattcccagaggagaaaggatggcaggaagacaaacaggaacacctgcttacagccatttcctacttctcactctgtgttctctgggtcctaaggctgaagagattctgcagacatacttgaaatccaaggagtctatgactgatgcaattctccagacagaccagactctcacagaaaaagaaaaggagattgaagtggaacgtgtgaaagctgagtctgcacaggcttcagcaaaaatgttgcaggaaatgcaaagaaagaatgagcagatgatggaacagaaggagaggagttatcaggaacacttgaaacaactgactgagaagatggagaacgacagggtccagttgctgaaagagcaagagaggaccctcgctcttaaacttcaggaacaggagcaactactaaaagagggatttcaaaaagaaagcagaataatgaaaaatgagatacaggatctccagacgaaaatgagacgacgaaaggcatgtaccataagctaaagaccagagccttcctgtcacccctaaccaaggcataattgaaacaattttagaatttggaacaagcgtcactacatttgataataattagatcttgcatcataacaccaaaagtttataaaggcatgtggtacaatgatcaaaatcatgttttttcttaaaaaaaaaaaaagactgtaaattgtgcaacaaagatgcatttacctctgtatcaactcaggaaatctcataagctggtaccactcaggagaagtttattcttccagatgaccagcagtagacaaatggatactgagcagagtcttaggtaaaagtcttgggaaatatttgggcattggtctggccaagtctacaatgtcccaatatcaaggacaaccaccctagcttcttagtgaagacaatgtacagttatccattagatcaagactacacggtctatgagcaataatgtgatttctggacattgcccatgtataatcctcactgatgatttcaagctaaagcaaaccaccttatacagagatctagaatctctttatgttctccagaggaaggtggaagaaaccatgggcaggagtaggaattgagtgataaacaattgggctaatgaagaaaacttctcttattgttcagttcatccagattataacttcaatgggacactttagaccattagacaattgacactggattaaacaaattcacataatgccaaatacacaatgtatttatagcaacgtataatttgcaaagatggactttaaaagatgctgtgtaactaaactgaaataattcaattacttattatttagaatgttaaagcttatgatagtcttttctaattcttaacactcatacttgaaatctttctgagtttccccagaagagaatatgggattttttttgacatttttgactcatttaataatgctcttgtgtttacctagtatatgtagactttgtcttatgtgtcaaaagtcctaggaaagtggttgatgtttcttatagcaattaaaaattatttttgaactga

SEQ ID NO: 427931 - DNA, 2031 bp, Homo sapiens
gagtcactctgatatttgctttctcaatgatggcttcattccccagcaggctcagcccatatgggaccacagcattaacagttccaaacttagagcccttaatctaaacaggacagagactctccttttcccagtatctatattagcctactaaaaatgactgctaagtaggatgttctgatcggcttgccaggagcatgtgtctgtcgctccgacagggaatttgaccaccaaggacaatagggccaagagaaagaattcccagaggagaaaggatggcaggaagacaaacaggaacacctgcttacagccatttcctacttctcactctgtgttctctgggtcctaaggctgaagagattctgcagacatacttgaaatccaaggagtctatgactgatgcaattctccagacagaccagactctcacagaaaaagaaaaggagattgaaggtgaggagtgagttaagagattagatggcctcaaaagctccaaaaattgaaataacttgactggataaacatgggaccctttaactagagcaagatccacaaaggtgtgtcttacttgccgaggtcatctctgagtagggcatatgcagtcaacaacaatgacaggtaagtgtataaggaagaatgaggcaacaagataaccccacacaaatttttcttcttccttttcctcctcagtggaacgtgtgaaagctgagtctgcacaggcttcagcaaaaatgttgcaggaaatgcaaagaaagaatgagcagatgatggaacagaaggagaggagttatcaggaacacttgaaacaactgactgagaagatggagaacgacagggtccagttgctgaaagagcaagagaggaccctcgctcttaaacttcaggaacaggagcaactactaaaagagggatttcaaaaagaaagcagaataatgaaaaatgagatacaggatctccagacgaaaatgagacgacgaaaggcatgtaccataagctaaagaccagagccttcctgtcacccctaaccaaggcataattgaaacaattttagaatttggaacaagcgtcactacatttgataataattagatcttgcatcataacaccaaaagtttataaaggcatgtggtacaatgatcaaaatcatgttttttcttaaaaaaaaaaaaagactgtaaattgtgcaacaaagatgcatttacctctgtatcaactcaggaaatctcataagctggtaccactcaggagaagtttattcttccagatgaccagcagtagacaaatggatactgagcagagtcttaggtaaaagtcttgggaaatatttgggcattggtctggccaagtctacaatgtcccaatatcaaggacaaccaccctagcttcttagtgaagacaatgtacagttatccattagatcaagactacacggtctatgagcaataatgtgatttctggacattgcccatgtataatcctcactgatgatttcaagctaaagcaaaccaccttatacagagatctagaatctctttatgttctccagaggaaggtggaagaaaccatgggcaggagtaggaattgagtgataaacaattgggctaatgaagaaaacttctcttattgttcagttcatccagattataacttcaatgggacactttagaccattagacaattgacactggattaaacaaattcacataatgccaaatacacaatgtatttatagcaacgtataatttgcaaagatggactttaaaagatgctgtgtaactaaactgaaataattcaattacttattatttagaatgttaaagcttatgatagtcttttctaattcttaacactcatacttgaaatctttctgagtttccccagaagagaatatgggattttttttgacatttttgactcatttaataatgctcttgtgtttacctagtatatgtagactttgtcttatgtgtcaaaagtcctaggaaagtggttgatgtttcttatagcaattaaaaattatttttgaactga

SEQ ID NO: 427932 - DNA, 1408 bp, Homo sapiens
cttagaccaaatttcctaatccatgattcatacaccttatgagattttgaggatactttgcttatttcggtgttatgtcatatacataatagggtaaggaacatggctgtgctttggtcaatgataggccaaagtatgacatttacgtcttgcgtgactcagagaaaattaaataacaaatcatttaatgtggaaaccagatagaatgtttcaatttgcctgatgctacactttactcagccttcgtttgtccctttttaggaacaggagcaactactaaaagagggatttcaaaaagaaagcagaataatgaaaaatgagatacaggatctccagacgaaaatgagacgacgaaaggcatgtaccataagctaaagaccagagccttcctgtcacccctaaccaaggcataattgaaacaattttagaatttggaacaagcgtcactacatttgataataattagatcttgcatcataacaccaaaagtttataaaggcatgtggtacaatgatcaaaatcatgttttttcttaaaaaaaaaaaaagactgtaaattgtgcaacaaagatgcatttacctctgtatcaactcaggaaatctcataagctggtaccactcaggagaagtttattcttccagatgaccagcagtagacaaatggatactgagcagagtcttaggtaaaagtcttgggaaatatttgggcattggtctggccaagtctacaatgtcccaatatcaaggacaaccaccctagcttcttagtgaagacaatgtacagttatccattagatcaagactacacggtctatgagcaataatgtgatttctggacattgcccatgtataatcctcactgatgatttcaagctaaagcaaaccaccttatacagagatctagaatctctttatgttctccagaggaaggtggaagaaaccatgggcaggagtaggaattgagtgataaacaattgggctaatgaagaaaacttctcttattgttcagttcatccagattataacttcaatgggacactttagaccattagacaattgacactggattaaacaaattcacataatgccaaatacacaatgtatttatagcaacgtataatttgcaaagatggactttaaaagatgctgtgtaactaaactgaaataattcaattacttattatttagaatgttaaagcttatgatagtcttttctaattcttaacactcatacttgaaatctttctgagtttccccagaagagaatatgggattttttttgacatttttgactcatttaataatgctcttgtgtttacctagtatatgtagactttgtcttatgtgtcaaaagtcctaggaaagtggttgatgtttcttatagcaattaaaaattatttttgaactga

SEQ ID NO: 427933 - DNA, 778 bp, Homo sapiens
tagaggatccccttgaacattcggtccaaatggatactgagcagagtcttaggtaaaagtcttgggaaatatttgggcattggtctggccaagtctacaatgtcccaatatcaaggacaaccaccctagcttcttagtgaagacaatgtacagttatccattagatcaagactacacggtctatgagcaataatgtgatttctggacattgcccatgtataatcctcactgatgatttcaagctaaagcaaaccaccttatacagagatctagaatctctttatgttctccagaggaaggtggaagaaaccatgggcaggagtaggaattgagtgataaacaattgggctaatgaagaaaacttctcttattgttcagttcatccagattataacttcaatgggacactttagaccattagacaattgacactggattaaacaaattcacataatgccaaatacacaatgtatttatagcaacgtataatttgcaaagatggactttaaaagatgctgtgtaactaaactgaaataattcaattacttattatttagaatgttaaagcttatgatagtcttttctaattcttaacactcatacttgaaatctttctgagtttccccagaagagaatatgggattttttttgacatttttgactcatttaataatgctcttgtgtttacctagtatatgtagactttgtcttatgtgtcaaaagtcctaggaaagtggttgatgtttcttatagcaattaaaaattatttttgaactga

SEQ ID NO: 427934 - DNA, 1956 bp, Homo sapiens
ccagtgtgtataggtgcggcctggtgtatattcgtgcgacgggggcgtgcgtgtgatttgaacgaagtactttcagtttcatattactctaaatccattacaaatctgcttagcttctaaatatttcatcaatgaggaaatcccagccctacaacttcggaacagtgaaatattagtccagggatccagtgagagacacagaagtgctagaagccagtgctcgtgaactaaggagaaaaagaacagacaagggaacagcctggacatggcatcagagatccacatgacaggcccaatgtgcctcattgagaacactaatgggcgactgatggcgaatccagaagctctgaagatcctttctgccattacacagcctatggtggtggtggcaattgtgggcctctaccgcacaggcaaatcctacctgatgaacaagctggctggaaagaaaaagggcttctctctgggctccacggtgcagtctcacactaaaggaatctggatgtggtgtgtgccccaccccaagaagccaggccacatcctagttctgctggacaccgagggtctgggagatgtagagaagggtgacaaccagaatgactcctggatcttcgccctggccgtcctcctgagcagcaccttcgtgtacaatagcataggaaccatcaaccagcaggctatggaccaactgtactatgtgacagagctgacacatagaatccgatcaaaatcctcacctgatgagaatgagaatgaggttgaggattcagctgactttgtgagcttcttcccagactttgtgtggacactgagagatttctccctggacttggaagcagatggacaacccctcacaccagatgagtacctgacatactccctgaagctgaagaaaggtaccagtcaaaaagatgaaacttttaacctgcccagactctgtatccggaaattcttcccaaagaaaaaatgctttgtctttgatcggcccgttcaccgcaggaagcttgcccagctcgagaaactacaagatgaagagctggaccccgaatttgtgcaacaagtagcagacttctgttcctacatctttagtaattccaaaactaaaactctttcaggaggcatccaggtcaacgggcctcgtctagagagcctggtgctgacctacgtcaatgccatcagcagtggggatctgccgtgcatggagaacgcagtcctggccttggcccagatagagaactcagctgcagtgcaaaaggctattgcccactatgaacagcagatgggccagaaggtgcagctgcccacagaaagcctccaggagctgctggacctgcacagggacagtgagagagaggccattgaagtcttcatcaggagttccttcaaagatgtggaccatctatttcaaaaggagttagcggtaatttttgtctcaaatgtatacggtttagggtcatagaagctaaagtaccacaaggaaagaaaactattatttattttgacggaagtaattcctcctagcttccataatggtgaaaacaacagatttgtgatcacatcagtcagaaggaccaactgtattattacagacccaaagttctaaaacattttttcctgaataattttccctttacttatgcatacaactgacaaccagagcttctaataaaattacctgcccactcttctcagactgatttgatattctagccaaacacaaagaaaattttcatcctacttatcttgagcaggcttccgttcagccacatttattccatatgaaatcattagtccaatatgcaaaaacagagttttcctctaacagttgacataaagctatcaatctcagccctgaacctcacctccaaaaagaaagcgacttcagcagaaagtggggtcagaaggaagagtgtggtcctggtgaggaggctgtcagtttctccagcatcattgact

SEQ ID NO: 427935 - DNA, 445 bp, Homo sapiens
ccagtgtgtataggtgcggcctggtgtatattcgtgcgacgggggcgtgcgtgtgatttgaacgaagtactttcagtttcatattactctaaatccattacaaatctgcttagcttctaaatatttcatcaatgaggaaatcccagccctacaacttcggaacagtgaaatattagtccagggatccagtgagagacacagaagtgctagaagccagtgctcgtgaactaaggagaaaaagaacagacaagggaacagcctggacatggcatcagagatccacatgacaggcccaatgtgcctcattgagaacactaatgggcgactgatggcgaatccagaagctctgaagatcctttctgccattacacagcctatggtggtgggtgactatagtcccagctactcgggaggctgaggcaggagaatggcgtgaacccaggag

SEQ ID NO: 427936 - DNA, 600 bp, Homo sapiens
agcttgcccagctcgagaaactacaagatgaagagctggaccccgaatttgtgcaacaagtagcagacttctgttcctacatctttagtaattccaaaactaaaactctttcaggaggcatccaggtcaacgggcctcgtaagtccccttcctagtacttctgctcattgtttaagactagaggagcatagaataacttccacctagtttcagcattgaaaaatcccaatctactgctatatttgtgttaaattctagatggcaccaatgtttctaacatatattgttagtcacatttccagtctaggaaaaggccaaaggaaaaaagttctattgcttgaaattgccctagtgaactggacctgcactatgcaatagagtagcccctagacaagtgtgtctatgtaaacataaatgtaaataatttaaatagggaaaatttaaaagtcaattcacatgcctgtatttcaaggactaatatttacacgtacttagtgactagcacactgaaaagcacatatacaacattcccagcattacagaaagcgcttttgaacaatactgcaataaaataaactaaatggatgactcttttttatt

SEQ ID NO: 427937 - DNA, 3905 bp, Homo sapiens
ccagtgtgtataggtgcggcctggtgtatattcgtgcgacgggggcgtgcgtgtgatttgaacgaagtactttcagtttcatattactctaaatccattacaaatctgcttagcttctaaatatttcatcaatgaggaaatcccagccctacaacttcggaacagtgaaatattagtccagggatccagtgagagacacagaagtgctagaagccagtgctcgtgaactaaggagaaaaagaacagacaagggaacagcctggacatggcatcagagatccacatgacaggcccaatgtgcctcattgagaacactaatgggcgactgatggcgaatccagaagctctgaagatcctttctgccattacacagcctatggtggtggtggcaattgtgggcctctaccgcacaggcaaatcctacctgatgaacaagctggctggaaagaaaaagggcttctctctgggctccacggtgcagtctcacactaaaggaatctggatgtggtgtgtgccccaccccaagaagccaggccacatcctagttctgctggacaccgagggtctgggagatgtagagaagggtgacaaccagaatgactcctggatcttcgccctggccgtcctcctgagcagcaccttcgtgtacaatagcataggaaccatcaaccagcaggctatggaccaactgtactatgtgacagagctgacacatagaatccgatcaaaatcctcacctgatgagaatgagaatgaggttgaggattcagctgactttgtgagcttcttcccagactttgtgtggacactgagagatttctccctggacttggaagcagatggacaacccctcacaccagatgagtacctgacatactccctgaagctgaagaaaggtaccagtcaaaaagatgaaacttttaacctgcccagactctgtatccggaaattcttcccaaagaaaaaatgctttgtctttgatcggcccgttcaccgcaggaagcttgcccagctcgagaaactacaagatgaagagctggaccccgaatttgtgcaacaagtagcagacttctgttcctacatctttagtaattccaaaactaaaactctttcaggaggcatccaggtcaacgggcctcgtctagagagcctggtgctgacctacgtcaatgccatcagcagtggggatctgccgtgcatggagaacgcagtcctggccttggcccagatagagaactcagctgcagtgcaaaaggctattgcccactatgaacagcagatgggccagaaggtgcagctgcccacagaaagcctccaggagctgctggacctgcacagggacagtgagagagaggccattgaagtcttcatcaggagttccttcaaagatgtggaccatctatttcaaaaggagttagcggcccagctagaaaaaaagcgggatgacttttgtaaacagaatcaggaagcatcatcagatcgttgctcaggtttacttcaggtcattttcagtcctctagaagaagaagtgaaggcgggaatttattcgaaaccagggggctatcgtctctttgttcagaagctacaagacctgaagaaaaagtactatgaggaaccgaggaaggggatacaggctgaagagattctgcagacatacttgaaatccaaggagtctatgactgatgcaattctccagacagaccagactctcacagaaaaagaaaaggagattgaagtggaacgtgtgaaagctgagtctgcacaggcttcagcaaaaatgttgcaggaaatgcaaagaaagaatgagcagatgatggaacagaaggagaggagttatcaggaacacttgaaacaactgactgagaagatggagaacgacagggtccagttgctgaaagagcaagagaggaccctcgctcttaaacttcaggaacaggagcaactactaaaagagggatttcaaaaagaaagcagaataatgaaaaatgagatacaggatctccagacgaaaatgagacgacgaaaggcatgtaccataagctaaagaccagagccttcctgtcacccctaaccaaggcataattgaaacaattttagaatttggaacaagcgtcactacatttgataataattagatcttgcatcataacaccaaaagtttataaaggcatgtggtacaatgatcaaaatcatgttttttcttaaaaaaaaaaaaagactgtaaattgtgcaacaaagatgcatttacctctgtatcaactcaggaaatctcataagctggtaccactcaggagaagtttattcttccagatgaccagcagtagacaaatggatactgagcagagtcttaggtaaaagtcttgggaaatatttgggcattggtctggccaagtctacaatgtcccaatatcaaggacaaccaccctagcttcttagtgaagacaatgtacagttatccattagatcaagactacacggtctatgagcaataatgtgatttctggacattgcccatgtataatcctcactgatgatttcaagctaaagcaaaccaccttatacagagatctagaatctctttatgttctccagaggaaggtggaagaaaccatgggcaggagtaggaattgagtgataaacaattgggctaatgaagaaaacttctcttattgttcagttcatccagattataacttcaatgggacactttagaccattagacaattgacactggattaaacaaattcacataatgccaaatacacaatgtatttatagcaacgtataatttgcaaagatggactttaaaagatgctgtgtaactaaactgaaataattcaattacttattatttagaatgttaaagcttatgatagtcttttctaattcttaacactcatacttgaaatctttctgagtttccccagaagagaatatgggattttttttgacatttttgactcatttaataatgctcttgtgtttacctagtatatgtagactttgtcttatgtgtcaaaagtcctaggaaagtggttgatgtttcttatagcaattaaaaattatttttgaactgaaaatacaatgtatttcactaggcttcttatttctgattttcttttttgcagttatttttatcagaaaataaggttttactctttatagcaatggctggtaatcttttctgtaaaataccagatagtaacgatttatggctttgcaggtcatacagtctctgtctgaattactcagctctgcatgtagtgcaaacgcagccatagaaaatacataaaccaataggtgtggctatgttccaatcaatttttactttcaataacaggatggcacccataagccatagtttgcagaactctgttttacagaaacattggtcagagttttatatacctgcattgtgttactcacatgtataaaaatcatatggattagactatatatattacaatcttgaaaaaactatgcggttattcaaaataacacagtgagaaaaaagcaaggaagcagctaatgccattaaatccacattaataatcctgtctttcctaattgctttgaggccttttgttaccttgaactacctgtgatccaatcacacggcaaatgcctcctttcacaatagagcatggtgctgccaagcactgtttcttcacttgaactgaaactttatagaagaccaggtgagaacacagaatactagatgaaatgttcatgtagatatgctttatattttcttccaagctccattgctacaaaggtgtaaataaaatacatttttatgagttgaagtaacttcacagtagaaaagaataactctgccattaaaagcaaataatggtttctttgtaaaccaataaagtataagaaaatgaaaaatcagcaaaatt

SEQ ID NO: 427938 - DNA, 3683 bp, Homo sapiens
ccagtgtgtataggtgcggcctggtgtatattcgtgcgacgggggcgtgcgtgtgatttgaacgaagtactttcagtttcatattactctaaatccattacaaatctgcttagcttctaaatatttcatcaatgaggaaatcccagccctacaacttcggaacagtgaaatattagtccagggatccagtgagagacacagaagtgctagaagccagtgctcgtgaactaaggagaaaaagaacagacaagggaacagcctggacatggcatcagagatccacatgacaggcccaatgtgcctcattgagaacactaatgggcgactgatggcgaatccagaagctctgaagatcctttctgccattacacagcctatggtggtggtggcaattgtgggcctctaccgcacaggcaaatcctacctgatgaacaagctggctggaaagaaaaagggcttctctctgggctccacggtgcagtctcacactaaaggaatctggatgtggtgtgtgccccaccccaagaagccaggccacatcctagttctgctggacaccgagggtctgggagatgtagagaagggtgacaaccagaatgactcctggatcttcgccctggccgtcctcctgagcagcaccttcgtgtacaatagcataggaaccatcaaccagcaggctatggaccaactgtactatgtgacagagctgacacatagaatccgatcaaaatcctcacctgatgagaatgagaatgaggttgaggattcagctgactttgtgagcttcttcccagactttgtgtggacactgagagatttctccctggacttggaagcagatggacaacccctcacaccagatgagtacctgacatactccctgaagctgaagaaaggtaacagagagcttcaactgataaatgaggatgagaaaacacaagaaattatcatttttcagtttactattgctagttttccagcatttgcagttttctatgtcttcagctggctattcctagaaattaatacttgctgaatatccaaattaatagatgttattttaaattacatttgtcattgttctagaacaagtttcttgttctttcacctttgtgtatgctgtgattaggttaattttatctccctgcctagggtttgtgatcttctacttagccatagagtatggagtacaatggatatttatttaaagaacatagactaaaacatgaaccgtgtgctagtccaagcattggcaaactacagcccaagacaaatcatggcaaatcctgcctgccagctgtctttgtaaataaggtttttttggaataatgctatgcccattcatttacatgttgtctaaagctgttgtcatgcttcaataacagagttgaatacttggaaaagagaccatccagcctgaagagcctaaaatatttactatttggccctttacagaaacacttatattaggcaattttataattttttaaatgtttttctaggtaccagtcaaaaagatgaaacttttaacctgcccagactctgtatccggaaattcttcccaaagaaaaaatgctttgtctttgatcggcccgttcaccgcaggaagcttgcccagctcgagaaactacaagatgaagagctggaccccgaatttgtgcaacaagtagcagacttctgttcctacatctttagtaattccaaaactaaaactctttcaggaggcatccaggtcaacgggcctcgtctagagagcctggtgctgacctacgtcaatgccatcagcagtggggatctgccgtgcatggagaacgcagtcctggccttggcccagatagagaactcagctgcagtgcaaaaggctattgcccactatgaacagcagatgggccagaaggtgcagctgcccacagaaagcctccaggagctgctggacctgcacagggacagtgagagagaggccattgaagtcttcatcaggagttccttcaaagatgtggaccatctatttcaaaaggagttagcggcccagctagaaaaaaagcgggatgacttttgtaaacagaatcaggaagcatcatcagatcgttgctcaggtttacttcaggtcattttcagtcctctagaagaagaagtgaaggcgggaatttattcgaaaccagggggctatcgtctctttgttcagaagctacaagacctgaagaaaaagtactatgaggaaccgaggaaggggatacaggctgaagagattctgcagacatacttgaaatccaaggagtctatgactgatgcaattctccagacagaccagactctcacagaaaaagaaaaggagattgaagtggaacgtgtgaaagctgagtctgcacaggcttcagcaaaaatgttgcaggaaatgcaaagaaagaatgagcagatgatggaacagaaggagaggagttatcaggaacacttgaaacaactgactgagaagatggagaacgacagggtccagttgctgaaagagcaagagaggaccctcgctcttaaacttcaggaacaggagcaactactaaaagagggatttcaaaaagaaagcagaataatgaaaaatgagatacaggatctccagacgaaaatgagacgacgaaaggcatgtaccataagctaaagaccagagccttcctgtcacccctaaccaaggcataattgaaacaattttagaatttggaacaagcgtcactacatttgataataattagatcttgcatcataacaccaaaagtttataaaggcatgtggtacaatgatcaaaatcatgttttttcttaaaaaaaaaaaaagactgtaaattgtgcaacaaagatgcatttacctctgtatcaactcaggaaatctcataagctggtaccactcaggagaagtttattcttccagatgaccagcagtagacaaatggatactgagcagagtcttaggtaaaagtcttgggaaatatttgggcattggtctggccaagtctacaatgtcccaatatcaaggacaaccaccctagcttcttagtgaagacaatgtacagttatccattagatcaagactacacggtctatgagcaataatgtgatttctggacattgcccatgtataatcctcactgatgatttcaagctaaagcaaaccaccttatacagagatctagaatctctttatgttctccagaggaaggtggaagaaaccatgggcaggagtaggaattgagtgataaacaattgggctaatgaagaaaacttctcttattgttcagttcatccagattataacttcaatgggacactttagaccattagacaattgacactggattaaacaaattcacataatgccaaatacacaatgtatttatagcaacgtataatttgcaaagatggactttaaaagatgctgtgtaactaaactgaaataattcaattacttattatttagaatgttaaagcttatgatagtcttttctaattcttaacactcatacttgaaatctttctgagtttccccagaagagaatatgggattttttttgacatttttgactcatttaataatgctcttgtgtttacctagtatatgtagactttgtcttatgtgtcaaaagtcctaggaaagtggttgatgtttcttatagcaattaaaaattatttttgaactga

SEQ ID NO: 427939 - DNA, 3304 bp, Homo sapiens
ccagtgtgtataggtgcggcctggtgtatattcgtgcgacgggggcgtgcgtgtgatttgaacgaagtactttcagtttcatattactctaaatccattacaaatctgcttagcttctaaatatttcatcaatgaggaaatcccagccctacaacttcggaacagtgaaatattagtccagggatccagtgagagacacagaagtgctagaagccagtgctcgtgaactaaggagaaaaagaacagacaagggaacagcctggacatggcatcagagatccacatgacaggcccaatgtgcctcattgagaacactaatgggcgactgatggcgaatccagaagctctgaagatcctttctgccattacacagcctatggtggtggtggcaattgtgggcctctaccgcacaggcaaatcctacctgatgaacaagctggctggaaagaaaaagggatgtggtgtgtgccccaccccaagaagccaggccacatcctagttctgctggacaccgagggtctgggagatgtagagaagggtgacaaccagaatgactcctggatcttcgccctggccgtcctcctgagcagcaccttcgtgtacaatagcataggaaccatcaaccagcaggctatggaccaactgtagtatccttttgtgacccagaacagcaccaaggtcagaggggacacctgtattcatacaccagctgcctgactgtgaatcctgatgaatcaagctcaaaaggagaaaacaaaaaataatgcaagtacagaggagagatcccatgtatccactttagaactgacactgacacttaggttaggagcaaaggaaaatggaaggtttgggtatgtgttgaactaacatgggatgaggtccctgttcattttgtcacatttccttagttagctactcagctatgtgacagagctgacacatagaatccgatcaaaatcctcacctgatgagaatgagaatgaggttgaggattcagctgactttgtgagcttcttcccagactttgtgtggacactgagagatttctccctggacttggaagcagatggacaacccctcacaccagatgagtacctgacatactccctgaagctgaagaaaggtaccagtcaaaaagatgaaacttttaacctgcccagactctgtatccggaaattcttcccaaagaaaaaatgctttgtctttgatcggcccgttcaccgcaggaagcttgcccagctcgagaaactacaagatgaagagctggaccccgaatttgtgcaacaagtagcagacttctgttcctacatctttagtaattccaaaactaaaactctttcaggaggcatccaggtcaacgggcctcgtctagagagcctggtgctgacctacgtcaatgccatcagcagtggggatctgccgtgcatggagaacgcagtcctggccttggcccagatagagaactcagctgcagtgcaaaaggctattgcccactatgaacagcagatgggccagaaggtgcagctgcccacagaaagcctccaggagctgctggacctgcacagggacagtgagagagaggccattgaagtcttcatcaggagttccttcaaagatgtggaccatctatttcaaaaggagttagcggcccagctagaaaaaaagcgggatgacttttgtaaacagaatcaggaagcatcatcagatcgttgctcaggtttacttcaggtcattttcagtcctctagaagaagaagtgaaggcgggaatttattcgaaaccagggggctatcgtctctttgttcagaagctacaagacctgaagaaaaagtactatgaggaaccgaggaaggggatacaggctgaagagattctgcagacatacttgaaatccaaggagtctatgactgatgcaattctccagacagaccagactctcacagaaaaagaaaaggagattgaagtggaacgtgtgaaagctgagtctgcacaggcttcagcaaaaatgttgcaggaaatgcaaagaaagaatgagcagatgatggaacagaaggagaggagttatcaggaacacttgaaacaactgactgagaagatggagaacgacagggtccagttgctgaaagagcaagagaggaccctcgctcttaaacttcaggaacaggagcaactactaaaagagggatttcaaaaagaaagcagaataatgaaaaatgagatacaggatctccagacgaaaatgagacgacgaaaggcatgtaccataagctaaagaccagagccttcctgtcacccctaaccaaggcataattgaaacaattttagaatttggaacaagcgtcactacatttgataataattagatcttgcatcataacaccaaaagtttataaaggcatgtggtacaatgatcaaaatcatgttttttcttaaaaaaaaaaaaagactgtaaattgtgcaacaaagatgcatttacctctgtatcaactcaggaaatctcataagctggtaccactcaggagaagtttattcttccagatgaccagcagtagacaaatggatactgagcagagtcttaggtaaaagtcttgggaaatatttgggcattggtctggccaagtctacaatgtcccaatatcaaggacaaccaccctagcttcttagtgaagacaatgtacagttatccattagatcaagactacacggtctatgagcaataatgtgatttctggacattgcccatgtataatcctcactgatgatttcaagctaaagcaaaccaccttatacagagatctagaatctctttatgttctccagaggaaggtggaagaaaccatgggcaggagtaggaattgagtgataaacaattgggctaatgaagaaaacttctcttattgttcagttcatccagattataacttcaatgggacactttagaccattagacaattgacactggattaaacaaattcacataatgccaaatacacaatgtatttatagcaacgtataatttgcaaagatggactttaaaagatgctgtgtaactaaactgaaataattcaattacttattatttagaatgttaaagcttatgatagtcttttctaattcttaacactcatacttgaaatctttctgagtttccccagaagagaatatgggattttttttgacatttttgactcatttaataatgctcttgtgtttacctagtatatgtagactttgtcttatgtgtcaaaagtcctaggaaagtggttgatgtttcttatagcaattaaaaattatttttgaactga

SEQ ID NO: 427940 - DNA, 3028 bp, Homo sapiens
ccagtgtgtataggtgcggcctggtgtatattcgtgcgacgggggcgtgcgtgtgatttgaacgaagtactttcagtttcatattactctaaatccattacaaatctgcttagcttctaaatatttcatcaatgaggaaatcccagccctacaacttcggaacagtgaaatattagtccagggatccagtgagagacacagaagtgctagaagccagtgctcgtgaactaaggagaaaaagaacagacaagggaacagcctggacatggcatcagagatccacatgacaggcccaatgtgcctcattgagaacactaatgggcgactgatggcgaatccagaagctctgaagatcctttctgccattacacagcctatggtggtggtggcaattgtgggcctctaccgcacaggcaaatcctacctgatgaacaagctggctggaaagaaaaagggcttctctctgggctccacggtgcagtctcacactaaaggaatctggatgtggtgtgtgccccaccccaagaagccaggccacatcctagttctgctggacaccgagggtctgggagatgtagagaagggtgacaaccagaatgactcctggatcttcgccctggccgtcctcctgagcagcaccttcgtgtacaatagcataggaaccatcaaccagcaggctatggaccaactgtactatgtgacagagctgacacatagaatccgatcaaaatcctcacctgatgagaatgagaatgaggttgaggattcagctgactttgtgagcttcttcccagactttgtgtggacactgagagatttctccctggacttggaagcagatggacaacccctcacaccagatgagtacctgacatactccctgaagctgaagaaaggtaccagtcaaaaagatgaaacttttaacctgcccagactctgtatccggaaattcttcccaaagaaaaaatgctttgtctttgatcggcccgttcaccgcaggaagcttgcccagctcgagaaactacaagatgaagagctggaccccgaatttgtgcaacaagtagcagacttctgttcctacatctttagtaattccaaaactaaaactctttcaggaggcatccaggtcaacgggcctcgtctagagagcctggtgctgacctacgtcaatgccatcagcagtggggatctgccgtgcatggagaacgcagtcctggccttggcccagatagagaactcagctgcagtgcaaaaggctattgcccactatgaacagcagatgggccagaaggtgcagctgcccacagaaagcctccaggagctgctggacctgcacagggacagtgagagagaggccattgaagtcttcatcaggagttccttcaaagatgtggaccatctatttcaaaaggagttagcggcccagctagaaaaaaagcgggatgacttttgtaaacagaatcaggaagcatcatcagatcgttgctcaggtttacttcaggtcattttcagtcctctagaagaagaagtgaaggcgggaatttattcgaaaccagggggctatcgtctctttgttcagaagctacaagacctgaagaaaaagtactatgaggaaccgaggaaggggatacaggctgaagagattctgcagacatacttgaaatccaaggagtctatgactgatgcaattctccagacagaccagactctcacagaaaaagaaaaggagattgaagtggaacgtgtgaaagctgagtctgcacaggcttcagcaaaaataggagttatcaggaacacttgaaacaactgactgagaagatggagaacgacagggtccagttgctgaaagagcaagagaggaccctcgctcttaaacttcaggaacaggagcaactactaaaagagggatttcaaaaagaaagcagaataatgaaaaatgagatacaggatctccagacgaaaatgagacgacgaaaggcatgtaccataagctaaagaccagagccttcctgtcacccctaaccaaggcataattgaaacaattttagaatttggaacaagcgtcactacatttgataataattagatcttgcatcataacaccaaaagtttataaaggcatgtggtacaatgatcaaaatcatgttttttcttaaaaaaaaaaaaagactgtaaattgtgcaacaaagatgcatttacctctgtatcaactcaggaaatctcataagctggtaccactcaggagaagtttattcttccagatgaccagcagtagacaaatggatactgagcagagtcttaggtaaaagtcttgggaaatatttgggcattggtctggccaagtctacaatgtcccaatatcaaggacaaccaccctagcttcttagtgaagacaatgtacagttatccattagatcaagactacacggtctatgagcaataatgtgatttctggacattgcccatgtataatcctcactgatgatttcaagctaaagcaaaccaccttatacagagatctagaatctctttatgttctccagaggaaggtggaagaaaccatgggcaggagtaggaattgagtgataaacaattgggctaatgaagaaaacttctcttattgttcagttcatccagattataacttcaatgggacactttagaccattagacaattgacactggattaaacaaattcacataatgccaaatacacaatgtatttatagcaacgtataatttgcaaagatggactttaaaagatgctgtgtaactaaactgaaataattcaattacttattatttagaatgttaaagcttatgatagtcttttctaattcttaacactcatacttgaaatctttctgagtttccccagaagagaatatgggattttttttgacatttttgactcatttaataatgctcttgtgtttacctagtatatgtagactttgtcttatgtgtcaaaagtcctaggaaagtggttgatgtttcttatagcaattaaaaattatttttgaactga

SEQ ID NO: 427941 - DNA, 1325 bp, Homo sapiens
gattccggatcttcagttagcgggggagttgcaggaaatgcaaagaaagaatgagcagatgatggaacagaaggagaggagttatcaggaacacttgaaacaactgactgagaagatggagaacgacagggtccagttgctgaaagagcaagagaggaccctcgctcttaaacttcaggaacaggagcaactactaaaagagggatttcaaaaagaaagcagaataatgaaaaatgagatacaggatctccagacgaaaatgagacgacgaaaggcatgtaccataagctaaagaccagagccttcctgtcacccctaaccaaggcataattgaaacaattttagaatttggaacaagcgtcactacatttgataataattagatcttgcatcataacaccaaaagtttataaaggcatgtggtacaatgatcaaaatcatgttttttcttaaaaaaaaaaaaagactgtaaattgtgcaacaaagatgcatttacctctgtatcaactcaggaaatctcataagctggtaccactcaggagaagtttattcttccagatgaccagcagtagacaaatggatactgagcagagtcttaggtaaaagtcttgggaaatatttgggcattggtctggccaagtctacaatgtcccaatatcaaggacaaccaccctagcttcttagtgaagacaatgtacagttatccattagatcaagactacacggtctatgagcaataatgtgatttctggacattgcccatgtataatcctcactgatgatttcaagctaaagcaaaccaccttatacagagatctagaatctctttatgttctccagaggaaggtggaagaaaccatgggcaggagtaggaattgagtgataaacaattgggctaatgaagaaaacttctcttattgttcagttcatccagattataacttcaatgggacactttagaccattagacaattgacactggattaaacaaattcacataatgccaaatacacaatgtatttatagcaacgtataatttgcaaagatggactttaaaagatgctgtgtaactaaactgaaataattcaattacttattatttagaatgttaaagcttatgatagtcttttctaattcttaacactcatacttgaaatctttctgagtttccccagaagagaatatgggattttttttgacatttttgactcatttaataatgctcttgtgtttacctagtatatgtagactttgtcttatgtgtcaaaagtcctaggaaagtggttgatgtttcttatagcaattaaaaattatttttgaactga

SEQ ID NO: 427942 - DNA, 1151 bp, Homo sapiens
ccagtgtgtataggtgcggcctggtgtatattcgtgcgacgggggcgtgcgtgtgatttgaacgaagtactttcagtttcatattactctaaatccattacaaatctgcttagcttctaaatatttcatcaatgaggaaatcccagccctacaacttcggaacagtgaaatattagtccagggatccagtgagagacacagaagtgctagaagccagtgctcgtgaactaaggagaaaaagaacagacaagggaacagcctggacatggcatcagagatccacatgacaggcccaatgtgcctcattgagaacactaatgggcgactgatggcgaatccagaagctctgaagatcctttctgccattacacagcctatggtggtggtggcaattgtgggcctctaccgcacaggcaaatcctacctgatgaacaagctggctggaaagaaaaagggcttctctctgggctccacggtgcagtctcacactaaaggaatctggatgtggtgtgtgccccaccccaagaagccaggccacatcctagttctgctggacaccgagggtctgggagatgtagagaagggtgacaaccagaatgactcctggatcttcgccctggccgtcctcctgagcagcaccttcgtgtacaatagcataggaaccatcaaccagcaggctatggaccaactgtactatgtgacagagctgacacatagaatccgatcaaaatcctcacctgatgagaatgagaatgaggttgaggattcagctgactttgtgagcttcttcccagactttgtgtggacactgagagatttctccattacagaaagcgcttttgaacaatactgcaataaaataaactaaatggatgactcttttttattggaatagtgtcatttgtttcatacatattgatcaaatgcttactatgaatagactgaagatacagatataaatgaaatagatatggttcctgtcctaatgttggttggggttaaaatggatgcaaacattcaattaacacaagtctatgtaatctagtacaagaactctcaaatgttggtatgcatacatatcttctgaggatcttaccaaacacaaaagtctaattcaatagatctcggacagggtctgagagtctatttcc

SEQ ID NO: 427943 - DNA, 1841 bp, Homo sapiens
gccttacgctttgcggctgtcgtcggagaggcatctgggttcggactggggccgccatggggaaagtgaatgtggccaagttgcgttacatgagccgagatgacttcagggtcttgaccgcggttgaaatgggcatgaagaaccatgaaattgttcccggcagtttgattgcttctatagccagccttaaacatggtggctgtaataaagttttaagagaattagtgaaacataaactcatagcttgggagcgtaccaaaactgtccagggctatcggttgacaaatgcaggatatgattacctagctttgaaaacactttcttctaggcaagtagttgagtctgttggaaaccagatgggtgttggcaaagaatcagatatttacattgttgcaaatgaagaaggacaacaatttgcattaaagcttcacagactaggaagaacctcgtttcgaaatttgaaaaacaaacgcgattatcataaacataggcacaatgtgtcttggctttatttatctcgtctctctgccatgaaggaatttgcctatatgaaggcattgtatgagaggaaatttccagttccaaagccaattgattacaatcgtcatgcagtggtcatggaactcataaatggttatccactatgtcagatacaccatgttgaagatcctgcatcagtatatgatgaagctatggaactaattgtcaaacttgcaaatcatgggctgattcatggagattttaatgaatttaatctcattttggatgaaagtgaccatatcaccatgattgattttccacagatggtttcaacttctcatcccaatgctgagtggtattttgacagagatgttaaatgcattaaagatttctttatgaaacgtttcagctacgaaagtgagctttttccaacttttaaggatatcaggagagaagacactcttgatgtggaggtttctgccagtggctacacaaaggaaatgcaggcagatgatgaactgcttcatccattaggtccagatgataaaaatattgaaacaaaagagggatctgaattctcattttcagatggagaagtggcagaaaaagcagaggtttacaggtcagaaaatgaaagtgaacggaactgtctagaagaatcagagggctgctattgcagatcatctggagaccctgaacaaataaaggaagacagtttatcagaagagagtgctgatgcacggagttttgaaatgactgaattcaatcaagctttagaagaaataaaagggcaggttgttgaaaacaactctgtaactgaattttctgaggagaaaaacagaactgaaaattacaacaggcaagatggtcagagagttcaaggaggagtccctgctggctctgacgagtatgaagatgaatgccctcatctaattgccttgtcgtcattaaatagagaattcaggcctttcagagatgaagaaaatgtgggagctatgaatcagtatagaacaagaactctgagtatcacttcttcaggcagtgctgtaagctgttcaacaattcctccagaactggtgaaacagaaggtgaaacgtcagttgacaaaacagcaaaaatcagctgtcagacgtcgattgcagaaaggagaagcaaatatatttaccaagcaacgtagggaaaacatgcaaaatatcaaatcaagtttggaagcagctagcttttggggagaataatatatttaggatcttggatatgtttaatatattttttaaagttactgtaattcctttttgagccctcatttgtcttttttgagccaaggctatcatatattaataaataaaccctctttcatctat

SEQ ID NO: 427944 - DNA, 486 bp, Homo sapiens
gccttacgctttgcggctgtcgtcggagaggcatctgggttcggactggggccgccatggggaaagtgaatgtggccaagttgcgttacatgagccgagatgacttcagggtcttgaccgcggttgaaatgggcatgaagaaccatgaaattgttcccggcagtttgattgcttctatagccagccttaaacatggtggctgtaataaagttttaagagaattagtgaaacataaactcatagcttgggagcgtaccaaaagtaagtattttgaggcaccatttgtgatttttcaggtaattggtttccaccagagcaagtgttccaaaagtcaagaagtagaagttgccagactagtaaagcattagacgaagaactgacagaacacacttcggccatatcctattagtcaaaataatcacagggcacacccagatcaaaggaggtgaaaaaagaatagtagtaagaacatgtaggtactgcaga

SEQ ID NO: 427945 - DNA, 3142 bp, Homo sapiens
ggatacgatttgacgcgtctcccccacagatagtttcaacttctcatcccaatgctgagtggtattttgacagagatgttaaatgcattaaagatttctttatgaaacgtttcagctacgaaagtgagctttttccaacttttaaggatatcaggagagaagacactcttgatgtggaggtttctgccagtggctacacaaaggaaatgcaggcagatgatgaactgcttcatccattaggtccagatgataaaaatattgaaacaaaagagggatctgaattctcattttcagatggagaagtggcagaaaaagcagaggtttacaggtcagaaaatgaaagtgaacggaactgtctagaagaatcagagggctgctattgcagatcatctggagaccctgaacaaataaaggaagacagtttatcagaagagagtgctgatgcacggagttttgaaatgactgaattcaatcaagctttagaagaaataaaagggcaggttgttgaaaacaactctgtaactgaattttctgaggagaaaaacagaactgaaaattacaacaggcaagatggtcagagagttcaaggaggagtccctgctggctctgacgagtatgaagatgaatgccctcatctaattgccttgtcgtcattaaatagagaattcaggcctttcagagatgaagaaaatgtgggagctatgaatcagtatagaacaagaactctgagtatcacttcttcaggcagtgctgtaagctgttcaacaattcctccagaactggtgaaacagaaggtgaaacgtcagttgacaaaacagcaaaaatcagctgtcagacgtcgattgcagaaaggagaagcaaatatatttaccaagcaacgtagggaaaacatgcaaaatatcaaatcaagtttggaagcagctagcttttggggagaataatatatttaggatcttggatatgtttaatatattttttaaagttactgtaattcctttttgagccctcatttgtcttttttgagccaaggctatcatatattaataaataaaccctctttcatctataaatttggtcattcagtatgtgtcttgcaaagaataattacctgccaaagcagtccatttttttcaaagtaatttgggtaactacagttacgtaactttattagagacatttgcatatttttaaaaatctaaataacatttttgttgttttctgtttgttgaggatgatatgctacaatgcacataaagcaattagaacaatgtttagcacattcttaagcattcaataaaacatggctattagaatcataatgattctgaaattctgctgacaatttggttgcattttatttggcaactggaggacttcactgtcttatttttctttagaagtaaagataagcctttggaagtaaagataagccagtgatgcacaatttgcttaattaattgattaataatctgttttgtgccacttacattggtaatgtggtcatgagaatggaaacttacttgagatagtctaccacaatttttacagttggcagcttgtaagcaggcctgagtagcagaagagttaggggttggggaaggtggagtagaatgaggaatgaaatgttctttctcatatgcttattatataagtgggtccggaacatgttctcacctcaaggttaacaaatacctaatgcaggaaagaaaatacatagccatggtcccttcctcaaggactttataattcagtgagatgtaaagatgagtgcttaagtgtatgcacctgattattgtctcttcattgccgcataagtcggaaaaggggatcacttgcagcgaaaaatggccactagatggcaatatcaccccatagtcaccaaacaggattacttgcatccctaattatgttctaccagagggaatatagtacagacttttccaagattgataaagacagcagattccctttcacctttgccaaattaactctactagctatttgcaagacctgtaattatctaataaattggcttaaatatatagaagctagaaaatgccaattcctcttccctcaaaagttacctgacattcaaatatttaaatacccttgctttgcattttagatatatctttgaattcaggtattcattttgtataatctctcaacttttaagcatttttataatgtaaagttgaaaacagcttaatagaaccacagaatgtttattttggagtcattttcttatattcagagctatgaaagcaaattgggaataaagccttatcctgctcagctttacctagttgactcagttgacttttgagtatctactacataaaaagcccattactattaagaaactcaagacaaacatgatttttacctttaatagcctaagatttcttgtgggccaaggaattaattattccaatcagaaatggaggccttacctcatttgggcaaagattagtgctagttattgaagatttactaataaatgatctgttaaggaatttagttttttttggatatgttgttttggttgttgaaaactaaggtataattataatagttatttttgaagatatgtttggctagccatcaattagaagttagagagtttgtcctaacagataagctataaccctcacattttaaaacatgcatagtgaacaatgaacaaaaacaaattcaaaattttactaatgtaaagctgtatattgtgattgttaaaacacttttttttgcctaggagttccagatttaaatcctggttctacacttcccaaacctcaggtaccttctgtggcctctctaacctcaatttttttacttgtaaaatggggacatttaatagtatctacctcagtgtcgtgaagactaaatgaagtaccacttgtaaagagtttattacagtgcctgacatatactgtatggttagtactgctaaaatgacttcttaaggttaccaaaaggaaaattccacaagctgaccacctttcctattgtgatggtcactggtatttcagctatgatcctttgttgtgtatttatccagactgaaagatgtttttctagtaaccatcttgcatcgtcttagtctccccattaaataaacttttcctacaaaaaaaaaaaa

SEQ ID NO: 427946 - DNA, 3916 bp, Homo sapiens
gccttacgctttgcggctgtcgtcggagaggcatctgggttcggactggggccgccatggggaaagtgaatgtggccaagttgcgttacatgagccgagatgacttcagggtcttgaccgcggttgaaatgggcatgaagaaccatgaaattgttcccggcagtttgattgcttctatagccagccttaaacatggtggctgtaataaagttttaagagaattagtgaaacataaactcatagcttgggagcgtaccaaaactgtccagggctatcggttgacaaatgcaggatatgattacctagctttgaaaacactttcttctaggcaagtagttgagtctgttggaaaccagatgggtgttggcaaagaatcagatatttacattgttgcaaatgaagaaggacaacaatttgcattaaagcttcacagactaggaagaacctcgtttcgaaatttgaaaaacaaacgcgattatcataaacataggcacaatgtgtcttggctttatttatctcgtctctctgccatgaaggaatttgcctatatgaaggcattgtatgagaggaaatttccagttccaaagccaattgattacaatcgtcatgcagtggtcatggaactcataaatggttatccactatgtcagatacaccatgttgaagatcctgcatcagtatatgatgaagctatggaactaattgtcaaacttgcaaatcatgggctgattcatggagattttaatgaatttaatctcattttggatgaaagtgaccatatcaccatgattgattttccacagatggtttcaacttctcatcccaatgctgagtggtattttgacagagatgttaaatgcattaaagatttctttatgaaacgtttcagctacgaaagtgagctttttccaacttttaaggatatcaggagagaagacactcttgatgtggaggtttctgccagtggctacacaaaggaaatgcaggcagatgatgaactgcttcatccattaggtccagatgataaaaatattgaaacaaaagagggatctgaattctcattttcagatggagaagtggcagaaaaagcagaggtttacaggtcagaaaatgaaagtgaacggaactgtctagaagaatcagagggctgctattgcagatcatctggagaccctgaacaaataaaggaagacagtttatcagaagagagtgctgatgcacggagttttgaaatgactgaattcaatcaagctttagaagaaataaaagggcaggttgttgaaaacaactctgtaactgaattttctgaggagaaaaacagaactgaaaattacaacaggcaagatggtcagagagttcaaggaggagtccctgctggctctgacgagtatgaagatgaatgccctcatctaattgccttgtcgtcattaaatagagaattcaggcctttcagagatgaagaaaatgtgggagctatgaatcagtatagaacaagaactctgagtatcacttcttcaggcagtgctgtaagctgttcaacaattcctccagaactggtgaaacagaaggtgaaacgtcagttgacaaaacagcaaaaatcagctgtcagacgtcgattgcagaaaggagaagcaaatatatttaccaagcaacgtagggaaaacatgcaaaatatcaaatcaagtttggaagcagctagcttttggggagaataatatatttaggatcttggatatgtttaatatattttttaaagttactgtaattcctttttgagccctcatttgtcttttttgagccaaggctatcatatattaataaataaaccctctttcatctataaatttggtcattcagtatgtgtcttgcaaagaataattacctgccaaagcagtccatttttttcaaagtaatttgggtaactacagttacgtaactttattagagacatttgcatatttttaaaaatctaaataacatttttgttgttttctgtttgttgaggatgatatgctacaatgcacataaagcaattagaacaatgtttagcacattcttaagcattcaataaaacatggctattagaatcataatgattctgaaattctgctgacaatttggttgcattttatttggcaactggaggacttcactgtcttatttttctttagaagtaaagataagcctttggaagtaaagataagccagtgatgcacaatttgcttaattaattgattaataatctgttttgtgccacttacattggtaatgtggtcatgagaatggaaacttacttgagatagtctaccacaatttttacagttggcagcttgtaagcaggcctgagtagcagaagagttaggggttggggaaggtggagtagaatgaggaatgaaatgttctttctcatatgcttattatataagtgggtccggaacatgttctcacctcaaggttaacaaatacctaatgcaggaaagaaaatacatagccatggtcccttcctcaaggactttataattcagtgagatgtaaagatgagtgcttaagtgtatgcacctgattattgtctcttcattgccgcataagtcggaaaaggggatcacttgcagcgaaaaatggccactagatggcaatatcaccccatagtcaccaaacaggattacttgcatccctaattatgttctaccagagggaatatagtacagacttttccaagattgataaagacagcagattccctttcacctttgccaaattaactctactagctatttgcaagacctgtaattatctaataaattggcttaaatatatagaagctagaaaatgccaattcctcttccctcaaaagttacctgacattcaaatatttaaatacccttgctttgcattttagatatatctttgaattcaggtattcattttgtataatctctcaacttttaagcatttttataatgtaaagttgaaaacagcttaatagaaccacagaatgtttattttggagtcattttcttatattcagagctatgaaagcaaattgggaataaagccttatcctgctcagctttacctagttgactcagttgacttttgagtatctactacataaaaagcccattactattaagaaactcaagacaaacatgatttttacctttaatagcctaagatttcttgtgggccaaggaattaattattccaatcagaaatggaggccttacctcatttgggcaaagattagtgctagttattgaagatttactaataaatgatctgttaaggaatttagttttttttggatatgttgttttggttgttgaaaactaaggtataattataatagttatttttgaagatatgtttggctagccatcaattagaagttagagagtttgtcctaacagataagctataaccctcacattttaaaacatgcatagtgaacaatgaacaaaaacaaattcaaaattttactaatgtaaagctgtatattgtgattgttaaaacacttttttttgcctaggagttccagatttaaatcctggttctacacttcccaaacctcaggtaccttctgtggcctctctaacctcaatttttttacttgtaaaatggggacatttaatagtatctacctcagtgtcgtgaagactaaatgaagtaccacttgtaaagagtttattacagtgcctgacatatactgtatggttagtactgctaaaatgacttcttaaggttaccaaaaggaaaattccacaagctgaccacctttcctattgtgatggtcactggtatttcagctatgatcctttgttgtgtatttatccagactgaaagatgtttttctagtaaccatcttgcatcgtcttagtctccccattaaataaacttttcctacaaaaaaaaaaaa

SEQ ID NO: 427947 - DNA, 908 bp, Homo sapiens
agcagctgcctctgggtggtggcagagatgcccatgtctaggacctccaggccttaactaatcaggggcactgatgaagccagcggggctccactggggaccacaggcaagactgggccaggacgaggcggtcacgcagagaaagaagataaaagggaacagaagagaaaattcaaaaggagcacgggcctccccgggagtgggcttcagcctccctagactcctgtctccttccaagggctaggcctgggggaccagaagcaagagtccctagagcgtccaagatttttggtttcaaaccaatttcctgctgaccagaatgaaatggagccacattccagcacgatgcacctgctgacctcctgcaagtcagggaccttctctgcccctcttttgctctgctgcaggagggagaagctgggaatgtgttcctctggggtcccatcacctccagccagccactgtccctgtctccccaaaacctcctcgttgtccctcctctgtcctcctcctcctccatctgccttcgccctgctctcctctttttcgcctgaggttcgtgctgcctcctcacctcttgtcctgtttctcccttctctctgctccctcctttgatcttgctattttgcttctctttcccttcctctcttctcctccctccccttcctccctgctccctgcctcagcttctcagtctctctccgttcttcctctagcttccttccctccccagaagacccagcccttcctagagccccagaagccagggttcatgccccagctctctacccacacatgctgtgcaaccctgggccagtcactggtctcttgggcctcagttcaacagatggctgtcttggtgatgtgagatcatagggtggaagcacccagaatggtgccaggcactc

SEQ ID NO: 427948 - DNA, 1377 bp, Homo sapiens
ggctggtacggtccggagtgttaggacaatgtcaagggagggggctcacccagggctcctgtagctcagggggcaggcctgagccctgcacccgccccacgaccgtccagcccctgacggggcaccccatcctgaggggctctgcattggcccccaccgaggcaggggatctgaccgactcggagcccggctggatgttacaggcgtgcaaaatggaagggtttcccctcgtcccccctcagccatcagaagacctggtgccctatgacacggatctataccaacgccaaacgcacgagtattacccctatctcagcagtgatggggagagccatagcgaccattactgggacttccacccccaccacgtgcacagcgagttcgagagcttcgccgagaacaacttcacggagctccagagcgtgcagcccccgcagctgcagcagctctaccgccacatggagctggagcagatgcacgtcctcgatacccccatggtgccaccccatcccagtcttggccaccaggtctcctacctgccccggatgtgcctccagtacccatccctgtccccagcccagcccagctcagatgaggaggagggcgagcggcagagccccccactggaggtgtctgacggcgaggcggatggcctggagcccgggcctgggctcctgcctggggagacaggcagcaagaagaagatccgcctgtaccagttcctgttggacctgctccgcagcggcgacatgaaggacagcatctggtgggtggacaaggacaagggcaccttccagttctcgtccaagcacaaggaggcgctggcgcaccgctggggcatccagaagggcaaccgcaagaagatgacctaccagaagatggcgcgcgcgctgcgcaactacggcaagacgggcgaggtcaagaaggtgaagaagaagctcacctaccagttcagcggcgaagtgctgggccgcgggggcctggccgagcggcgccacccgccccactgagcccgcagcccccgccgggccccgccaggcctccccgctggccatagcattaagccctcgcccggcccggacacagggaggacgctcccggggcccagaggcaggactgtggcgggccgggcctcgcctcacccgccccctccccccactccaggccccctccacatcccgcttcgcctccctccaggactccaccccggctcccggacgccagctgggcgtcagaccccaccggggcaaccttgcagaggacgacccggggtactgccttgggagtctcaagtccgtatgtaaatcagatctcccctctcacccctcccacccattaacctcctcccaaaaaacaagtaaagttattctcaatcca

SEQ ID NO: 427949 - DNA, 1421 bp, Homo sapiens
aaaatcaggaacttgtgctggccctgcaatgtcaagggagggggctcacccagggctcctgtagctcagggggcaggcctgagccctgcacccgccccacgaccgtccagcccctgacggggcaccccatcctgaggggctctgcattggcccccaccgaggcaggggatctgaccgactcggagcccggctggatgttacaggcgtgcaaaatggaagggtttcccctcgtcccccctcagccatcagaagacctggtgccctatgacacggatctataccaacgccaaacgcacgagtattacccctatctcagcagtgatggggagagccatagcgaccattactgggacttccacccccaccacgtgcacagcgagttcgagagcttcgccgagaacaacttcacggagctccagagcgtgcagcccccgcagctgcagcagctctaccgccacatggagctggagcagatgcacgtcctcgatacccccatggtgccaccccatcccagtcttggccaccaggtctcctacctgccccggatgtgcctccagtacccatccctgtccccagcccagcccagctcagatgaggaggagggcgagcggcagagccccccactggaggtgtctgacggcgaggcggatggcctggagcccgggcctgggctcctgcctggggagacaggcagcaagaagaagatccgcctgtaccagttcctgttggacctgctccgcagcggcgacatgaaggacagcatctggtgggtggacaaggacaagggcaccttccagttctcgtccaagcacaaggaggcgctggcgcaccgctggggcatccagaagggcaaccgcaagaagatgacctaccagaagatggcgcgcgcgctgcgcaactacggcaagacgggcgaggtcaagaaggtgaagaagaagctcacctaccagttcagcggcgaagtgctgggccgcgggggcctggccgagcggcgccacccgccccactgagcccgcagcccccgccgggccccgccaggcctccccgctggccatagcattaagccctcgcccggcccggacacagggaggacgctcccggggcccagaggcaggactgtggcgggccgggcctcgcctcacccgccccctccccccactccaggccccctccacatcccgcttcgcctccctccaggactccaccccggctcccggacgccagctgggcgtcagaccccaccggggcaaccttgcagaggacgacccggggtactgccttgggagtctcaagtccgtatgtaaatcagatctcccctctcacccctcccacccattaacctcctcccaaaaaacaagtaaagttattctcaatccatcctcttgcagcacagagtctcttttaaaatttgttgtgtatct

SEQ ID NO: 427950 - DNA, 1757 bp, Homo sapiens
agcagctgcctctgggtggtggcagagatgcccatgtctaggacctccaggccttaactaatcaggggcactgatgaagccagcggggctccactggggaccacaggcaagactgggccaggacgaggcggtcacgcagagaaagaagataaaagggaacagaagagaaaattcaaaaggagcacgggcctccccgggagtgggcttcagcctccctagactcctgtctccttccaagggctaggcctgggggaccagaagcaagagtccctagagcgtccaagatttttggtttcaaaccaatttcctgctgaccagaatgaaatggagccacattccagcacgatgcacctgctgacctcctgcccagaccatggaagacactcaataaaaacagaggggactcaccagagatcactgggccagaaaaacaacaacaacaacaacaacaacaaaacaaaaatgcctctactcatccctccaccccccagaaaagatcaggaactctctgaagcaacatggatggaattggaggacattatcatatgcgaaacaacgcagaaacagaaagtcaaatactgcctgttctcatggggctcctggaaaccgaagctgatagcagccatcagaagacctggtgccctatgacacggatctataccaacgccaaacgcacgagtattacccctatctcagcagtgatggggagagccatagcgaccattactgggacttccacccccaccacgtgcacagcgagttcgagagcttcgccgagaacaacttcacggagctccagagcgtgcagcccccgcagctgcagcagctctaccgccacatggagctggagcagatgcacgtcctcgatacccccatggtgccaccccatcccagtcttggccaccaggtctcctacctgccccggatgtgcctccagtacccatccctgtccccagcccagcccagctcagatgaggaggagggcgagcggcagagccccccactggaggtgtctgacggcgaggcggatggcctggagcccgggcctgggctcctgcctggggagacaggcagcaagaagaagatccgcctgtaccagttcctgttggacctgctccgcagcggcgacatgaaggacagcatctggtgggtggacaaggacaagggcaccttccagttctcgtccaagcacaaggaggcgctggcgcaccgctggggcatccagaagggcaaccgcaagaagatgacctaccagaagatggcgcgcgcgctgcgcaactacggcaagacgggcgaggtcaagaaggtgaagaagaagctcacctaccagttcagcggcgaagtgctgggccgcgggggcctggccgagcggcgccacccgccccactgagcccgcagcccccgccgggccccgccaggcctccccgctggccatagcattaagccctcgcccggcccggacacagggaggacgctcccggggcccagaggcaggactgtggcgggccgggcctcgcctcacccgccccctccccccactccaggccccctccacatcccgcttcgcctccctccaggactccaccccggctcccggacgccagctgggcgtcagaccccaccggggcaaccttgcagaggacgacccggggtactgccttgggagtctcaagtccgtatgtaaatcagatctcccctctcacccctcccacccattaacctcctcccaaaaaacaagtaaagttattctcaatcca

SEQ ID NO: 427951 - DNA, 1704 bp, Homo sapiens
aaaatcaggaacttgtgctggccctgcaatgtcaagggagggggctcacccagggctcctgtagctcagggggcaggcctgagccctgcacccgccccacgaccgtccagcccctgacggggcaccccatcctgaggggctctgcattggcccccaccgaggcaggggatctgaccgactcggagcccggctggatgttacaggcgtgcaaaatggaagggtttcccctcgtcccccctcagccatcagaagacctggtgccctatgacacggatctataccaacgccaaacgcacgagtattacccctatctcagcagtgatggggagagccatagcgaccattactgggacttccacccccaccacgtgcacagcgagttcgagagcttcgccgagaacaacttcacggagctccagagcgtgcagcccccgcagctgcagcagctctaccgccacatggagctggagcagatgcacgtcctcgatacccccatggtgccaccccatcccagtcttggccaccaggtctcctacctgccccggatgtgcctccagtacccatccctgtccccagcccagcccagctcagatgaggaggagggcgagcggcagagccccccactggaggtgtctgacggcgaggcggatggcctggagcccgggcctgggctcctgcctggggagacaggtggggcacctggccctccaccctggccccgaccctggccgtgtctgtgccctgaccccacccagccaggccaactgacccagcagccacgccaccgagtcgcgtgtgtgtgtgtgtgcatgtttgccagtgtgtgtgttttgtggggctgtctgtggctgtctctgtgtgtgtgtatctgctgtgtagtgcatacgggcatctccatgaagtgtgccaggtgtgtgtgtctctctgtgccatgagtgtgtgtacatctgggtgtgtgtgagcaagtgtgcagagggtgcgtgtgcacaggtacgggcaggtgcatgtgtgcgagtggctgtgtgagtgggtgtgtgagaaggtgaatgtgagagctggtgtggctgagagtgggtgtggccatgtttgtgtgtctgtcaacacatgaatgtatttcagtgcgtgtgagcagctgtgcacgtatgatgtcagtgggtgtcagcagtgtgtgggtgtgcctgtgtgagcagggatgtgagcatggtatatgtgagtggctgtaagcaggcatgtgtgagtgatatgtgtgagtgggggtgtgacagcaggtgtgtgagcaagtgtatatgtgtgaatgtgtatgtaagcagggatgtgtgtgatataagtgtgtgtgaatgggcataggtgtgtgtcagtggatgtgtgagtgggtgtgaacatgtttgagggtgtatgtaagcaggtgtgtgtgagcaggaaggtgtgagctggggtgtgtgagcatgtatgtgtatatgtgagcaggtttgtgcatgtatgtgagtggatatgtgttttaacatgtgtaagcatgtgtgtgttcccatgtgtgagcaggtgtgtgtggggggtgaggacgtgcttaagcacctgcgtgtgtgagcaggtgtgcatgtgtgtgaacaggtatgtgtatgtgtgaaagcaggtgtgtgaatgagtgtgtgagcatgaatgggtgtgagtgggccgggcgtggtggctcacgcctgtatcccagca

SEQ ID NO: 427952 - DNA, 664 bp, Homo sapiens
aaaatcaggaacttgtgctggccctgcaatgtcaagggagggggctcacccagggctcctgtagctcagggggcaggcctgagccctgcacccgccccacgaccgtccagcccctgacggggcaccccatcctgaggggctctgcattggcccccaccgaggcaggggatctgaccgactcggagcccggctggatgttacaggcgtgcaaaatggaagggtttcccctcgtcccccctcagccatcagaagacctggtgccctatgacacggatctataccaacgccaaacgcacgagtattacccctatctcagcagtgatggggagagccatagcgaccattactgggacttccacccccaccacgtgcacagcgagttcgagagcttcgccgagaacaacttcacggagctccagagcgtgcagcccccgcagctgcagcagctctaccgccacatggagctggagcagatgcacgtcctcgatacccccatggtgccaccccatcccagtcttggccaccaggtctcctacctgccccggatgtgcctccagtacccatccctgtccccagcccagcccagtctctacaaaatgccttgcagccgaggtgtggtggaaagaatattgtatttggaataaaaaatttttgattttgcaaa

SEQ ID NO: 427953 - DNA, 577 bp, Homo sapiens
catggaagacactcaataaaaagtaagtgattaaatgacaacctctacggaaaagagtatggagatttctcaaagaactaaaaacagaactaccttttggccagatgcagtggctcacacctataatcccaacatttgggaaggctgaggcaggtggattgcttgagcccaggagttcaagatcagcctgggcaacatggtgaaaccctatctctacaaaaaatacagaaaattagatgagactacaggtggcacacatccatagtaccagctactccagaggctgaggcgggaggatcgcttgagcccaggaggtccaggctacagtgggccaagatcacgccattgcactccagcctcagtgataaagtggcattctgtctcaaaagaaaaagaactggccaagcatggtggctcacgtctgtaatcccagcactttgggaggccgaggcaggtggatcacatgagatcaggagtttgagactagcctggccaacaatgatgaaaccccatctctactaaaaatacaataattagctgggcgtggtggcgggcgcctgtaatcccagctactcag

SEQ ID NO: 427954 - DNA, 1377 bp, Homo sapiens
aaaatcaggaacttgtgctggccctgcaatgtcaagggagggggctcacccagggctcctgtagctcagggggcaggcctgagccctgcacccgccccacgaccgtccagcccctgacggggcaccccatcctgaggggctctgcattggcccccaccgaggcaggggatctgaccgactcggagcccggctggatgttacaggcgtgcaaaatggaagggtttcccctcgtcccccctcagccatcagaagacctggtgccctatgacacggatctataccaacgccaaacgcacgagtattacccctatctcagcagtgatggggagagccatagcgaccattactgggacttccacccccaccacgtgcacagcgagttcgagagcttcgccgagaacaacttcacggagctccagagcgtgcagcccccgcagctgcagcagctctaccgccacatggagctggagcagatgcacgtcctcgatacccccatggtgccaccccatcccagtcttggccaccaggtctcctacctgccccggatgtgcctccagtacccatccctgtccccagcccagcccagctcagatgaggaggagggcgagcggcagagccccccactggaggtgtctgacggcgaggcggatggcctggagcccgggcctgggctcctgcctggggagacaggcagcaagaagaagatccgcctgtaccagttcctgttggacctgctccgcagcggcgacatgaaggacagcatctggtgggtggacaaggacaagggcaccttccagttctcgtccaagcacaaggaggcgctggcgcaccgctggggcatccagaagggcaaccgcaagaagatgacctaccagaagatggcgcgcgcgctgcgcaactacggcaagacgggcgaggtcaagaaggtgaagaagaagctcacctaccagttcagcggcgaagtgctgggccgcgggggcctggccgagcggcgccacccgccccactgagcccgcagcccccgccgggccccgccaggcctccccgctggccatagcattaagccctcgcccggcccggacacagggaggacgctcccggggcccagaggcaggactgtggcgggccgggcctcgcctcacccgccccctccccccactccaggccccctccacatcccgcttcgcctccctccaggactccaccccggctcccggacgccagctgggcgtcagaccccaccggggcaaccttgcagaggacgacccggggtactgccttgggagtctcaagtccgtatgtaaatcagatctcccctctcacccctcccacccattaacctcctcccaaaaaacaagtaaagttattctcaatcca

SEQ ID NO: 427955 - DNA, 1542 bp, Homo sapiens
cacggagctccagagcgtgcagcccccgcagctgcagcagctctaccgccacatggagctggagcagatgcacgtcctcgatacccccatggtgccaccccatcccagtcttggccaccaggtctcctacctgccccggatgtgcctccagtacccatccctgtcctcatctgagctgggctgggctggggcaatgtcaagggagggggctcacccagggctcctgtagctcagggggcaggcctgagccctgcacccgccccacgaccgtccagcccctgacggggcaccccatcctgaggggctctgcattggcccccaccgaggcaggggatctgaccgactcggagcccggctggatgttacaggcgtgcaaaatggaagggtttcccctcgtcccccctcagccatcagaagacctggtgccctatgacacggatctataccaacgccaaacgcacgagtattacccctatctcagcagtgatggggagagccatagcgaccattactgggacttccacccccaccacgtgcacagcgagttcgagagcttcgccgagaacaacttcacggagctccagagcgtgcagcccccgcagctgcagcagctctaccgccacatggagctggagcagatgcacgtcctcgatacccccatggtgccaccccatcccagtcttggccaccaggtctcctacctgccccggatgtgcctccagtacccatccctgtccccagcccagcccagctcagatgaggaggagggcgagcggcagagccccccactggaggtgtctgacggcgaggcggatggcctggagcccgggcctgggctcctgcctggggagacaggcagcaagaagaagatccgcctgtaccagttcctgttggacctgctccgcagcggcgacatgaaggacagcatctggtgggtggacaaggacaagggcaccttccagttctcgtccaagcacaaggaggcgctggcgcaccgctggggcatccagaagggcaaccgcaagaagatgacctaccagaagatggcgcgcgcgctgcgcaactacggcaagacgggcgaggtcaagaaggtgaagaagaagctcacctaccagttcagcggcgaagtgctgggccgcgggggcctggccgagcggcgccacccgccccactgagcccgcagcccccgccgggccccgccaggcctccccgctggccatagcattaagccctcgcccggcccggacacagggaggacgctcccggggcccagaggcaggactgtggcgggccgggcctcgcctcacccgccccctccccccactccaggccccctccacatcccgcttcgcctccctccaggactccaccccggctcccggacgccagctgggcgtcagaccccaccggggcaaccttgcagaggacgacccggggtactgccttgggagtctcaagtccgtatgtaaatcagatctcccctctcacccctcccacccattaacctcctcccaaaaaacaagtaaagttattctcaatcca

SEQ ID NO: 427956 - DNA, 1056 bp, Homo sapiens
caagggagggggctcacccagggctcctgtagctcagggggcaggcctgagccctgcacccgccccacgaccgtccagcccctgacgggcaccccatcctgaggggctctgcattggcccccaccgaggcaggggatctgaccgactcggagcccggctggatgttacaggcgtgcaaaatggaagggtttcccctcgtcccccctgtctcctacctgccccggatgtgcctccagtacccatccctgtccccagcccagcccagctcagatgaggaggagggcgagcggcagagccccccactggaggtgtctgacggcgaggcggatggcctggagcccgggcctgggctcctgcctggggagacaggcagcaagaagaagatccgcctgtaccagttcctgttggacctgctccgcagcggcgacatgaaggacagcatctggtgggtggacaaggacaagggcaccttccagttctcgtccaagcacaaggaggcgctggcgcaccgctggggcatccagaagggcaaccgcaagaagatgacctaccagaagatggcgcgcgcgctgcgcaactacggcaagacgggcgaggtcaagaaggtgaagaagaagctcacctaccagttcagcggcgaagtgctgggccgcgggggcctggccgagcggcgccacccgccccactgagcccgcagcccccgccgggccccgccaggcctccccgctggccatagcattaagccctcgcccggcccggacacagggaggacgctcccggggcccagaggcaggactgtggcgggccgggcctcgcctcacccgccccctccccccactccaggccccctccacatcccgcttcgcctccctccaggactccaccccggctcccggacgccagctgggcgtcagaccccaccggggcaaccttgcagaggacgacccggggtactgccttgggagtctcaagtccgtatgtaaatcagatctcccctctcacccctcccacccattaacctcctcccaaaaaacaagtaaagttattctcaatcca

SEQ ID NO: 427957 - DNA, 897 bp, Homo sapiens
aaaatcaggaacttgtgctggccctgcaatgtcaagggagggggctcacccagggctcctgtagctcagggggcaggcctgagccctgcacccgccccacgaccgtccagcccctgacggggcaccccatcctgaggggctctgcattggcccccaccgaggcaggggatctgaccgactcggagcccggctggatgttacaggcgtgcaaaatggaagggtttcccctcgtcccccctcagccatcagaagacctggtgccctatgacacggatctataccaacgccaaacgcacgagtattacccctatctcagcagtgatggggagagccatagcgaccattactgggacttccacccccaccacgtgcacagcgagttcgagagcttcgccgagaacaacttcacggagctccagagcgtgcagcccccgcagctgcagcagctctaccgccacatggagctggagcagatgcacgtcctcgatacccccatggtgccaccccatcccagtcttggccaccaggtctcctacctgccccggatgtgcctccagtacccatccctgtccccagcccagcccagaaggacaagggcaccttccagttctcgtccaagcacaaggaggcgctggcgcaccgctggggcatccagaagggcaaccgcaagaagatgacctaccagaagatggcgcatcccgcttcgcctccctccaggactccaccccggctcccggacgccagctgggcgtcagaccccaccggggcaaccttgcagaggacgacccggggtactgccttgggagtctcaagtccgtatgtaaatcagatctcccctctcacccctcccacccattaacctcctcccaaaaaacaagtaaagttattctcaatcca

SEQ ID NO: 427958 - DNA, 557 bp, Homo sapiens
ggctggtacggtccggagtgttaggacaatgtcaagggagggggctcacccagggctcctgtagctcagggggcaggcctgagccctgcacccgccccacgaccgtccagcccctgacggggcaccccatcctgaggggctctgcattggcccccaccgaggcaggggatctgaccgactcggagcccggctggatgttacaggcgtgcaaaatggaagggtttcccctcgtcccccctcagccatcagaagacctggtgccctatgacacggatctataccaacgccaaacgcacgagtattacccctatctcagcagtgatggggagagccatagcggtgagtacggggcctgccacgcccccatcccccagcccagcctgggctcctggggtctggagagagaaaaagaataaatgattcccaggacttctttggaattctgagaatcagatcaagtttgctctcaaaggcagtgaactgcagcatcatcgctgcacccccacacctgagcctccattatggagcctctgcagtgtgtcaaggtgcggggttca

SEQ ID NO: 427959 - DNA, 1659 bp, Homo sapiens
ggcccgcgcgtcccggccgggctgcggcggagcgagcggggccagcgctgcagaaggcggcggctggctctccgggacggtcacatcccgctgcaggggcgggcggaggccgccgcactgcctcccgcaccggggacccaggccagcgtccgggcaacgccccctgctcccggacagactccgtggcccgctcgagccctgggggctccgcagacccgcgcccgctccgcccgcagctcggccccgcgctgcccgcgtcgccgggcccgcgccgggatggggtaggggcagcgccaccgagtcgggcgatgggccgccctctgggcaccgagcagccccccgaggcctgaccaaccgcgaggaccggcggaggagccccgcctggatgtcaagcggatgccaagcggatgccacagttccccccccagcggactccgtggggacatggcttcgctggtgcccctttccccatatctaagccccacggtcctcctgctggtcagctgtgacctgggcttcgtgcgagcagaccggcctccctctcctgtgaatgtgacggtcactcacctcagagccaactcggccactgtgtcctgggacgtcccagaaggcaacatcgtcattggctactccatttcccagcaacggcagaatggccccgggcagcgtgtgattcgggaggtgaacaccaccacccgggcctgtgccctctggggcctggctgaagacagtgactacacagtgcaggtcaggagcatcggccttcggggagagagtcccccagggccccgggtgcacttccgaactctcaagggttctgaccggctaccttcaaacagttcaagcccaggtgacatcacagtggaaggtctggatggagagcggccactgcagactggggaagtggtcatcattgtggtggtgttgctcatgtgggctgctgtaattgggctgttctgccgtcagtatgacatcatcaaggacaatgactccaacaacaatcccaaggagaagggaaaggggccggaacagagtcctcagggaaggccagtggggacaagacagaaaaagtcaccatctatcaacaccatcgacgtttgagtgaagaaacacacccagaagagagatgcactaacaactggggatagggatggggtcagggggagcccaagatggtgatctgcccgagactcccagagggtaatgccactcccacaatctcaggcctggtacccatcctctttccactgtgagcagagccagaaggtaggtctgttcagagtctgtgcccctggacctggggagtggatatcagatgggatatctccttccattccccggtccaggggagagtcactagttgtaccctactccattaggtcccaaatgggggccccatttcacctgtatcaggactctgagcatccccagctgccccacatcttgcctctggccctcagagaggggtgtttctgtgggtactcctcttaccccagcaaataaaaggaattgtctgaccctagaggcagatgctgcactgcactactccaatgtcttccatggagcctcaggtgctccccctctcacctggcagccccttcagctgctagtgatatcacttgttggacatttttccaataaaggttcttggacaaactg

SEQ ID NO: 427960 - DNA, 2205 bp, Homo sapiens
  misc_feature (2205)..(2205): n is a, c, g, or t
ggcccgcgcgtcccggccgggctgcggcggagcgagcggggccagcgctgcagaaggcggcggctggctctccgggacggtcacatcccgctgcaggggcgggcggaggccgccgcactgcctcccgcaccggggacccaggccagcgtccgggcaacgccccctgctcccggacagactccgtggcccgctcgagccctgggggctccgcagacccgcgcccgctccgcccgcagctcggccccgcgctgcccgcgtcgccgggcccgcgccgggatggggtaggggcagcgccaccgagtcgggcgatgggccgccctctgggcaccgagcagccccccgaggcctgaccaaccgcgaggaccggcggaggagccccgcctggatgtcaagcggatgccaagcggatgccacagttccccccccagcggactccgtggggacatggcttcgctggtgcccctttccccatatctaagccccacggtcctcctgctggtcagctgtgacctgggcttcgtgcgagcagaccggcctccctctcctgtgaatgtgacggtcactcacctcagagccaactcggccactgtgtcctgggacgtcccagaaggcaacatcgtcattggctactccatttcccagcaacggcagaatggccccgggcagcgtgtgattcgggaggtgaacaccaccacccgggcctgtgccctctggggcctggctgaagacagtgactacacagtgcaggtcaggagcatcggccttcggggagagagtcccccagggccccgggtgcacttccgaactctcaagggttctgaccggctaccttcaaacagttcaagcccaggtgacatcacagtggaaggtctggatggagagcggccactgcagactggggaagtggtcatcattgtggtggtgttgctcatgtgggctgctgtaattgggctgttctgccgtcagtatgacatcatcaaggacaatgactccaacaacaatcccaaggagaagggaaaggggccggaacagagtcctcagggaaggccagtggggacaagacagaaaaagtcaccatctatcaacaccatcgacgtttgagtgaagaaacacacccagaagagagatgcactaacaactggggatagggatggggtcagggggagcccaagatggtgatctgcccgagactcccagagggtaatgccactcccacaatctcaggcctggtacccatcctctttccactgtgagcagagccagaaggtaggtctgttcagagtctgtgcccctggacctggggagtggatatcagatgggatatctccttccattccccggtccaggggagagtcactagttgtaccctactccattaggtcccaaatgggggccccatttcacctgtatcaggactctgagcatccccagctgccccacatcttgcctctggccctcagagaggggtgtttctgtgggtactcctcttaccccagcaaataaaaggaattgtctgaccctagaggcagatgctgcactgcactactccaatgtcttccatggagcctcaggtgctccccctctcacctggcagccccttcagctgctagtgatatcacttgttggacatttttccaataaaggttcttggacaaactgaaaaaaaaaaaaaaaaaaaaaaaaaaaaaaaaaaaaaaaaaaaaggggggcggcgcgcgcctccaagaatttccccccgccgaggggcgccccagatctttcgcgctgctcccccgcgttttttttgtacaaaggggcgcccccaaatagggagggggtccgatattataaaaggcccggagggccgggcgggcgccgcccgtttaaaacaaccgctctctcgcggcgcgggcgagcaacactggcgtaccgcggggagactcttggggagagggagacccccttcaacttcgcgggggggcgcgccactatatgtgtggggacacaccctccctaccagagaagattattaaagccgccctctaagggggagacatatatctaacactttttacacggcgtattatacgtgttggtcaacacaccaacgccgcggaaataaatcgttgccccgggctaagaaaagttgtgggcaccacggacagttattactattcaccggacacattttttcatccccgggggccttcttttcataaataaggn

SEQ ID NO: 427961 - DNA, 1875 bp, Homo sapiens
ggcccgcgcgtcccggccgggctgcggcggagcgagcggggccagcgctgcagaaggcggcggctggctctccgggacggtcacatcccgctgcaggggcgggcggaggccgccgcactgcctcccgcaccggggacccaggccagcgtccgggcaacgccccctgctcccggacagactccgtggcccgctcgagccctgggggctccgcagacccgcgcccgctccgcccgcagctcggccccgcgctgcccgcgtcgccgggcccgcgccgggatggggtaggggcagcgccaccgagtcgggcgatgggccgccctctgggcaccgagcagccccccgaggcctgaccaaccgcgaggaccggcggaggagccccgcctggatgtcaagcggatgccaagcggatgccacagttccccccccagcggactccgtggggacatggcttcgctggtgcccctttccccatatctaagccccacggtcctcctgctggtcagctgtgacctgggcttcgtgcgagcagaccggcctccctctcctgtgaatgtgacggtcactcacctcagagccaactcggccactgtgtcctgggacgtcccagaaggcaacatcgtcattggctactccatttcccagcaagtatgaatcacccttctgctcccccaacctgtgtccttggatttcggcacatttcttcacttaagtgggggggatctggaagctggcgtatcctggctcaggctgcccttttcacgctactcccccggagtgcttggatgttgaagagtctctggttgagccttgtggcctggcactggggtgaggctgtcctcctctcccctcatctccctgcagcggcagaatggccccgggcagcgtgtgattcgggaggtgaacaccaccacccgggcctgtgccctctggggcctggctgaagacagtgactacacagtgcaggtcaggagcatcggccttcggggagagagtcccccagggccccgggtgcacttccgaactctcaagggttctgaccggctaccttcaaacagttcaagcccaggtgacatcacagtggaaggtctggatggagagcggccactgcagactggggaagtggtcatcattgtggtggtgttgctcatgtgggctgctgtaattgggctgttctgccgtcagtatgacatcatcaaggacaatgactccaacaacaatcccaaggagaagggaaaggggccggaacagagtcctcagggaaggccagtggggacaagacagaaaaagtcaccatctatcaacaccatcgacgtttgagtgaagaaacacacccagaagagagatgcactaacaactggggatagggatggggtcagggggagcccaagatggtgatctgcccgagactcccagagggtaatgccactcccacaatctcaggcctggtacccatcctctttccactgtgagcagagccagaaggtaggtctgttcagagtctgtgcccctggacctggggagtggatatcagatgggatatctccttccattccccggtccaggggagagtcactagttgtaccctactccattaggtcccaaatgggggccccatttcacctgtatcaggactctgagcatccccagctgccccacatcttgcctctggccctcagagaggggtgtttctgtgggtactcctcttaccccagcaaataaaaggaattgtctgaccctagaggcagatgctgcactgcactactccaatgtcttccatggagcctcaggtgctccccctctcacctggcagccccttcagctgctagtgatatcacttgttggacatttttccaataaaggttcttggacaaactg

SEQ ID NO: 427962 - DNA, 1731 bp, Homo sapiens
ggcccgcgcgtcccggccgggctgcggcggagcgagcggggccagcgctgcagaaggcggcggctggctctccgggacggtcacatcccgctgcaggggcgggcggaggccgccgcactgcctcccgcaccggggacccaggccagcgtccgggcaacgccccctgctcccggacagactccgtggcccgctcgagccctgggggctccgcagacccgcgcccgctccgcccgcagctcggccccgcgctgcccgcgtcgccgggcccgcgccgggatggggtaggggcagcgccaccgagtcgggcgatgggccgccctctgggcaccgagcagccccccgaggcctgaccaaccgcgaggaccggcggaggagccccgcctggatgtcaagcggatgccaagcggatgccacagttccccccccagcggactccgtggggacatggcttcgctggtgcccctttccccatatctaagccccacggtcctcctgctggtcagctgtgacctgggcttcgtgcgagcagaccggcctccctctcctgtgaatgtgacggtcactcacctcagagccaactcggccactgtgtcctgggacgtcccagaaggcaacatcgtcattggctactccatttcccagcaacggcagaatggccccgggcagcgtgtgattcgggaggtgaacaccaccacccgggcctgtgccctctggggcctggctgaagacagtgactacacagtgcaggtcaggagcatcggccttcggggagagagtcccccagggccccgggtgcacttccgaactctcaagggttctgaccggctaccttcaaacagttcaagcccaggtgacatcacagtggaaggtctggatggagagcggccactgcagactggggaagtggtcatcattgtggtggtgttgctcatgtgggctgctgtaattgggctgttctgccgtcagtatgacatcatcaaggacaatgactccaacaacaatcccaaggagaagggaaaggggccggaacagagtcctcagggaaggccagtggggacaagacagaaaaagtcaccatctatcaacaccatcgacgtttgagtgaagaaacacacccagaagagagatgcactaacaactggggatagggatggggtcagggggagcccaagatggtgatctgcccgagactcccagagggtaatgccactcccacaatctcaggcctggtacccatcctctttccactgtgagcagagccagaaggtaggtctgttcagagtctgtgcccctggacctggggagtggatatcagatgggatatctccttccattccccggtccaggggagagtcactagttgtaccctactccattaggtcccaaatgggggccccatttcacctgtatcaggactctgagcatccccagctgccccacatcttgcctctggccctcagagaggggtgtttctgtgggtactcctcttaccccagcaaataaaaggaattgtctgaccctagaggcagatgctgcactgcactactccaatgtcttccatggagcctcaggtgctccccctctcacctggcagccccttcagctgctagtgatatcacttgttggacatttttccaataaaggttcttggacaaactggatacaatacaaggcgactgtagggggatactctaagagacggccaacaggcattccaggtgcactgccgca

SEQ ID NO: 427963 - DNA, 1528 bp, Homo sapiens
ggcccgcgcgtcccggccgggctgcggcggagcgagcggggccagcgctgcagaaggcggcggctggctctccgggacggtcacatcccgctgcaggggcgggcggaggccgccgcactgcctcccgcaccggggacccaggccagcgtccgggcaacgccccctgctcccggacagactccgtggcccgctcgagccctgggggctccgcagacccgcgcccgctccgcccgcagctcggccccgcgctgcccgcgtcgccgggcccgcgccgggatggggtaggggcagcgccaccgagtcgggcgatgggccgccctctgggcaccgagcagccccccgaggcctgaccaaccgcgaggaccggcggaggagccccgcctggatgtcaagcggatgccaagcggatgccacagttccccccccagcggactccgtggggacatggcttcgctggtgcccctttccccatatctaagccccacggtcctcctgctggtcagctgtgacctgggcttcgtgcgagcagaccggcctccctctcctgtgaatgtgacggtcactcacctcagagccaactcggccactgtgtcctgggacgtcccagaaggcaacatcgtcattggctactccatttcccagcaagtatgaatcacccttctgctcccccaacctgtgtccttggatttcggcacatttcttcacttaagtgggggggatctggaagctggcgtatcctggctcaggctgcccttttcacgctactcccccggagtgcttggatgttgaagagtctctggttgagccttctgtaattgggctgttctgccgtcagtatgacatcatcaaggacaatgactccaacaacaatcccaaggagaagggaaaggggccggaacagagtcctcagggaaggccagtggggacaagacagaaaaagtcaccatctatcaacaccatcgacgtttgagtgaagaaacacacccagaagagagatgcactaacaactggggatagggatggggtcagggggagcccaagatggtgatctgcccgagactcccagagggtaatgccactcccacaatctcaggcctggtacccatcctctttccactgtgagcagagccagaaggtaggtctgttcagagtctgtgcccctggacctggggagtggatatcagatgggatatctccttccattccccggtccaggggagagtcactagttgtaccctactccattaggtcccaaatgggggccccatttcacctgtatcaggactctgagcatccccagctgccccacatcttgcctctggccctcagagaggggtgtttctgtgggtactcctcttaccccagcaaataaaaggaattgtctgaccctagaggcagatgctgcactgcactactccaatgtcttccatggagcctcaggtgctccccctctcacctggcagccccttcagctgctagtgatatcacttgttggacatttttccaataaaggttcttggacaaactg

SEQ ID NO: 427964 - DNA, 1331 bp, Homo sapiens
ggcccgcgcgtcccggccgggctgcggcggagcgagcggggccagcgctgcagaaggcggcggctggctctccgggacggtcacatcccgctgcaggggcgggcggaggccgccgcactgcctcccgcaccggggacccaggccagcgtccgggcaacgccccctgctcccggacagactccgtggcccgctcgagccctgggggctccgcagacccgcgcccgctccgcccgcagctcggccccgcgctgcccgcgtcgccgggcccgcgccgggatggggtaggggcagcgccaccgagtcgggcgatgggccgccctctgggcaccgagcagccccccgaggcctgaccaaccgcgaggaccggcggaggagccccgcctggatgtcaagcggatgccaagcggatgccacagttccccccccagcggactccgtggggacatggcttcgctggtgcccctttccccatatctaagccccacggtcctcctgctggtcagctgtgacctgggcttcgtgcgagcagaccggcctccctctcctgtgaatgtgacggtcactcacctcagagccaactcggccactgtgtcctgggacgtcccagaaggcaacatcgtcattggctactccatttcccagcaacggcagaatggccccgggcagcgtgtgattcgggaggtgaacaccaccacccgggcctgtgccctctggggcctggctgaagacagtgactacacagtgcaggtcaggagcatcggccttcggggagagagtcccccagggccccgggtgcacttccgaactctcaagggttctgaccggctaccttcaaacagttcaagcccaggtgacatcacagtggaaggtctggatggagagcggccaaatctcaggcctggtacccatcctctttccactgtgagcagagccagaaggtaggtctgttcagagtctgtgcccctggacctggggagtggatatcagatgggatatctccttccattccccggtccaggggagagtcactagttgtaccctactccattaggtcccaaatgggggccccatttcacctgtatcaggactctgagcatccccagctgccccacatcttgcctctggccctcagagaggggtgtttctgtgggtactcctcttaccccagcaaataaaaggaattgtctgaccctagaggcagatgctgcactgcactactccaatgtcttccatggagcctcaggtgctccccctctcacctggcagccccttcagctgctagtgatatcacttgttggacatttttccaataaaggttcttggacaaactg

SEQ ID NO: 427965 - DNA, 1396 bp, Homo sapiens
ggcccgcgcgtcccggccgggctgcggcggagcgagcggggccagcgctgcagaaggcggcggctggctctccgggacggtcacatcccgctgcaggggcgggcggaggccgccgcactgcctcccgcaccggggacccaggccagcgtccgggcaacgccccctgctcccggacagactccgtggcccgctcgagccctgggggctccgcagacccgcgcccgctccgcccgcagctcggccccgcgctgcccgcgtcgccgggcccgcgccgggatggggtaggggcagcgccaccgagtcgggcgatgggccgccctctgggcaccgagcagccccccgaggcctgaccaaccgcgaggaccggcggaggagccccgcctggatgtcaagcggatgccaagcggatgccacagttccccccccagcggactccgtggggacatggcttcgctggtgcccctttccccatatctaagccccacggtcctcctgctggtcagctgtgacctgggcttcgtgcgagcagaccggcctccctctcctgtgaatgtgacggtcactcacctcagagccaactcggccactgtgtcctgggacgtcccagaaggcaacatcgtcattggctactccatttcccagcaacggcagaatggccccgggcagcgtgtgattcgggaggtgaacaccaccacccgggcctgtgccctctggggcctggctgaagacagtgactacacagtgcaggtcaggagcatcggccttcggggagagagtcccccagggccccgggtgcacttccgaactctcaagggttctgaccggctaccttcaaacagttcaagcccaggtgacatcacagtggaaggtctggatggagagcggccactgcagactggggaagtggtcatcattgtggtggtgttgctcatgtgggctgctgtaattgggctgttctgccgtcagtatgacatcatcaaggacaatgactccaacaacaatcccaaggagaagggaaaggggccggaacagagtcctcagggaaggccagtggggacaagacagaaaaagtcaccatctatcaacaccatcgacgtttgagtgaagaaacacacccagaagagagatgcactaacaactggggatagggatggggtcagggggagcccaagatggtgatctgcccgagactcccagagggtaatgccactcccacaatctcaggcctggtacccatcctctttcctaagttcacctggctctgaacttagggacagactattagaaacaagagaacaagataatttctgatggttaaaaataatgagaggggccgggcgcagtggctcacgcctgtaatcccagcactttgggaggccgaagcaggtggatcacc

SEQ ID NO: 427966 - DNA, 316 bp, Homo sapiens
ccctactccattaggtcccaaatgggggccccatttcacctgtatcaggactctgagcatccccagctgccccacatcttgcctctggccctcagagaggggtgtttctgtgggtactcctcttaccccagcaaataaaaggaattgtctgaccctagaggcagatgctgcactgcactactccaatgtcttccatggagcctcaggtgctccccctctcacctggcagccccttcagctgctagtgatatcacttgttggacatttttccaataaaggttcttggacaaactgtcttggacaaactggagctgac

SEQ ID NO: 427967 - DNA, 1603 bp, Homo sapiens
ggcccgcgcgtcccggccgggctgcggcggagcgagcggggccagcgctgcagaaggcggcggctggctctccgggacggtcacatcccgctgcaggggcgggcggaggccgccgcactgcctcccgcaccggggacccaggccagcgtccgggcaacgccccctgctcccggacagactccgtggcccgctcgagccctgggggctccgcagacccgcgcccgctccgcccgcacgccaccgagtcgggcgatgggccgccctctgggcaccgagcagccccccgaggcctgaccaaccgcgaggaccggcggaggagccccgcctggatgtcaagcggatgccaagcggatgccacagttccccccccagcggactccgtggggacatggcttcgctggtgcccctttccccatatctaagccccacggtcctcctgctggtcagctgtgacctgggcttcgtgcgagcagaccggcctccctctcctgtgaatgtgacggtcactcacctcagagccaactcggccactgtgtcctgggacgtcccagaaggcaacatcgtcattggctactccatttcccagcaacggcagaatggccccgggcagcgtgtgattcgggaggtgaacaccaccacccgggcctgtgccctctggggcctggctgaagacagtgactacacagtgcaggtcaggagcatcggccttcggggagagagtcccccagggccccgggtgcacttccgaactctcaagggttctgaccggctaccttcaaacagttcaagcccaggtgacatcacagtggaaggtctggatggagagcggccactgcagactggggaagtggtcatcattgtggtggtgttgctcatgtgggctgctgtaattgggctgttctgccgtcagtatgacatcatcaaggacaatgactccaacaacaatcccaaggagaagggaaaggggccggaacagagtcctcagggaaggccagtggggacaagacagaaaaagtcaccatctatcaacaccatcgacgtttgagtgaagaaacacacccagaagagagatgcactaacaactggggatagggatggggtcagggggagcccaagatggtgatctgcccgagactcccagagggtaatgccactcccacaatctcaggcctggtacccatcctctttccactgtgagcagagccagaaggtaggtctgttcagagtctgtgcccctggacctggggagtggatatcagatgggatatctccttccattccccggtccaggggagagtcactagttgtaccctactccattaggtcccaaatgggggccccatttcacctgtatcaggactctgagcatccccagctgccccacatcttgcctctggccctcagagaggggtgtttctgtgggtactcctcttaccccagcaaataaaaggaattgtctgaccctagaggcagatgctgcactgcactactccaatgtcttccatggagcctcaggtgctccccctctcacctggcagccccttcagctgctagtgatatcacttgttggacatttttccaataaaggttcttggacaaactg

SEQ ID NO: 427968 - DNA, 1535 bp, Homo sapiens
ggcccgcgcgtcccggccgggctgcggcggagcgagcggggccagcgctgcagaaggcggcggctggctctccgggacggtcacatcccgctgcaggggcgggcggaggccgccgcactgcctcccgcaccggggacccaggccagcgtccgggcaacgccccctgctcccggacagactccgtggcccgctcgagccctgggggctccgcagacccgcgcccgctccgcccgcagctcggccccgcgctgcccgcgtcgccgggcccgcgccgggatggggtaggggcagcgccaccgagtcgggcgatgggccgccctctgggcaccgagcagccccccgaggcctgaccaaccgcgaggaccggcggaggagccccgcctggatgtcaagcggatgccaagcggatgccacagttccccccccagcggactccgtggggacatggcttcgctggtgcccctttccccatatctaagccccacggtcctcctgctggtcagctgtgacctgggcttcgtgcgagcagaccggcctccctctcctgtgaatgtgacggtcactcacctcagagccaactcggccactgtgtcctggctgaagacagtgactacacagtgcaggtcaggagcatcggccttcggggagagagtcccccagggccccgggtgcacttccgaactctcaagggttctgaccggctaccttcaaacagttcaagcccaggtgacatcacagtggaaggtctggatggagagcggccactgcagactggggaagtggtcatcattgtggtggtgttgctcatgtgggctgctgtaattgggctgttctgccgtcagtatgacatcatcaaggacaatgactccaacaacaatcccaaggagaagggaaaggggccggaacagagtcctcagggaaggccagtggggacaagacagaaaaagtcaccatctatcaacaccatcgacgtttgagtgaagaaacacacccagaagagagatgcactaacaactggggatagggatggggtcagggggagcccaagatggtgatctgcccgagactcccagagggtaatgccactcccacaatctcaggcctggtacccatcctctttccactgtgagcagagccagaaggtaggtctgttcagagtctgtgcccctggacctggggagtggatatcagatgggatatctccttccattccccggtccaggggagagtcactagttgtaccctactccattaggtcccaaatgggggccccatttcacctgtatcaggactctgagcatccccagctgccccacatcttgcctctggccctcagagaggggtgtttctgtgggtactcctcttaccccagcaaataaaaggaattgtctgaccctagaggcagatgctgcactgcactactccaatgtcttccatggagcctcaggtgctccccctctcacctggcagccccttcagctgctagtgatatcacttgttggacatttttccaataaaggttcttggacaaactg

SEQ ID NO: 427969 - DNA, 1750 bp, Homo sapiens
ggcccgcgcgtcccggccgggctgcggcggagcgagcggggccagcgctgcagaaggcggcggctggctctccgggacggtcacatcccgctgcaggggcgggcggaggccgccgcactgcctcccgcaccggggacccaggccagcgtccgggcaacgccccctgctcccggacagactccgtggcccgctcgagccctgggggctccgcagacccgcgcccgctccgcccgcagctcggccccgcgctgcccgcgtcgccgggcccgcgccgggatggggtaggggcagcgccaccgagtcgggcgatgggccgccctctgggcaccgagcagccccccgaggcctgaccaaccgcgaggaccggcggaggagccccgcctggatgtcaagcggatgccaagcggatgccacagttccccccccagcggactccgtggggacatggcttcgctggtgcccctttccccatatctaagccccacggtcctcctgctggtcagctgtgacctgggcttcgtgcgagcagaccggcctccctctcctgtgaatgtgacggtcactcacctcagagccaactcggccactgtgtcctgggacgtcccagaaggcaacatcgtcattggctactccatttcccagcaagtatgaatcacccttctgctcccccaacctgtgtccttggatttcggcacatttcttcacttaagtgggggggatctggaagctggcgtatcctggctcaggctgcccttttcacgctactcccccggagtgcttggatgttgaagagtctctggttgagccttgtggcctggcactggggtgaggctgtcctcctctcccctcatctccctgcagcggcagaatggccccgggcagcgtgtgattcgggaggtgaacaccaccacccgggcctgtgccctctggggcctggctgaagacagtgactacacagtgcaggtcaggagcatcggccttcggggagagagtcccccagggccccgggtgcacttccgaactctcaagggttctgaccggctaccttcaaacagttcaagcccaggtgacatcacagtggaaggtctggatggagagcggccactgcagactggggaagtggtcatcattgtggtggtgttgctcatgtgggctgaaaaagtcaccatctatcaacaccatcgacgtttgagtgaagaaacacacccagaagagagatgcactaacaactggggatagggatggggtcagggggagcccaagatggtgatctgcccgagactcccagagggtaatgccactcccacaatctcaggcctggtacccatcctctttccactgtgagcagagccagaaggtaggtctgttcagagtctgtgcccctggacctggggagtggatatcagatgggatatctccttccattccccggtccaggggagagtcactagttgtaccctactccattaggtcccaaatgggggccccatttcacctgtatcaggactctgagcatccccagctgccccacatcttgcctctggccctcagagaggggtgtttctgtgggtactcctcttaccccagcaaataaaaggaattgtctgaccctagaggcagatgctgcactgcactactccaatgtcttccatggagcctcaggtgctccccctctcacctggcagccccttcagctgctagtgatatcacttgttggacatttttccaataaaggttcttggacaaactg

SEQ ID NO: 427970 - DNA, 1547 bp, Homo sapiens
ggcccgcgcgtcccggccgggctgcggcggagcgagcggggccagcgctgcagaaggcggcggctggctctccgggacggtcacatcccgctgcaggggcgggcggaggccgccgcactgcctcccgcaccggggacccaggccagcgtccgggcaacgccccctgctcccggacagactccgtggcccgctcgagccctgggggctccgcagacccgcgcccgctccgcccgcagctcggccccgcgctgcccgcgtcgccgggcccgcgccgggatggggtaggggcagcgccaccgagtcgggcgatgggccgccctctgggcaccgagcagccccccgaggcctgaccaaccgcgaggaccggcggaggagccccgcctggatgtcaagcggatgccaagcggatgccacagttccccccccagcggactccgtggggacatggcttcgctggtgcccctttccccatatctaagccccacggtcctcctgctggtcagctgtgacctgggcttcgtgcgagcagaccggcctccctctcctgtgaatgtgacggtcactcacctcagagccaactcggccactgtgtcctgggacgtcccagaaggcaacatcgtcattggctactccatttcccagcaacggcagaatggccccgggcagcgtgtgattcgggaggtgaacaccaccacccgggcctgtgccctctggggcctggctgaagacagtgactacacagtgcaggtcaggagcatcggccttcggggagagagtcccccagggccccgggtgcacttccgaactctcaagggttctgaccggctaccttcaaacagttcaagcccaggtgacatcacagtggaaggtctggatggagagcggccactgcagactggggaagtggtcatcattgtggtggtgttgctcatgtgggctgctgtaattgggctgttctgccgtcagtatgacatcatcaaggacaatgactccaacaacaatcccaaggagaagggaaaggggccggaacagagtcctcagggaaggccagtggggacaagacagaaaaagtcaccatctatcaacaccatcgacgtttgagtgaagaaacacacccagaagagagatgcactaacaactggggatagggatggggtcagggggagcccaagatggtgatctgcccgagactcccagagggtaatgccactcccacaatctcaggcctggtacccatcctctttccactgtgagcagagccagaaggtaggtctgttcagagtctgtgcccctggacctggggagtggatatcagatgggatatctccttccattccccggtccaggggagagtcactagttgtaccctatcctcttaccccagcaaataaaaggaattgtctgaccctagaggcagatgctgcactgcactactccaatgtcttccatggagcctcaggtgctccccctctcacctggcagccccttcagctgctagtgatatcacttgttggacatttttccaataaaggttcttggacaaactg

SEQ ID NO: 427971 - DNA, 1245 bp, Homo sapiens
ggcccgcgcgtcccggccgggctgcggcggagcgagcggggccagcgctgcagaaggcggcggctggctctccgggacggtcacatcccgctgcaggggcgggcggaggccgccgcactgcctcccgcaccggggacccaggccagcgtccgggcaacgccccctgctcccggacagactccgtggcccgctcgagccctgggggctccgcagacccgcgcccgctccgcccgcagctcggccccgcgctgcccgcgtcgccgggcccgcgccgggatggggtaggggcagcgccaccgagtcgggcgatgggccgccctctgggcaccgagcagccccccgaggcctgaccaaccgcgaggaccggcggaggagccccgcctggatgtcaagcggatgccaagcggatgccacagttccccccccagcggactccgtggggacatggcttcgctggtgcccctttccccatatctaagccccacggtcctcctgctggtcagctgtgacctgggcttcgtgcgagcagaccggcctccctctcctgtgaatgtgacggtcactcacctcagagccaactcggccactgtgtcctgggacgtcccagaaggcaacatcgtcattggctactccatttcccagcaacggcagaatggccccgggcagcgtgtgattcgggaggtgaacaccaccacccgggcctgtgccctctggggcctggctgaagacagtgactacacagtgcaggtcaggagcatcggccttcggggagagagtcccccagggccccgggtgcacttccgaactctcaagggttctgaccggctaccttcaaacagttcaagcccaggtgacatcacagtggaaggtctggatggagagcggccactgcagactggggaagtggtcatcattgtggtggtgttgctcatgtgggctgctgtaattgggctgttctgccgtcagtatgacatcatcaaggacaatgactccaacaacaatcccaaggagaagggaaaggggccggaacagagtcctcagggaaggccagtggggacaagacaggtgatgtgggggccagtgagggcggaaagggtgattctgcccctgaggggcagccagggaaaggaagaaggtcaaagaggggcagaaaaagatggagaatggaagatctgggatggggggagcttggcaaacaccgtgtagggcgtatatatagggacttacaatcttattgtgtaagag

SEQ ID NO: 427972 - DNA, 1235 bp, Homo sapiens
agcggttcaagaccagcctgggcaacaaagctagaccctgtctctaaaaaaaaaaaaaaaagtacagaaattagctgggcatggtggtgcacacctgtagttccagctactcggaaaactgaggtgggaggattgcttgagcccaggagcccaggagctcaaggctttagtgaactgtgatcgagtcatgcactccagcctgggcaacagagcaaggccccctctcttaaaaaaaaaagtggagaaattgttagaaagctattaaattgggcttgtattttctttggctttcagatctaaagcatgtattccttatttgaaaaagagcaaagttgctcatatcctcaatatcagtccaccactgaacctaaatccagtttggttcaaacagcactgtggtaggtggtaggtggtagggtgaggggatggtttgtgcttaatttgttttgaattaaatctgtgtatgtctgatgtaatcacaatctgcacataacattcatcattgaattttctatgccaagtcattaagtggcatttggaaagtagattcttcatcttttatctgtaatttaaaaaattgaggcataattgacattcaataaaatgcacagctcttaatggttcagtttgatgagttttgagaaatgtatataaccaacacccaaatcaagatacagatttttaccatttcagaaagctctttcatttcccaatgagtgtgttttactgtgtgtaatttattcatctataaagttggttaaaaactatctatgagatactttatttttcttagacaggtatgcacctgtagtcctagctacttgaaaggctgaggtgggaggatcgcttgagcccaggagtttgaggctgcagtgagctaggatcatggcactgcactcctgcctgggtgacagagcgagaccctgactctaaaaaaaaaaaaaaaaacgacaaaaaaaccctattacctttcatagcaaactaatggtttaaggtaaatatgctaagcaacaagatttacatatagatgcctcctttaaaatagttgtatcaaacacttagtttttatttcagcacagttcactaacatttggaaaggcacttggaatgggaacccacagagcaaaactgaaagaagttccactttaattgactaggttaaatacatttgcagcctttttttattattgttttactagcagtagtttccctttaaataaacactttcattctta

SEQ ID NO: 427973 - DNA, 583 bp, Homo sapiens
ttgttgttatgttagtatgagagcagaggaaaaatggtttagagttttttcccaaaacagtcatgtaatgctatcatagtatacctcagtgcatagatgttttattttttctgccactcattctagagtgcagtggcatgctcatagctcactgcagccttgaattcctgggctcaaggtcttagctttccaagtctcagctttcctgggctcctgcctcagctttccaagtagctgggattacaggcacataccaccatgcctggctttgtttgttttttgtgtggacaaggtctcactttgttgcccaggctggtctcaaactcctggcttcacgcaatcctcccacctcagcctcccaaagtgctgggattataggtgtgagccaccatgcccagcctaaataattttttaaattccagtttttaattattctttgttaggatacagaaatgctttgtgtcctgcaatactgttaaatctccttattagttttagcagctttttttgtaaatcccttaggattttctatgtatgtgattgttatctgcaaataaaggcagttttatttcttcttttccac

SEQ ID NO: 427974 - DNA, 829 bp, Homo sapiens
aaaggaaggaggaggtaacttgtggaatgctgagaacgatctaaagcatgtattccttatttgaaaaagagcaaagttgctcatatcctcaatatcagtccaccactgaacctaaatccagtttggttcaaacagcactgtgcttataccattgctaagtatggtatgtctatgtatgtgcttggaatggcagaagaatttaaaggtgaaattgcagtcaatgcattatggcctaaaacagccatacacactgctgctatggatatgctgggaggacctggtatcgaaagccagtgtagaaaagttgatatcattgcagatgcagcatattccattttccaaaagccaaaaagttttactggcaactttgtcattgatgaaaatatcttaaaagaagaaggaatagaaaattttgacgtttatgcaattaaaccagctgtcttcccaatgaaggaagaaaacccataccaacacaacttaaaaaaaaagatgaatgaaaaatagaggtcatcctttgcaaccagatttcttcttagatgaatacccagaagcagttagcaagaaagtggaatcaactggacgacttagtataaatcctagcaggattggtgctatggcgaaattttgggccaatataacgacgtgcgcgggcaacgaactgcggcagtccaattgggcagccacacagcaattgactaaattggtccgctcccgaagaccttgaaagggcttgaatttttcctgggttccctcaacctggggtctgaacgtttggcacgggccaaaccgtcgcattgggggccgccaaggcgggaatctacgggaaaag

SEQ ID NO: 427975 - DNA, 213 bp, Homo sapiens
ctatatgtttatctctctaggtgaagatggtggcacgtggtttcttgatctgaaaagcaagggtgggaatgtcggatatggagagccttctgatcagggaaactaaaaccaacaatggcattcatgtcagggaaattgaagattaaaggtaacatggccctagcaatcaaattggagaagctaatgaatcagatgaatgccagactgtgaagg

SEQ ID NO: 427976 - DNA, 3730 bp, Homo sapiens
aggcgcactcggcgatcccggcttttccgcgcgcagttcccgcacaggcatcggggggggcaggggcggggcaggggcggggataaatgcggagggacggtccagctttagctctctgctcgccgccgccgctgtcgccgccacctcctctgatctacgaaagtcatgttacccaacaccgggaggctggcaggatgtacagtttttatcacaggtgcaagccgtggcattggcaaagctattgcattgaaagcagcaaaggatggagcaaatattgttattgctgcaaagaccgcccagccacatccaaaacttctaggcacaatctatactgctgctgaagaaattgaagcagttggaggaaaggccttgccatgtattgttgatgtgagagatgaacagcagatcagtgctgcagtggagaaagccatcaagaaatttggaggaattgatattctggtaaataatgccagtgccattagtttgaccaatacattggacacacctaccaagagattggatctgatgatgaacgtgaacaccagaggcacctaccttgcatctaaagcatgtattccttatttgaaaaagagcaaagttgctcatatcctcaatatcagtccaccactgaacctaaatccagtttggttcaaacagcactgtgcttataccattgctaagtatggtatgtctatgtatgtgcttggaatggcagaagaatttaaaggtgaaattgcagtcaatgcattatggcctaaaacagccatacacactgctgctatggatatgctgggaggacctggtatcgaaagccagtgtagaaaagttgatatcattgcagatgcagcatattccattttccaaaagccaaaaagttttactggcaactttgtcattgatgaaaatatcttaaaagaagaaggaatagaaaattttgacgtttatgcaattaaaccaggtcatcctttgcaaccagatttcttcttagatgaatacccagaagcagttagcaagaaagtggaatcaactggtgctgttccagaattcaaagaagagaaactgcagctgcaaccaaaaccacgttctggagctgtggaagaaacatttagaattgttaaggactctctcagtgatgatgttgttaaagccactcaagcaatctatctgtttgaactctccggtgaagatggtggcacgtggtttcttgatctgaaaagcaagggtgggaatgtcggatatggagagccttctgatcaggcagatgtggtgatgagtatgactactgatgactttgtaaaaatgttttcagggaaactaaaaccaacaatggcattcatgtcagggaaattgaagattaaaggtaacatggccctagcaatcaaattggagaagctaatgaatcagatgaatgccagactgtgaaggaaaatataaaaaaaaagtcgactgctatgctcaaaaagtaaaaaaagctcaacagttaaaatctaatgtttgttttctttcctgttatattataaggatatgcacgtttgttctggaaaagatagaatttgtctctaaaagacttgaaattgtaattaaaatggcaagctaatcaaacataagcttcattaagtgggattctaagacagtctgtgtttttatatttcaagggtttaaccctttgagccttacatctcattcactgtctttctccaagaaaagtattttgggcggacagtcagatcaagcagtaaaattagctctttcaaatcttcttgtcatgtaaaatgaagctagtctgttttaaaatttttagttttggattgtatactaatgaaaatcttaatgatgtttttgatttttatatacttattttaaagaaaatcttatatagtacattttacaaaaattataaaaaatgaattagtactggcgaggactaaatgaaacaataatttttcattttgataactagctttccaggtggacttagccataggaaaatattactaatgtaatttaacaaattgctgcatgtattccatttaaaaatatgtttaaattgtcctaaaacaaaataattttctccctaggagtatgcatttggctacagtgttttgaaacagaaaccttagaataggtcattggtatgggctgaactgtgtatcccccaattcatttgttgaggtcctaactcccatttcttttgaatgtgactgttcggagatgaggcctttaaagaggtgacttaagttcaaaggaggctgttagtctaatccaacatggtgtcctttggacataagagataccagcaatgtgtgcacagaacaaagaccaggagaggacacagtgagaaggcagttatctgcaagcaaagagagaggcttcagaagaaacaaaatcaccagcaccttgatctttgacttctaatctccagaatagtgagaaataaatttctgttgttaagccgtccactgtgggaggccgacgcaggaggattgcttgaggccaggagttcaaggccagcctggacaacatagtaagaccctatctctacccccctaataaattaatttaaaaagccccccaatctgtggtattttattatggcagccctagcaagctaatacagtggtttgagaggctgggagggttgaggggaagataaacttttaaaaagctcttatctttcatttcaatcagttaaaaatacttgctcagtgtaacaattttgcttctcagcttccactctaatattgttgtgccattaagcaatttagctaatcctgacatttcttagattcataatgttaggagcatttaatctgtattttacaagttaggaagcagaggatcagagatgggaaaggactagcccaaggccaacattaacaagccctctaacaaaaactttacaatacatttatgttgaatggaactccaagatctcacctctccatccaggaatggagtccatgtaatcaaagtgaacttaaaaataggacagtttcaacaagtcaggagattcacagcaactgatcaaagggagtccagtcaacgtgagcaagcgtgattatgatgaggaagccccctctgctttaatccacacaaggaacgtaacctgaagtaacctgatgttaaccaatctgctgtgtctactatgctgtttccttgttcctgctagtgctgctttacaaatgcagaccattctatcatacctggcagggcttctgttttattttgtaggctggatgctacccagttcatgaatcgctaataaaagccaattagatctttaaaaaaaaaaaaaaaaaaaaaaaaaaatttgtgggccggccgggcccggaaaaggtttttaaaaccttcgtttggggccggggcccctggtgtgggaacctgggccaaggggtccaaggaaaaccggcgcggctgggggtggggttgcccccataaaaaggccggggaccggcggttcggacaacccagaggcttcgttcgcaggggagagccccgctcaaaacgcggcgacccgtgttgctaaccgccggctcgggggggggggggcaacagcaacacaaacacacaaaaaaaagaaaacacagacaaaaacagataaagaaaacaaaagacaaagcagcactatacagcacacacaaggacacaaaaactcaagagtaaaagacaaatagacaacacatcaaaagacgaaacacacataactaccacatcaacccagacacagaag

SEQ ID NO: 427977 - DNA, 3229 bp, Homo sapiens
aggcgcactcggcgatcccggcttttccgcgcgcagttcccgcacaggcatcggggggggcaggggcggggcaggggcggggataaatgcggagggacggtccagctttagctctctgctcgccgccgccgctgtcgccgccacctcctctgatctacgaaagtcatgttacccaacaccgggaggctggcaggatgtacagtttttatcacaggtgcaagccgtggcattggcaaagctattgcattgaaagcagcaaaggatggagcaaatattgttattgctgcaaagaccgcccagccacatccaaaacttctaggcacaatctatactgctgctgaagaaattgaagcagttggaggaaaggccttgccatgtattgttgatgtgagagatgaacagcagatcagtgctgcagtggagaaagccatcaagaaatttggaggaattgatattctggtaaataatgccagtgccattagtttgaccaatacattggacacacctaccaagagattggatctgatgatgaacgtgaacaccagaggcacctaccttgcatctaaagcatgtattccttatttgaaaaagagcaaagttgctcatatcctcaatatcagtccaccactgaacctaaatccagtttggttcaaacagcactgtgcttataccattgctaagtatggtatgtctatgtatgtgcttggaatggcagaagaatttaaaggtgaaattgcagtcaatgcattatggcctaaaacagccatacacactgctgctatggatatgctgggaggacctggtatcgaaagccagtgtagaaaagttgatatcattgcagatgcagcatattccattttccaaaagccaaaaagttttactggcaactttgtcattgatgaaaatatcttaaaagaagaaggaatagaaaattttgacgtttatgcaattaaaccaggtcatcctttgcaaccagatttcttcttagatgaatacccagaagcagttagcaagaaagtggaatcaactggtgctgttccagaattcaaagaagagaaactgcagctgcaaccaaaaccacgttctggagctgtggaagaaacatttagaattgttaaggactctctcagtgatgatgttgttaaagccactcaagcaatctatctgtttgaactctccggtgaagatggtggcacgtggtttcttgatctgaaaagcaagggtgggaatgtcggatatggagagccttctgatcaggcagatgtggtgatgagtatgactactgatgactttgtaaaaatgttttcagggaaactaaaaccaacaatggcattcatgtcagggaaattgaagattaaaggtaacatggccctagcaatcaaattggagaagctaatgaatcagatgaatgccagactgtgaaggaaaatataaaaaaaaagtcgactgctatgctcaaaaagtaaaaaaagctcaacagttaaaatctaatgtttgttttctttcctgttatattataaggatatgcacgtttgttctggaaaagatagaatttgtctctaaaagacttgaaattgtaattaaaatggcaagctaatcaaacataagcttcattaagtgggattctaagacagtctgtgtttttatatttcaagggtttaaccctttgagccttacatctcattcactgtctttctccaagaaaagtattttgggcggacagtcagatcaagcagtaaaattagctctttcaaatcttcttgtcatgtaaaatgaagctagtctgttttaaaatttttagttttggattgtatactaatgaaaatcttaatgatgtttttgatttttatatacttattttaaagaaaatcttatatagtacattttacaaaaattataaaaaatgaattagtactggcgaggactaaatgaaacaataatttttcattttgataactagctttccaggtggacttagccataggaaaatattactaatgtaatttaacaaattgctgcatgtattccatttaaaaatatgtttaaattgtcctaaaaaaccttagaataggtcattggtatgggctgaactgtgtatcccccaattcatttgttgaggtcctaactcccatttcttttgaatgtgactgttcggagatgaggcctttaaagaggtgacttaagttcaaaggaggctgttagtctaatccaacatggtgtcctttggacataagagataccagcaatgtgtgcacagaacaaagaccaggagaggacacagtgagaaggcagttatctgcaagcaaagagagaggcttcagaagaaacaaaatcaccagcaccttgatctttgacttctaatctccagaatagtgagaaataaatttctgttgttaagccgtccactgtgggaggccgacgcaggaggattgcttgaggccaggagttcaaggccagcctggacaacatagtaagaccctatctctacccccctaataaattaatttaaaaagccccccaatctgtggtattttattatggcagccctagcaagctaatacagtggtttgagaggctgggagggttgaggggaagataaacttttaaaaagctcttatctttcatttcaatcagttaaaaatacttgctcagtgtaacaattttgcttctcagcttccactctaatattgttgtgccattaagcaatttagctaatcctgacatttcttagattcataatgttaggagcatttaatctgtattttacaagttaggaagcagaggatcagagatgggaaaggactagcccaaggccaacattaacaagccctctaacaaaaactttacaatacatttatgttgaatggaactccaagatctcacctctccatccaggaatggagtccatgtaatcaaagtgaacttaaaaataggacagtttcaacaagtcaggagattcacagcaactgatcaaagggagtccagtcaacgtgagcaagcgtgattatgatgaggaagccccctctgctttaatccacacaaggaacgtaacctgaagtaacctgatgttaaccaatctgctgtgtctactatgctgtttccttgttcctgctagtgctgctttacaaatgcagaccattctatcatacctggcagggcttctgttttattttgtaggctggatgctacccagttcatgaatcgctaataaaagccaattagatcttta

SEQ ID NO: 427978 - DNA, 4865 bp, Homo sapiens
  misc_feature (4183)..(4183): n is a, c, g, or t
aggcgcactcggcgatcccggcttttccgcgcgcagttcccgcacaggcatcggggggggcaggggcggggcaggggcggggataaatgcggagggacggtccagctttagctctctgctcgccgccgccgctgtcgccgccacctcctctgatctacgaaagtcatgttacccaacaccgggaggctggcaggatgtacagtttttatcacaggtgcaagccgtggcattggcaaagctattgcattgaaagcagcaaaggatggagcaaatattgttattgctgcaaagaccgcccagccacatccaaaacttctaggcacaatctatactgctgctgaagaaattgaagcagttggaggaaaggccttgccatgtattgttgatgtgagagatgaacagcagatcagtgctgcagtggagaaagccatcaagaaatttggaggaattgatattctggtaaataatgccagtgccattagtttgaccaatacattggacacacctaccaagagattggatctgatgatgaacgtgaacaccagaggcacctaccttgcatctaaagcatgtattccttatttgaaaaagagcaaagttgctcatatcctcaatatcagtccaccactgaacctaaatccagtttggttcaaacagcactgtgcttataccattgctaagtatggtatgtctatgtatgtgcttggaatggcagaagaatttaaaggtgaaattgcagtcaatgcattatggcctaaaacagccatacacactgctgctatggatatgctgggaggacctggtatcgaaagccagtgtagaaaagttgatatcattgcagatgcagcatattccattttccaaaagccaaaaagttttactggcaactttgtcattgatgaaaatatcttaaaagaagaaggaatagaaaattttgacgtttatgcaattaaaccaggtcatcctttgcaaccagatttcttcttagatgaatacccagaagcagttagcaagaaagtggaatcaactggtgctgttccagaattcaaagaagagaaactgcagctgcaaccaaaaccacgttctggagctgtggaagaaacatttagaattgttaaggactctctcagtgatgatgttgttaaagccactcaagcaatctatctgtttgaactctccggtgaagatggtggcacgtggtttcttgatctgaaaagcaagggtgggaatgtcggatatggagagccttctgatcaggcagatgtggtgatgagtatgactactgatgactttgtaaaaatgttttcagggaaactaaaaccaacaatggcattcatgtcagggaaattgaagattaaaggtaacatggccctagcaatcaaattggagaagctaatgaatcagatgaatgccagactgtgaaggaaaatataaaaaaaaagtcgactgctatgctcaaaaagtaaaaaaagctcaacagttaaaatctaatgtttgttttctttcctgttatattataaggatatgcacgtttgttctggaaaagatagaatttgtctctaaaagacttgaaattgtaattaaaatggcaagctaatcaaacataagcttcattaagtgggattctaagacagtctgtgtttttatatttcaagggtttaaccctttgagccttacatctcattcactgtctttctccaagaaaagtattttgggcggacagtcagatcaagcagtaaaattagctctttcaaatcttcttgtcatgtaaaatgaagctagtctgttttaaaatttttagttttggattgtatactaatgaaaatcttaatgatgtttttgatttttatatacttattttaaagaaaatcttatatagtacattttacaaaaattataaaaaatgaattagtactggcgaggactaaatgaaacaataatttttcattttgataactagctttccaggtggacttagccataggaaaatattactaatgtaatttaacaaattgctgcatgtattccatttaaaaatatgtttaaattgtcctaaaacaaaataattttctccctaggagtatgcatttggctacagtgttttgaaacagaaaccttagaataggtcattggtatgggctgaactgtgtatcccccaattcatttgttgaggtcctaactcccatttcttttgaatgtgactgttcggagatgaggcctttaaagaggtgacttaagttcaaaggaggctgttagtctaatccaacatggtgtcctttggacataagagataccagcaatgtgtgcacagaacaaagaccaggagaggacacagtgagaaggcagttatctgcaagcaaagagagaggcttcagaagaaacaaaatcaccagcaccttgatctttgacttctaatctccagaatagtgagaaataaatttctgttgttaagccgtccactgtgggaggccgacgcaggaggattgcttgaggccaggagttcaaggccagcctggacaacatagtaagaccctatctctacccccctaataaattaatttaaaaagccccccaatctgtggtattttattatggcagccctagcaagctaatacagtggtttgagaggctgggagggttgaggggaagataaacttttaaaaagctcttatctttcatttcaatcagttaaaaatacttgctcagtgtaacaattttgcttctcagcttccactctaatattgttgtgccattaagcaatttagctaatcctgacatttcttagattcataatgttaggagcatttaatctgtattttacaagttaggaagcagaggatcagagatgggaaaggactagcccaaggccaacattaacaagccctctaacaaaaactttacaatacatttatgttgaatggaactccaagatctcacctctccatccaggaatggagtccatgtaatcaaagtgaacttaaaaataggacagtttcaacaagtcaggagattcacagcaactgatcaaagggagtccagtcaacgtgagcaagcgtgattatgatgaggaagccccctctgctttaatccacacaaggaacgtaacctgaagtaacctgatgttaaccaatctgctgtgtctactatgctgtttccttgttcctgctagtgctgctttacaaatgcagaccattctatcatacctggcagggcttctgttttattttgtaggctggatgctacccagttcatgaatcgctaataaaagccaattagatctttacataatttgttgagattttattctttgacattcttaaaggtttgggaaaattagaggtagaacataccgtgaggcagcaatctctgggttctggtcattaaaatatgaatttgctaattatacctatcccaacagggggattgagtcaagggaccttgcccttttctggactgacctgcttgattattgccctaagtgattgttagttaggttgcccattggaatctctgccttctggctttaaaaatttttccagattggagtaaattgagctgactggttttgagctttgtaatgttaggggaccagcaatgagttcctctgatccatccaatcattagtagattaaatctttgttttaaacccatcacagtccactattcatccctttttaaaataaccatttaaaaattttctaccctgaattgcattttgaaagggatggttcctaggtaacacaaggtagaaaatttacatctcaaaggcagagaacttacatttcaggcctaaatattgttatttgccaagacagaaagttgatgctaagaagcccagttcagacaaaatggttgaaggtgagtttatttggactaatgctctcacctattgtaagaatttctactgattttcctttatagatacacgtttttacaaagagtttcaaaataactggctaaataccagaaacgcaaattttggagactgatttaattcaataggcggtcttttcaacttagcttctgtttcttaactagattactgagttcagggcagagcccattagcaaatagagcagacaaagggtttcctatttctggatgcagatggatagttctgaaaatgcaaatctgcttcacccaagggcctaatttttataaatattacctagctttctttttncctttggagtaaaacagtaactaagtgaaaagattggcagattcaattttcttataaactagttgcttaaacttttcatttgccttctacgtgagctcttttaaagagacaaacatttttgaaatctttttagaagcttttgcacatcaataggtatccctaggagggcctgattcagaagccctcatttttaaactcaattcttagatgaacagtcttattcatctggaatgttccacataatggtcatcataattctaatttatctttagtaagatttcaccatttttgtaagtatttgcagcttctaggccctaacacatgtaaaaggtaaacatagccagaaggtgaaatacacagttctttaaaaatttaaggatgctggccaggcgaggtggctcacacctgtaatcccagcactttgggaggctgagggctgaggtgcgagaattgtttgagcccaggaggtggaggttgcattgagctgagactgcgccactgcactccagcctggacaacagagtgagatgctgtcttaaaaataaaaaaaaagaattaaggatgccatttttaagttgaatcttgagtctctcagagtcaagataaaagtctgagtgaaacgccatgaggttgggtcactgtgtttgctatctatctacctatctatctatctatctatcta

SEQ ID NO: 427979 - DNA, 4955 bp, Homo sapiens
  misc_feature (4183)..(4183): n is a, c, g, or t
aggcgcactcggcgatcccggcttttccgcgcgcagttcccgcacaggcatcggggggggcaggggcggggcaggggcggggataaatgcggagggacggtccagctttagctctctgctcgccgccgccgctgtcgccgccacctcctctgatctacgaaagtcatgttacccaacaccgggaggctggcaggatgtacagtttttatcacaggtgcaagccgtggcattggcaaagctattgcattgaaagcagcaaaggatggagcaaatattgttattgctgcaaagaccgcccagccacatccaaaacttctaggcacaatctatactgctgctgaagaaattgaagcagttggaggaaaggccttgccatgtattgttgatgtgagagatgaacagcagatcagtgctgcagtggagaaagccatcaagaaatttggaggaattgatattctggtaaataatgccagtgccattagtttgaccaatacattggacacacctaccaagagattggatctgatgatgaacgtgaacaccagaggcacctaccttgcatctaaagcatgtattccttatttgaaaaagagcaaagttgctcatatcctcaatatcagtccaccactgaacctaaatccagtttggttcaaacagcactgtgcttataccattgctaagtatggtatgtctatgtatgtgcttggaatggcagaagaatttaaaggtgaaattgcagtcaatgcattatggcctaaaacagccatacacactgctgctatggatatgctgggaggacctggtatcgaaagccagtgtagaaaagttgatatcattgcagatgcagcatattccattttccaaaagccaaaaagttttactggcaactttgtcattgatgaaaatatcttaaaagaagaaggaatagaaaattttgacgtttatgcaattaaaccaggtcatcctttgcaaccagatttcttcttagatgaatacccagaagcagttagcaagaaagtggaatcaactggtgctgttccagaattcaaagaagagaaactgcagctgcaaccaaaaccacgttctggagctgtggaagaaacatttagaattgttaaggactctctcagtgatgatgttgttaaagccactcaagcaatctatctgtttgaactctccggtgaagatggtggcacgtggtttcttgatctgaaaagcaagggtgggaatgtcggatatggagagccttctgatcaggcagatgtggtgatgagtatgactactgatgactttgtaaaaatgttttcagggaaactaaaaccaacaatggcattcatgtcagggaaattgaagattaaaggtaacatggccctagcaatcaaattggagaagctaatgaatcagatgaatgccagactgtgaaggaaaatataaaaaaaaagtcgactgctatgctcaaaaagtaaaaaaagctcaacagttaaaatctaatgtttgttttctttcctgttatattataaggatatgcacgtttgttctggaaaagatagaatttgtctctaaaagacttgaaattgtaattaaaatggcaagctaatcaaacataagcttcattaagtgggattctaagacagtctgtgtttttatatttcaagggtttaaccctttgagccttacatctcattcactgtctttctccaagaaaagtattttgggcggacagtcagatcaagcagtaaaattagctctttcaaatcttcttgtcatgtaaaatgaagctagtctgttttaaaatttttagttttggattgtatactaatgaaaatcttaatgatgtttttgatttttatatacttattttaaagaaaatcttatatagtacattttacaaaaattataaaaaatgaattagtactggcgaggactaaatgaaacaataatttttcattttgataactagctttccaggtggacttagccataggaaaatattactaatgtaatttaacaaattgctgcatgtattccatttaaaaatatgtttaaattgtcctaaaacaaaataattttctccctaggagtatgcatttggctacagtgttttgaaacagaaaccttagaataggtcattggtatgggctgaactgtgtatcccccaattcatttgttgaggtcctaactcccatttcttttgaatgtgactgttcggagatgaggcctttaaagaggtgacttaagttcaaaggaggctgttagtctaatccaacatggtgtcctttggacataagagataccagcaatgtgtgcacagaacaaagaccaggagaggacacagtgagaaggcagttatctgcaagcaaagagagaggcttcagaagaaacaaaatcaccagcaccttgatctttgacttctaatctccagaatagtgagaaataaatttctgttgttaagccgtccactgtgggaggccgacgcaggaggattgcttgaggccaggagttcaaggccagcctggacaacatagtaagaccctatctctacccccctaataaattaatttaaaaagccccccaatctgtggtattttattatggcagccctagcaagctaatacagtggtttgagaggctgggagggttgaggggaagataaacttttaaaaagctcttatctttcatttcaatcagttaaaaatacttgctcagtgtaacaattttgcttctcagcttccactctaatattgttgtgccattaagcaatttagctaatcctgacatttcttagattcataatgttaggagcatttaatctgtattttacaagttaggaagcagaggatcagagatgggaaaggactagcccaaggccaacattaacaagccctctaacaaaaactttacaatacatttatgttgaatggaactccaagatctcacctctccatccaggaatggagtccatgtaatcaaagtgaacttaaaaataggacagtttcaacaagtcaggagattcacagcaactgatcaaagggagtccagtcaacgtgagcaagcgtgattatgatgaggaagccccctctgctttaatccacacaaggaacgtaacctgaagtaacctgatgttaaccaatctgctgtgtctactatgctgtttccttgttcctgctagtgctgctttacaaatgcagaccattctatcatacctggcagggcttctgttttattttgtaggctggatgctacccagttcatgaatcgctaataaaagccaattagatctttacataatttgttgagattttattctttgacattcttaaaggtttgggaaaattagaggtagaacataccgtgaggcagcaatctctgggttctggtcattaaaatatgaatttgctaattatacctatcccaacagggggattgagtcaagggaccttgcccttttctggactgacctgcttgattattgccctaagtgattgttagttaggttgcccattggaatctctgccttctggctttaaaaatttttccagattggagtaaattgagctgactggttttgagctttgtaatgttaggggaccagcaatgagttcctctgatccatccaatcattagtagattaaatctttgttttaaacccatcacagtccactattcatccctttttaaaataaccatttaaaaattttctaccctgaattgcattttgaaagggatggttcctaggtaacacaaggtagaaaatttacatctcaaaggcagagaacttacatttcaggcctaaatattgttatttgccaagacagaaagttgatgctaagaagcccagttcagacaaaatggttgaaggtgagtttatttggactaatgctctcacctattgtaagaatttctactgattttcctttatagatacacgtttttacaaagagtttcaaaataactggctaaataccagaaacgcaaattttggagactgatttaattcaataggcggtcttttcaacttagcttctgtttcttaactagattactgagttcagggcagagcccattagcaaatagagcagacaaagggtttcctatttctggatgcagatggatagttctgaaaatgcaaatctgcttcacccaagggcctaatttttataaatattacctagctttctttttncctttggagtaaaacagtaactaagtgaaaagattggcagattcaattttcttataaactagttgcttaaacttttcatttgccttctacgtgagctcttttaaagagacaaacatttttgaaatctttttagaagcttttgcacatcaataggtatccctaggagggcctgattcagaagccctcatttttaaactcaattcttagatgaacagtcttattcatctggaatgttccacataatggtcatcataattctaatttatctttagtaagatttcaccatttttgtaagtatttgcagcttctaggccctaacacatgtaaaaggtaaacatagccagaaggtgaaatacacagttctttaaaaatttaaggatgctggccaggcgaggtggctcacacctgtaatcccagcactttgggaggctgaggtcggaggccaggagtttgagaccagcctagccaacatggtgaaaccccgtctctactaaaaatacaaaaattagatgggtgtggcagtgtggcctttaatccagctacccaggaaaagtgctgggattataggtgtgagccaccatgcccagcctaaataattttttaaattccagtttttaattattctttgttaggatacagaaatgctttgtgtcctgcaatactgttaaatctccttattagttttagcagctttttttgtaaatcccttaggattttctatgtatgtgattgttatctgcaaataaaggcagttttatttcttcttttccac

SEQ ID NO: 427980 - DNA, 4835 bp, Homo sapiens
  misc_feature (4183)..(4183): n is a, c, g, or t
aggcgcactcggcgatcccggcttttccgcgcgcagttcccgcacaggcatcggggggggcaggggcggggcaggggcggggataaatgcggagggacggtccagctttagctctctgctcgccgccgccgctgtcgccgccacctcctctgatctacgaaagtcatgttacccaacaccgggaggctggcaggatgtacagtttttatcacaggtgcaagccgtggcattggcaaagctattgcattgaaagcagcaaaggatggagcaaatattgttattgctgcaaagaccgcccagccacatccaaaacttctaggcacaatctatactgctgctgaagaaattgaagcagttggaggaaaggccttgccatgtattgttgatgtgagagatgaacagcagatcagtgctgcagtggagaaagccatcaagaaatttggaggaattgatattctggtaaataatgccagtgccattagtttgaccaatacattggacacacctaccaagagattggatctgatgatgaacgtgaacaccagaggcacctaccttgcatctaaagcatgtattccttatttgaaaaagagcaaagttgctcatatcctcaatatcagtccaccactgaacctaaatccagtttggttcaaacagcactgtgcttataccattgctaagtatggtatgtctatgtatgtgcttggaatggcagaagaatttaaaggtgaaattgcagtcaatgcattatggcctaaaacagccatacacactgctgctatggatatgctgggaggacctggtatcgaaagccagtgtagaaaagttgatatcattgcagatgcagcatattccattttccaaaagccaaaaagttttactggcaactttgtcattgatgaaaatatcttaaaagaagaaggaatagaaaattttgacgtttatgcaattaaaccaggtcatcctttgcaaccagatttcttcttagatgaatacccagaagcagttagcaagaaagtggaatcaactggtgctgttccagaattcaaagaagagaaactgcagctgcaaccaaaaccacgttctggagctgtggaagaaacatttagaattgttaaggactctctcagtgatgatgttgttaaagccactcaagcaatctatctgtttgaactctccggtgaagatggtggcacgtggtttcttgatctgaaaagcaagggtgggaatgtcggatatggagagccttctgatcaggcagatgtggtgatgagtatgactactgatgactttgtaaaaatgttttcagggaaactaaaaccaacaatggcattcatgtcagggaaattgaagattaaaggtaacatggccctagcaatcaaattggagaagctaatgaatcagatgaatgccagactgtgaaggaaaatataaaaaaaaagtcgactgctatgctcaaaaagtaaaaaaagctcaacagttaaaatctaatgtttgttttctttcctgttatattataaggatatgcacgtttgttctggaaaagatagaatttgtctctaaaagacttgaaattgtaattaaaatggcaagctaatcaaacataagcttcattaagtgggattctaagacagtctgtgtttttatatttcaagggtttaaccctttgagccttacatctcattcactgtctttctccaagaaaagtattttgggcggacagtcagatcaagcagtaaaattagctctttcaaatcttcttgtcatgtaaaatgaagctagtctgttttaaaatttttagttttggattgtatactaatgaaaatcttaatgatgtttttgatttttatatacttattttaaagaaaatcttatatagtacattttacaaaaattataaaaaatgaattagtactggcgaggactaaatgaaacaataatttttcattttgataactagctttccaggtggacttagccataggaaaatattactaatgtaatttaacaaattgctgcatgtattccatttaaaaatatgtttaaattgtcctaaaacaaaataattttctccctaggagtatgcatttggctacagtgttttgaaacagaaaccttagaataggtcattggtatgggctgaactgtgtatcccccaattcatttgttgaggtcctaactcccatttcttttgaatgtgactgttcggagatgaggcctttaaagaggtgacttaagttcaaaggaggctgttagtctaatccaacatggtgtcctttggacataagagataccagcaatgtgtgcacagaacaaagaccaggagaggacacagtgagaaggcagttatctgcaagcaaagagagaggcttcagaagaaacaaaatcaccagcaccttgatctttgacttctaatctccagaatagtgagaaataaatttctgttgttaagccgtccactgtgggaggccgacgcaggaggattgcttgaggccaggagttcaaggccagcctggacaacatagtaagaccctatctctacccccctaataaattaatttaaaaagccccccaatctgtggtattttattatggcagccctagcaagctaatacagtggtttgagaggctgggagggttgaggggaagataaacttttaaaaagctcttatctttcatttcaatcagttaaaaatacttgctcagtgtaacaattttgcttctcagcttccactctaatattgttgtgccattaagcaatttagctaatcctgacatttcttagattcataatgttaggagcatttaatctgtattttacaagttaggaagcagaggatcagagatgggaaaggactagcccaaggccaacattaacaagccctctaacaaaaactttacaatacatttatgttgaatggaactccaagatctcacctctccatccaggaatggagtccatgtaatcaaagtgaacttaaaaataggacagtttcaacaagtcaggagattcacagcaactgatcaaagggagtccagtcaacgtgagcaagcgtgattatgatgaggaagccccctctgctttaatccacacaaggaacgtaacctgaagtaacctgatgttaaccaatctgctgtgtctactatgctgtttccttgttcctgctagtgctgctttacaaatgcagaccattctatcatacctggcagggcttctgttttattttgtaggctggatgctacccagttcatgaatcgctaataaaagccaattagatctttacataatttgttgagattttattctttgacattcttaaaggtttgggaaaattagaggtagaacataccgtgaggcagcaatctctgggttctggtcattaaaatatgaatttgctaattatacctatcccaacagggggattgagtcaagggaccttgcccttttctggactgacctgcttgattattgccctaagtgattgttagttaggttgcccattggaatctctgccttctggctttaaaaatttttccagattggagtaaattgagctgactggttttgagctttgtaatgttaggggaccagcaatgagttcctctgatccatccaatcattagtagattaaatctttgttttaaacccatcacagtccactattcatccctttttaaaataaccatttaaaaattttctaccctgaattgcattttgaaagggatggttcctaggtaacacaaggtagaaaatttacatctcaaaggcagagaacttacatttcaggcctaaatattgttatttgccaagacagaaagttgatgctaagaagcccagttcagacaaaatggttgaaggtgagtttatttggactaatgctctcacctattgtaagaatttctactgattttcctttatagatacacgtttttacaaagagtttcaaaataactggctaaataccagaaacgcaaattttggagactgatttaattcaataggcggtcttttcaacttagcttctgtttcttaactagattactgagttcagggcagagcccattagcaaatagagcagacaaagggtttcctatttctggatgcagatggatagttctgaaaatgcaaatctgcttcacccaagggcctaatttttataaatattacctagctttctttttncctttggagtaaaacagtaactaagtgaaaagattggcagattcaattttcttataaactagttgcttaaacttttcatttgccttctacgtgagctcttttaaagagacaaacatttttgaaatctttttagaagcttttgcacatcaataggtatccctaggagggcctgattcagaagccctcatttttaaactcaattcttagatgaacagtcttattcatctggaatgttccacataatggtcatcataattctaatttatctttagtaagatttcaccatttttgtaagtatttgcagcttctaggccctaacacatgtaaaaggtaaacatagccagaaggtgaaatacacagttctttaaaaatttaaggatgctggtctcaaactcctggcttcacgcaatcctcccacctcagcctcccaaagtgctgggattataggtgtgagccaccatgcccagcctaaataattttttaaattccagtttttaattattctttgttaggatacagaaatgctttgtgtcctgcaatactgttaaatctccttattagttttagcagctttttttgtaaatcccttaggattttctatgtatgtgattgttatctgcaaataaaggcagttttatttcttcttttccac

SEQ ID NO: 427981 - DNA, 1425 bp, Homo sapiens
aggcgcactcggcgatcccggcttttccgcgcgcagttcccgcacaggcatcggggggggcaggggcggggcaggggcggggataaatgcggagggacggtccagctttagctctctgctcgccgccgccgctgtcgccgccacctcctctgatctacgaaagtcatgttacccaacaccgggaggctggcaggatgtacagtttttatcacaggtgcaagccgtggcattggcaaagctattgcattgaaagcagcaaaggatggagcaaatattgttattgctgcaaagaccgcccagccacatccaaaacttctaggcacaatctatactgctgctgaagaaattgaagcagttggaggaaaggccttgccatgtattgttgatgtgagagatgaacagcagatcagtgctgcagtggagaaagccatcaagaaatttggaggaattgatattctggtaaataatgccagtgccattagtttgaccaatacattggacacacctaccaagagattggatctgatgatgaacgtgaacaccagaggcacctaccttgcatctaaagcatgtattccttatttgaaaaagagcaaagttgctcatatcctcaatatcagtccaccactgaacctaaatccagtttggttcaaacagcactgtgcttataccattgctaagtatggtatgtctatgtatgtgcttggaatggcagaagaatttaaaggtgaaattgcagtcaatgcattatggcctaaaacagccatacacactgctgctatggatatgctgggaggacctggtatcgaaagccagtgtagaaaagttgatatcattgcagatgcagcatattccattttccaaaagccaaaaagttttactggcaactttgtcattgatgaaaatatcttaaaagaagaaggaatagaaaattttgacgtttatgcaattaaaccaggtcatcctttgcaaccagatttcttcttagatgaatacccagaagcagttagcaagaaagtggaatcaactggtgctgttccagaattcaaagaagagaaactgcagctgcaaccaaaaccacgttctggagctgtggaagaaacatttagaattgttaaggactctctcagtgatgatgttgttaaagccactcaagcaatctatctgtttgaactctccggtgaagatggtggcacgtggtttcttgatctgaaaagcaagggtgggaatgtcggatatggagagccttctgatcaggcagatgtggtgatgagtatgactactgatgactttgtaaaaatgttttcagggaaactaaaaccaacaatggcattcatgtcagggaaattgaagattaaaggtaacatggccctagcaatcaaattggagaagctaatgaatcagatgaatgccagactgtgaagg

SEQ ID NO: 427982 - DNA, 385 bp, Homo sapiens
taggatgagaagggcagaggttcctgggagagcaggtaaaggctttacagaacaggtgatcttttggggattaaatcttgaagataaaatttatcagaggagagaaagataactgaattatgagaaaattaatttaatgaagatcaggtcattcgacagttctcacagaggccttttcttttgcaccagaaagatttttaataaaatagatatgtttattaaacagatgttaaaatcttactatgttgtagttacattaacctaatggtttggggtcaatttttcaggtcatcctttgcaaccagatttcttcttagatgaatacccagaagcagttagcaagaaagtggaatcaactggtaagatctagactatattttatgtt

SEQ ID NO: 427983 - DNA, 3064 bp, Homo sapiens
aggcgcactcggcgatcccggcttttccgcgcgcagttcccgcacaggcatcggggggggcaggggcggggcaggggcggggataaatgcggagggacggtccagctttagctctctgctcgccgccgccgctgtcgccgccacctcctctgatctacgaaagtcatgttacccaacaccgggaggctggcaggatgtacagtttttatcacaggtgcaagccgtggcattggcaaagctattgcattgaaagcagcaaaggatggagcaaatattgttattgctgcaaagaccgcccagccacatccaaaacttctaggcacaatctatactgctgctgaagaaattgaagcagttggaggaaaggccttgccatgtattgttgatgtgagagatgaacagcagatcagtgctgcagtggagaaagccatcaagaaatttggagcttataccattgctaagtatggtatgtctatgtatgtgcttggaatggcagaagaatttaaaggtgaaattgcagtcaatgcattatggcctaaaacagccatacacactgctgctatggatatgctgggaggacctggtatcgaaagccagtgtagaaaagttgatatcattgcagatgcagcatattccattttccaaaagccaaaaagttttactggcaactttgtcattgatgaaaatatcttaaaagaagaaggaatagaaaattttgacgtttatgcaattaaaccaggtcatcctttgcaaccagatttcttcttagatgaatacccagaagcagttagcaagaaagtggaatcaactggtgctgttccagaattcaaagaagagaaactgcagctgcaaccaaaaccacgttctggagctgtggaagaaacatttagaattgttaaggactctctcagtgatgatgttgttaaagccactcaagcaatctatctgtttgaactctccggtgaagatggtggcacgtggtttcttgatctgaaaagcaagggtgggaatgtcggatatggagagccttctgatcaggcagatgtggtgatgagtatgactactgatgactttgtaaaaatgttttcagggaaactaaaaccaacaatggcattcatgtcagggaaattgaagattaaaggtaacatggccctagcaatcaaattggagaagctaatgaatcagatgaatgccagactgtgaaggaaaatataaaaaaaaagtcgactgctatgctcaaaaagtaaaaaaagctcaacagttaaaatctaatgtttgttttctttcctgttatattataaggatatgcacgtttgttctggaaaagatagaatttgtctctaaaagacttgaaattgtaattaaaatggcaagctaatcaaacataagcttcattaagtgggattctaagacagtctgtgtttttatatttcaagggtttaaccctttgagccttacatctcattcactgtctttctccaagaaaagtattttgggcggacagtcagatcaagcagtaaaattagctctttcaaatcttcttgtcatgtaaaatgaagctagtctgttttaaaatttttagttttggattgtatactaatgaaaatcttaatgatgtttttgatttttatatacttattttaaagaaaatcttatatagtacattttacaaaaattataaaaaatgaattagtactggcgaggactaaatgaaacaataatttttcattttgataactagctttccaggtggacttagccataggaaaatattactaatgtaatttaacaaattgctgcatgtattccatttaaaaatatgtttaaattgtcctaaaacaaaataattttctccctaggagtatgcatttggctacagtgttttgaaacagaaaccttagaataggtcattggtatgggctgaactgtgtatcccccaattcatttgttgaggtcctaactcccatttcttttgaatgtgactgttcggagatgaggcctttaaagaggtgacttaagttcaaaggaggctgttagtctaatccaacatggtgtcctttggacataagagataccagcaatgtgtgcacagaacaaagaccaggagaggacacagtgagaaggcagttatctgcaagcaaagagagaggcttcagaagaaacaaaatcaccagcaccttgatctttgacttctaatctccagaatagtgagaaataaatttctgttgttaagccgtccactgtgggaggccgacgcaggaggattgcttgaggccaggagttcaaggccagcctggacaacatagtaagaccctatctctacccccctaataaattaatttaaaaagccccccaatctgtggtattttattatggcagccctagcaagctaatacagtggtttgagaggctgggagggttgaggggaagataaacttttaaaaagctcttatctttcatttcaatcagttaaaaatacttgctcagtgtaacaattttgcttctcagcttccactctaatattgttgtgccattaagcaatttagctaatcctgacatttcttagattcataatgttaggagcatttaatctgtattttacaagttaggaagcagaggatcagagatgggaaaggactagcccaaggccaacattaacaagccctctaacaaaaactttacaatacatttatgttgaatggaactccaagatctcacctctccatccaggaatggagtccatgtaatcaaagtgaacttaaaaataggacagtttcaacaagtcaggagattcacagcaactgatcaaagggagtccagtcaacgtgagcaagcgtgattatgatgaggaagccccctctgctttaatccacacaaggaacgtaacctgaagtaacctgatgttaaccaatctgctgtgtctactatgctgtttccttgttcctgctagtgctgctttacaaatgcagaccattctatcatacctggcagggcttctgttttattttgtaggctggatgctacccagttcatgaatcgctaataaaagccaattagatcttta

SEQ ID NO: 427984 - DNA, 3283 bp, Homo sapiens
aggcgcactcggcgatcccggcttttccgcgcgcagttcccgcacaggcatcggggggggcaggggcggggcaggggcggggataaatgcggagggacggtccagctttagctctctgctcgccgccgccgctgtcgccgccacctcctctgatctacgaaagtcatgttacccaacaccgggaggctggcaggatgtacagtttttatcacaggtgcaagccgtggcattggcaaagctattgcattgaaagcagcaaaggatggagcaaatattgttattgctgcaaagaccgcccagccacatccaaaacttctaggcacaatctatactgctgctgaagaaattgaagcagttggaggaaaggccttgccatgtattgttgatgtgagagatgaacagcagatcagtgctgcagtggagaaagccatcaagaaatttggaggaattgatattctggtaaataatgccagtgccattagtttgaccaatacattggacacacctaccaagagattggatctgatgatgaacgtgaacaccagaggcacctaccttgcatctaaagcatgtattccttatttgaaaaagagcaaagttgctcatatcctcaatatcagtccaccactgaacctaaatccagtttggttcaaacagcactgtgcttataccattgctaagtatggtatgtctatgtatgtgcttggaatggcagaagaatttaaaggtgaaattgcagtcaatgcattatggcctaaaacagccatacacactgctgctatggatatgctgggaggacctggtatcgaaagccagtgtagaaaagttgatatcattgcagatgcagcatattccattttccaaaagccaaaaagttttactggcaactttgtcattgatgaaaatatcttaaaagaagaaggaatagaaaattttgacgtttatgcaattaaaccaggtcatcctttgcaaccagatttcttcttagatgaatacccagaagcagttagcaagaaagtggaatcaactggtgctgttccagaattcaaagaagagaaactgcagctgcaaccaaaaccacgttctggagctgtggaagaaacatttagaattgttaaggactctctcagtgatgatgttgttaaagccactcaagcaatctatctgtttgaactctccggtgaagatggtggcacgtggtttcttgatctgaaaagcaagggtgggaatgtcggatatggagagccttctgatcaggcagatgtggtgatgagtatgactactgatgactttgtaaaaatgttttcagggaaactaaaaccaacaatggcattcatgtcagggaaattgaagattaaaggtaacatggccctagcaatcaaattggagaagctaatgaatcagatgaatgccagactgtgaaggaaaatataaaaaaaaagtcgactgctatgctcaaaaagtaaaaaaagctcaacagttaaaatctaatgtttgttttctttcctgttatattataaggatatgcacgtttgttctggaaaagatagaatttgtctctaaaagacttgaaattgtaattaaaatggcaagctaatcaaacataagcttcattaagtgggattctaagacagtctgtgtttttatatttcaagggtttaaccctttgagccttacatctcattcactgtctttctccaagaaaagtattttgggcggacagtcagatcaagcagtaaaattagctctttcaaatcttcttgtcatgtaaaatgaagctagtctgttttaaaatttttagttttggattgtatactaatgaaaatcttaatgatgtttttgatttttatatacttattttaaagaaaatcttatatagtacattttacaaaaattataaaaaatgaattagtactggcgaggactaaatgaaacaataatttttcattttgataactagctttccaggtggacttagccataggaaaatattactaatgtaatttaacaaattgctgcatgtattccatttaaaaatatgtttaaattgtcctaaaacaaaataattttctccctaggagtatgcatttggctacagtgttttgaaacagaaaccttagaataggtcattggtatgggctgaactgtgtatcccccaattcatttgttgaggtcctaactcccatttcttttgaatgtgactgttcggagatgaggcctttaaagaggtgacttaagttcaaaggaggctgttagtctaatccaacatggtgtcctttggacataagagataccagcaatgtgtgcacagaacaaagaccaggagaggacacagtgagaaggcagttatctgcaagcaaagagagaggcttcagaagaaacaaaatcaccagcaccttgatctttgacttctaatctccagaatagtgagaaataaatttctgttgttaagccgtccactgtgggaggccgacgcaggaggattgcttgaggccaggagttcaaggccagcctggacaacatagtaagaccctatctctacccccctaataaattaatttaaaaagccccccaatctgtggtattttattatggcagccctagcaagctaatacagtggtttgagaggctgggagggttgaggggaagataaacttttaaaaagctcttatctttcatttcaatcagttaaaaatacttgctcagtgtaacaattttgcttctcagcttccactctaatattgttgtgccattaagcaatttagctaatcctgacatttcttagattcataatgttaggagcatttaatctgtattttacaagttaggaagcagaggatcagagatgggaaaggactagcccaaggccaacattaacaagccctctaacaaaaactttacaatacatttatgttgaatggaactccaagatctcacctctccatccaggaatggagtccatgtaatcaaagtgaacttaaaaataggacagtttcaacaagtcaggagattcacagcaactgatcaaagggagtccagtcaacgtgagcaagcgtgattatgatgaggaagccccctctgctttaatccacacaaggaacgtaacctgaagtaacctgatgttaaccaatctgctgtgtctactatgctgtttccttgttcctgctagtgctgctttacaaatgcagaccattctatcatacctggcagggcttctgttttattttgtaggctggatgctacccagttcatgaatcgctaataaaagccaattagatcttta

SEQ ID NO: 427985 - DNA, 4980 bp, Homo sapiens
  misc_feature (4183)..(4183): n is a, c, g, or t
aggcgcactcggcgatcccggcttttccgcgcgcagttcccgcacaggcatcggggggggcaggggcggggcaggggcggggataaatgcggagggacggtccagctttagctctctgctcgccgccgccgctgtcgccgccacctcctctgatctacgaaagtcatgttacccaacaccgggaggctggcaggatgtacagtttttatcacaggtgcaagccgtggcattggcaaagctattgcattgaaagcagcaaaggatggagcaaatattgttattgctgcaaagaccgcccagccacatccaaaacttctaggcacaatctatactgctgctgaagaaattgaagcagttggaggaaaggccttgccatgtattgttgatgtgagagatgaacagcagatcagtgctgcagtggagaaagccatcaagaaatttggaggaattgatattctggtaaataatgccagtgccattagtttgaccaatacattggacacacctaccaagagattggatctgatgatgaacgtgaacaccagaggcacctaccttgcatctaaagcatgtattccttatttgaaaaagagcaaagttgctcatatcctcaatatcagtccaccactgaacctaaatccagtttggttcaaacagcactgtgcttataccattgctaagtatggtatgtctatgtatgtgcttggaatggcagaagaatttaaaggtgaaattgcagtcaatgcattatggcctaaaacagccatacacactgctgctatggatatgctgggaggacctggtatcgaaagccagtgtagaaaagttgatatcattgcagatgcagcatattccattttccaaaagccaaaaagttttactggcaactttgtcattgatgaaaatatcttaaaagaagaaggaatagaaaattttgacgtttatgcaattaaaccaggtcatcctttgcaaccagatttcttcttagatgaatacccagaagcagttagcaagaaagtggaatcaactggtgctgttccagaattcaaagaagagaaactgcagctgcaaccaaaaccacgttctggagctgtggaagaaacatttagaattgttaaggactctctcagtgatgatgttgttaaagccactcaagcaatctatctgtttgaactctccggtgaagatggtggcacgtggtttcttgatctgaaaagcaagggtgggaatgtcggatatggagagccttctgatcaggcagatgtggtgatgagtatgactactgatgactttgtaaaaatgttttcagggaaactaaaaccaacaatggcattcatgtcagggaaattgaagattaaaggtaacatggccctagcaatcaaattggagaagctaatgaatcagatgaatgccagactgtgaaggaaaatataaaaaaaaagtcgactgctatgctcaaaaagtaaaaaaagctcaacagttaaaatctaatgtttgttttctttcctgttatattataaggatatgcacgtttgttctggaaaagatagaatttgtctctaaaagacttgaaattgtaattaaaatggcaagctaatcaaacataagcttcattaagtgggattctaagacagtctgtgtttttatatttcaagggtttaaccctttgagccttacatctcattcactgtctttctccaagaaaagtattttgggcggacagtcagatcaagcagtaaaattagctctttcaaatcttcttgtcatgtaaaatgaagctagtctgttttaaaatttttagttttggattgtatactaatgaaaatcttaatgatgtttttgatttttatatacttattttaaagaaaatcttatatagtacattttacaaaaattataaaaaatgaattagtactggcgaggactaaatgaaacaataatttttcattttgataactagctttccaggtggacttagccataggaaaatattactaatgtaatttaacaaattgctgcatgtattccatttaaaaatatgtttaaattgtcctaaaacaaaataattttctccctaggagtatgcatttggctacagtgttttgaaacagaaaccttagaataggtcattggtatgggctgaactgtgtatcccccaattcatttgttgaggtcctaactcccatttcttttgaatgtgactgttcggagatgaggcctttaaagaggtgacttaagttcaaaggaggctgttagtctaatccaacatggtgtcctttggacataagagataccagcaatgtgtgcacagaacaaagaccaggagaggacacagtgagaaggcagttatctgcaagcaaagagagaggcttcagaagaaacaaaatcaccagcaccttgatctttgacttctaatctccagaatagtgagaaataaatttctgttgttaagccgtccactgtgggaggccgacgcaggaggattgcttgaggccaggagttcaaggccagcctggacaacatagtaagaccctatctctacccccctaataaattaatttaaaaagccccccaatctgtggtattttattatggcagccctagcaagctaatacagtggtttgagaggctgggagggttgaggggaagataaacttttaaaaagctcttatctttcatttcaatcagttaaaaatacttgctcagtgtaacaattttgcttctcagcttccactctaatattgttgtgccattaagcaatttagctaatcctgacatttcttagattcataatgttaggagcatttaatctgtattttacaagttaggaagcagaggatcagagatgggaaaggactagcccaaggccaacattaacaagccctctaacaaaaactttacaatacatttatgttgaatggaactccaagatctcacctctccatccaggaatggagtccatgtaatcaaagtgaacttaaaaataggacagtttcaacaagtcaggagattcacagcaactgatcaaagggagtccagtcaacgtgagcaagcgtgattatgatgaggaagccccctctgctttaatccacacaaggaacgtaacctgaagtaacctgatgttaaccaatctgctgtgtctactatgctgtttccttgttcctgctagtgctgctttacaaatgcagaccattctatcatacctggcagggcttctgttttattttgtaggctggatgctacccagttcatgaatcgctaataaaagccaattagatctttacataatttgttgagattttattctttgacattcttaaaggtttgggaaaattagaggtagaacataccgtgaggcagcaatctctgggttctggtcattaaaatatgaatttgctaattatacctatcccaacagggggattgagtcaagggaccttgcccttttctggactgacctgcttgattattgccctaagtgattgttagttaggttgcccattggaatctctgccttctggctttaaaaatttttccagattggagtaaattgagctgactggttttgagctttgtaatgttaggggaccagcaatgagttcctctgatccatccaatcattagtagattaaatctttgttttaaacccatcacagtccactattcatccctttttaaaataaccatttaaaaattttctaccctgaattgcattttgaaagggatggttcctaggtaacacaaggtagaaaatttacatctcaaaggcagagaacttacatttcaggcctaaatattgttatttgccaagacagaaagttgatgctaagaagcccagttcagacaaaatggttgaaggtgagtttatttggactaatgctctcacctattgtaagaatttctactgattttcctttatagatacacgtttttacaaagagtttcaaaataactggctaaataccagaaacgcaaattttggagactgatttaattcaataggcggtcttttcaacttagcttctgtttcttaactagattactgagttcagggcagagcccattagcaaatagagcagacaaagggtttcctatttctggatgcagatggatagttctgaaaatgcaaatctgcttcacccaagggcctaatttttataaatattacctagctttctttttncctttggagtaaaacagtaactaagtgaaaagattggcagattcaattttcttataaactagttgcttaaacttttcatttgccttctacgtgagctcttttaaagagacaaacatttttgaaatctttttagaagcttttgcacatcaataggtatccctaggagggcctgattcagaagccctcatttttaaactcaattcttagatgaacagtcttattcatctggaatgttccacataatggtcatcataattctaatttatctttagtaagatttcaccatttttgtaagtatttgcagcttctaggccctaacacatgtaaaaggtaaacatagccagaaggtgaaatacacagttctttaaaaatttaaggatgctggccaggcgaggtggctcacacctgtaatcccagcactttgggaggctgaggtcggaggccaggagtttgagaccagcctagccaacatggtgaaaccccgtctctactaaaaatacaaaaattagatgggtgtggcagtgtggcctttaatccagctacccaggaggctgaggtgcgagaattgtttgagcccaggaggtggaggttgcattgagctgagactgcgccactgcactccagcctggacaacagagtgagatgctgtcttaaaaataaaaaaaaagaattaaggatgccatttttaagttgaatcttgagtctctcagagtcaagataaaagtctgagtgaaacgccatgaggttgggtcactgtgtttgctatctatctacctatctatctatctatctatcta

SEQ ID NO: 427986 - DNA, 4786 bp, Homo sapiens
  misc_feature (4183)..(4183): n is a, c, g, or t
aggcgcactcggcgatcccggcttttccgcgcgcagttcccgcacaggcatcggggggggcaggggcggggcaggggcggggataaatgcggagggacggtccagctttagctctctgctcgccgccgccgctgtcgccgccacctcctctgatctacgaaagtcatgttacccaacaccgggaggctggcaggatgtacagtttttatcacaggtgcaagccgtggcattggcaaagctattgcattgaaagcagcaaaggatggagcaaatattgttattgctgcaaagaccgcccagccacatccaaaacttctaggcacaatctatactgctgctgaagaaattgaagcagttggaggaaaggccttgccatgtattgttgatgtgagagatgaacagcagatcagtgctgcagtggagaaagccatcaagaaatttggaggaattgatattctggtaaataatgccagtgccattagtttgaccaatacattggacacacctaccaagagattggatctgatgatgaacgtgaacaccagaggcacctaccttgcatctaaagcatgtattccttatttgaaaaagagcaaagttgctcatatcctcaatatcagtccaccactgaacctaaatccagtttggttcaaacagcactgtgcttataccattgctaagtatggtatgtctatgtatgtgcttggaatggcagaagaatttaaaggtgaaattgcagtcaatgcattatggcctaaaacagccatacacactgctgctatggatatgctgggaggacctggtatcgaaagccagtgtagaaaagttgatatcattgcagatgcagcatattccattttccaaaagccaaaaagttttactggcaactttgtcattgatgaaaatatcttaaaagaagaaggaatagaaaattttgacgtttatgcaattaaaccaggtcatcctttgcaaccagatttcttcttagatgaatacccagaagcagttagcaagaaagtggaatcaactggtgctgttccagaattcaaagaagagaaactgcagctgcaaccaaaaccacgttctggagctgtggaagaaacatttagaattgttaaggactctctcagtgatgatgttgttaaagccactcaagcaatctatctgtttgaactctccggtgaagatggtggcacgtggtttcttgatctgaaaagcaagggtgggaatgtcggatatggagagccttctgatcaggcagatgtggtgatgagtatgactactgatgactttgtaaaaatgttttcagggaaactaaaaccaacaatggcattcatgtcagggaaattgaagattaaaggtaacatggccctagcaatcaaattggagaagctaatgaatcagatgaatgccagactgtgaaggaaaatataaaaaaaaagtcgactgctatgctcaaaaagtaaaaaaagctcaacagttaaaatctaatgtttgttttctttcctgttatattataaggatatgcacgtttgttctggaaaagatagaatttgtctctaaaagacttgaaattgtaattaaaatggcaagctaatcaaacataagcttcattaagtgggattctaagacagtctgtgtttttatatttcaagggtttaaccctttgagccttacatctcattcactgtctttctccaagaaaagtattttgggcggacagtcagatcaagcagtaaaattagctctttcaaatcttcttgtcatgtaaaatgaagctagtctgttttaaaatttttagttttggattgtatactaatgaaaatcttaatgatgtttttgatttttatatacttattttaaagaaaatcttatatagtacattttacaaaaattataaaaaatgaattagtactggcgaggactaaatgaaacaataatttttcattttgataactagctttccaggtggacttagccataggaaaatattactaatgtaatttaacaaattgctgcatgtattccatttaaaaatatgtttaaattgtcctaaaacaaaataattttctccctaggagtatgcatttggctacagtgttttgaaacagaaaccttagaataggtcattggtatgggctgaactgtgtatcccccaattcatttgttgaggtcctaactcccatttcttttgaatgtgactgttcggagatgaggcctttaaagaggtgacttaagttcaaaggaggctgttagtctaatccaacatggtgtcctttggacataagagataccagcaatgtgtgcacagaacaaagaccaggagaggacacagtgagaaggcagttatctgcaagcaaagagagaggcttcagaagaaacaaaatcaccagcaccttgatctttgacttctaatctccagaatagtgagaaataaatttctgttgttaagccgtccactgtgggaggccgacgcaggaggattgcttgaggccaggagttcaaggccagcctggacaacatagtaagaccctatctctacccccctaataaattaatttaaaaagccccccaatctgtggtattttattatggcagccctagcaagctaatacagtggtttgagaggctgggagggttgaggggaagataaacttttaaaaagctcttatctttcatttcaatcagttaaaaatacttgctcagtgtaacaattttgcttctcagcttccactctaatattgttgtgccattaagcaatttagctaatcctgacatttcttagattcataatgttaggagcatttaatctgtattttacaagttaggaagcagaggatcagagatgggaaaggactagcccaaggccaacattaacaagccctctaacaaaaactttacaatacatttatgttgaatggaactccaagatctcacctctccatccaggaatggagtccatgtaatcaaagtgaacttaaaaataggacagtttcaacaagtcaggagattcacagcaactgatcaaagggagtccagtcaacgtgagcaagcgtgattatgatgaggaagccccctctgctttaatccacacaaggaacgtaacctgaagtaacctgatgttaaccaatctgctgtgtctactatgctgtttccttgttcctgctagtgctgctttacaaatgcagaccattctatcatacctggcagggcttctgttttattttgtaggctggatgctacccagttcatgaatcgctaataaaagccaattagatctttacataatttgttgagattttattctttgacattcttaaaggtttgggaaaattagaggtagaacataccgtgaggcagcaatctctgggttctggtcattaaaatatgaatttgctaattatacctatcccaacagggggattgagtcaagggaccttgcccttttctggactgacctgcttgattattgccctaagtgattgttagttaggttgcccattggaatctctgccttctggctttaaaaatttttccagattggagtaaattgagctgactggttttgagctttgtaatgttaggggaccagcaatgagttcctctgatccatccaatcattagtagattaaatctttgttttaaacccatcacagtccactattcatccctttttaaaataaccatttaaaaattttctaccctgaattgcattttgaaagggatggttcctaggtaacacaaggtagaaaatttacatctcaaaggcagagaacttacatttcaggcctaaatattgttatttgccaagacagaaagttgatgctaagaagcccagttcagacaaaatggttgaaggtgagtttatttggactaatgctctcacctattgtaagaatttctactgattttcctttatagatacacgtttttacaaagagtttcaaaataactggctaaataccagaaacgcaaattttggagactgatttaattcaataggcggtcttttcaacttagcttctgtttcttaactagattactgagttcagggcagagcccattagcaaatagagcagacaaagggtttcctatttctggatgcagatggatagttctgaaaatgcaaatctgcttcacccaagggcctaatttttataaatattacctagctttctttttncctttggagtaaaacagtaactaagtgaaaagattggcagattcaattttcttataaactagttgcttaaacttttcatttgccttctacgtgagctcttttaaagagacaaacatttttgaaatctttttagaagcttttgcacatcaataggtatccctaggagggcctgattcagaagccctcatttttaaactcaattcttagatgaacagtcttattcatctggaatgttccacataatggtcatcataattctaatttatctttagtaagatttcaccatttttgtaagtatttgcagcttctaggccctaacacatgtaaaaggtaaacatagccagaaggtgaaatacacagttctttaaaaatttaaggataaagtgctgggattataggtgtgagccaccatgcccagcctaaataattttttaaattccagtttttaattattctttgttaggatacagaaatgctttgtgtcctgcaatactgttaaatctccttattagttttagcagctttttttgtaaatcccttaggattttctatgtatgtgattgttatctgcaaataaaggcagttttatttcttcttttccac

SEQ ID NO: 427987 - DNA, 2569 bp, Homo sapiens
aggcgcactcggcgatcccggcttttccgcgcgcagttcccgcacaggcatcggggggggcaggggcggggcaggggcggggataaatgcggagggacggtccagctttagctctctgctcgccgccgccgctgtcgccgccacctcctctgatctacgaaagtcatgttacccaacaccgggaggctggcaggatgtacagtttttatcacaggtgcaagccgtggcattggcaaagctattgcattgaaagcagcaaaggatggagcaaatattgttattgctgcaaagaccgcccagccacatccaaaacttctaggcacaatctatactgctgctgaagaaattgaagcagttggaggaaaggccttgccatgtattgttgatgtgagagatgaacagcagatcagtgctgcagtggagaaagccatcaagaaatttggaggaattgatattctggtaaataatgccagtgccattagtttgaccaatacattggacacacctaccaagagattggatctgatgatgaacgtgaacaccagaggcacctaccttgcatctaaagcatgtattccttatttgaaaaagagcaaagttgctcatatcctcaatatcagtccaccactgaacctaaatccagtttggttcaaacagcactgtgcttataccattgctaagtatggtatgtctatgtatgtgcttggaatggcagaagaatttaaaggtgaaattgcagtcaatgcattatggcctaaaacagccatacacactgctgctatggatatgctgggaggacctggtatcgaaagccagtgtagaaaagttgatatcattgcagatgcagcatattccattttccaaaagccaaaaagttttactggcaactttgtcattgatgaaaatatcttaaaagaagaaggaatagaaaattttgacgtttatgcaattaaaccaggtcatcctttgcaaccagatttcttcttagatgaatacccagaagcagttagcaagaaagtggaatcaactggtgctgttccagaattcaaagaagagaaactgcagctgcaaccaaaaccacgttctggagctgtggaagaaacatttagaattgttaaggactctctcagtgatgatgttgttaaagccactcaagcaatctatctgtttgaactctccggtgaagatggtggcacgtggtttcttgatctgaaaagcaagggtgggaatgtcggatatggagagccttctgatcaggcagatgtggtgatgagtatgactactgatgactttgtaaaaatgttttcagggaaactaaaaccaacaatggcattcatgtcagggaaattgaagattaaaggtaacatggccctagcaatcaaattggagaagctaatgaatcagatgaatgccagactgtgaaggaaaatataaaaaaaaagtcgactgctatgctcaaaaagtaaaaaaagctcaacagttaaaatctaatgtttgttttctttcctgttatattataaggatatgcacgtttgttctggaaaagatagaatttgtctctaaaagacttgaaattgtaattaaaatggcaagctaatcaaacataagcttcattaagtgggattctaagacagtctgtgtttttatatttcaagggtttaaccctttgagccttacatctcattcactgtctttctccaagaaaagtattttgggcggacagtcagatcaagcagtaaaattagctctttcaaatcttcttgtcatgtaaaatgaagctagtctgttttaaaatttttagttttggattgtatactaatgaaaatcttaatgatgtttttgatttttatatacttattttaaagaaaatcttatatagtacattttacaaaaattataaaaaatgaattagtactggcgaggactaaatgaaacaataatttttcattttgataactagctttccaggtggacttagccataggaaaatattactaatgtaatttaacaaattgctgcatgtattccatttaaaaatatgtttaaattgtcctaaaacaaaataattttctccctaggagtatgcatttggctacagtgttttgaaacagaaaccttagaataggtcattggtatgggctgaactgtgtatcccccaattcatttgttgaggtcctaactcccatttcttttgaatgtgactgttcggagatgaggcctttaaagaggtgacttaagttcaaaggaggctgttagtctaatccaacatggtgtcctttggacataagagataccagcaatgtgtgcacagaacaaagaccaggagaggacacagtgagaaggcagttatctgcaagcaaagagagaggcttcagaagaaacaaaatcaccagcaccttgatctttgacttctaatctccagaatagtgagaaataaatttctgttgttaagccgtccactgtgggaggccgacgcaggaggattgcttgaggccaggagttcaaggccagcctggacaacatagtaagaccctatctctacccccctaataaattaatttaaaaagcc

SEQ ID NO: 427988 - DNA, 1501 bp, Homo sapiens
aggcgcactcggcgatcccggcttttccgcgcgcagttcccgcacaggcatcggggggggcaggggcggggcaggggcggggataaatgcggagggacggtccagctttagctctctgctcgccgccgccgctgtcgccgccacctcctctgatctacgaaagtcatgttacccaacaccgggaggctggcaggatgtacagtttttatcacaggtgcaagccgtggcattggcaaagctattgcattgaaagcagcaaaggatggagcaaatattgttattgctgcaaagaccgcccagccacatccaaaacttctaggcacaatctatactgctgctgaagaaattgaagcagttggaggaaaggccttgccatgtattgttgatgtgagagatgaacagcagatcagtgctgcagtggagaaagccatcaagaaatttggaggaattgatattctggtaaataatgccagtgccattagtttgaccaatacattggacacacctaccaagagattggatctgatgatgaacgtgaacaccagaggcacctaccttgcatctaaagcatgtattccttatttgaaaaagagcaaagttgctcatatcctcaatatcagtccaccactgaacctaaatccagtttggttcaaacagcactgtggtaggtggtaggtggtagggtgaggggatggtttgtgcttaatttgttttgaattaaatctgtgtatgtctgatgtaatcacaatctgcacataacattcatcattgaattttctatgccaagtcattaagtggcatttggaaagtagattcttcatcttttatctgtaatttaaaaaattgaggcataattgacattcaataaaatgcacagctcttaatggttcagtttgatgagttttgagaaatgtatataaccaacacccaaatcaagatacagatttttaccatttcagaaagctctttcatttcccaatgagtgtgttttactgtgtgtaatttattcatctataaagttggttaaaaactatctatgagatactttatttttcttagacaggtatgcacctgtagtcctagctacttgaaaggctgaggtgggaggatcgcttgagcccaggagtttgaggctgcagtgagctaggatcatggcactgcactcctgcctgggtgacagagcgagaccctgactctaaaaaaaaaaaaaaaaacgacaaaaaaaccctattacctttcatagcaaactaatggtttaaggtaaatatgctaagcaacaagatttacatatagatgcctcctttaaaatagttgtatcaaacacttagtttttatttcagcacagttcactaacatttggaaaggcacttggaatgggaacccacagagcaaaactgaaagaagttccactttaattgactaggttaaatacatttgcagcctttttttattattgttttactagcagtagtttccctttaaataaacactttcattctta

SEQ ID NO: 427989 - DNA, 512 bp, Homo sapiens
agtactgtatacctgtgtgtttgcttttatatgtatacttttatttccagtattatcacttaattgctatgtagatatataactgacatttataaataacactttcctatttatagtatgttattaataggtcataattatactaatggagtaaatctcactaaagctgacgtacatagaagaaattttggattgatcataatctgcttaagtgagaccttcctgtgacttagttaattttatgtgtcttttatcatggtacagtatagcattctgattgtgggtgaagtgatacaccctctaaatactgcatctaaaaacaacctcaccttaattgcaggctgaacagaattttggaagggtttcattcacaaacctgcatgtatgcctttaagaaagttcctatattcttctgagggtcatagtttggtgtcttacctcttgttcaatacagcaaggacacaaactgaccaaaaacgatgataaagggtcaagagtcactgacattgtca

SEQ ID NO: 427990 - DNA, 920 bp, Homo sapiens
  misc_feature (704)..(704): n is a, c, g, or t
  misc_feature (717)..(718): n is a, c, g, or t
  misc_feature (722)..(722): n is a, c, g, or t
  misc_feature (724)..(724): n is a, c, g, or t
  misc_feature (726)..(726): n is a, c, g, or t
  misc_feature (728)..(728): n is a, c, g, or t
  misc_feature (733)..(733): n is a, c, g, or t
  misc_feature (742)..(744): n is a, c, g, or t
  misc_feature (753)..(753): n is a, c, g, or t
  misc_feature (765)..(766): n is a, c, g, or t
  misc_feature (773)..(773): n is a, c, g, or t
  misc_feature (776)..(777): n is a, c, g, or t
ctggagtgcagtggcatgatctcagctcactgcaacttccaactccctggttcaagcgattctcctgcctcagcctcccgagtagctgggattataggcacacaccagcacaccaggctaatttttgtatttttagtaaagacagggtttcaccatgttagccaggatggtctcgatctcctgacctcgtgatccacctgcctctgcctcccaaagtgctgggattacaggtgtgagccacctcgcccggcccatttttccccatttcatttcctgtctccatgccctcttcttgaccccagtgatggccacgtcttgtttctagaatcccttcctttgcacaagccatattctgaactcttaattccttcccttaacttcaatccctatgtctcctgtcctacctcatggttttcctggccccacacctgatgctcagagcccactgtgaacccctggtgcctctttttggactcggttctcccttctctcccacagaccttcccctcctccaatgagtcccgccaatgccccaatgcccgttgccagttcgccttctacggtggtgagtcgggctaccaccgggccctgctgggcctgcagatcttcaatgccttcatgttcttctggttggccaacttcgtgctggcgctgggccaggtcacgctgtatggcctggcagcggagactgcggctccgtcttntgcttggcggggnnaggncnanangtccnggctggggnnnctggcaggnacaccgggaacnnaccgaanggnngaccgcacaaagtcgcgggccaggcgtccaggggtcggggaaacacatccaaaaagacacaggcagaatagggcggagtgccgagaaagagggggcagccgggaacagggaggaacaggaccctgtgcacgtggtcgcgcgcc

SEQ ID NO: 427991 - DNA, 240 bp, Homo sapiens
ggaactgcaagtgtaaagtccctgaggcagaagcctcgatgtttgcttctgttaaatgggggcagttgtagctgctttgcaaagttgcaggatcctggagagggagaacccctggccccaggggaaagaggggggggtctcccgtttcctgtgcctgcaccagccctgcccccattgcgtctgcacacccctgcgtgtaactgcattccaaccactaataaagtgcctattgtacaggtc

SEQ ID NO: 427992 - DNA, 226 bp, Homo sapiens
tcacacctgcccctcgtgtcctcatcagagtggctgtcctggataaagttactgacttcctcttcctgttgggcaaacttctgatcgttggtagtgtgggtgagtgccgcccacctagcctctcggggtgtgggagcctgatttctgtcttctgtgatgagtgtcatcttcttaggaggctgtttcctatatccagaacccttcgccatcttgctttcttctcctt

SEQ ID NO: 427993 - DNA, 3509 bp, Homo sapiens
gggagcagctgcagccccgcccgcgccctcccgggtcccttagtctgggcagctgcccagctcgggccggtctgaccggtttgggccgccccgcctggcgctgtgctgggaggagccgccgccagtcgcgcggtcagtgcctccctccagactcgggagggtcgagggggcgcgggagagagcgcgggcggccgccggggctggtcgcctgcagggatgggggacgagcggccccactactacgggaaacacggaacgccacagaagtatgatcccactttcaaaggacccatttacaataggggctgcacggatatcatatgctgtgtgttcctgctcctggccattgtgggctacgtggctgtaggcatcatagcctggactcatggagaccctcgaaaggtgatctaccccactgatagccggggcgagttctgcgggcagaagggcacaaaaaacgagaacaaaccctatctgttttatttcaacattgtgaaatgtgccagccccctggttctgctggaattccaatgtcccactccccagatctgcgtggaaaaatgccccgaccgctacctcacgtacctgaatgctcgcagctcccgggactttgagtactataagcagttctgtgttcctggcttcaagaacaataaaggagtggctgaggtgcttcgagatggtgactgccctgctgtcctcatccccagcaaacccttggcccggagatgcttccccgctatccacgcctacaagggtgtcctgatggtgggcaatgagacgacctatgaggatgggcatggctcccggaaaaacatcacagacctggtggagggcgccaagaaagccaatggagtcctagaggcgcggcaactcgccatgcgcatatttgaagattacaccgtctcttggtactggattatcataggcctggtcattgccatggcgatgagcctcctgttcatcatcctgcttcgcttcctggctggtattatggtctgggtgatgatcatcatggtgattctggtgctgggctacggaatatttcactgctacatggagtactcccgactgcgtggtgaggccggctctgatgtctctttggtggacctcggctttcagacggatttccgggtgtacctgcacttacggcagacctggttggcctttatgatcattctgagtatccttgaagtcattatcatcttgctgctcatctttctccggaagagaattctcatcgcgattgcactcatcaaagaagccagcagggctgtgggatacgtcatgtgctccttgctctacccactggtcaccttcttcttgctgtgcctctgcatcgcctactgggccagcactgctgtcttcctgtccacttccaacgaagcggtctataagatctttgatgacagcccctgcccatttactgcgaaaacctgcaacccagagaccttcccctcctccaatgagtcccgccaatgccccaatgcccgttgccagttcgccttctacggtggtgagtcgggctaccaccgggccctgctgggcctgcagatcttcaatgccttcatgttcttctggttggccaacttcgtgctggcgctgggccaggtcacgctggccggggcctttgcctcctactactgggccctgcgcaagccggacgacctgccggccttcccgctcttctctgcctttggccgggcgctcaggtaccacacaggctccctggcctttggcgcgctcatcctggccattgtgcagatcatccgtgtgatactcgagtacctggatcagcggctgaaagctgcagagaacaagtttgccaagtgcctcatgacctgtctcaaatgctgcttctggtgcctggagaagttcatcaaattccttaataggaatgcctacatcatgattgccatctacggcaccaatttctgcacctcggccaggaatgccttcttcctgctcatgagaaacatcatcagagtggctgtcctggataaagttactgacttcctcttcctgttgggcaaacttctgatcgttggtagtgtggggatcctggctttcttcttcttcacccaccgtatcaggatcgtgcaggatacagcaccacccctcaattattactgggttcctatactgacggtgatcgttggctcctacttgattgcacacggtttcttcagcgtctatggcatgtgtgtggacacgctgttcctctgcttcttggaggacctggagaggaatgacggctcggccgagaggccttacttcatgtcttccaccctcaagaaactcttgaacaagaccaacaagaaggcagcggagtcctgaaggccccgtgctccccacctctcaaggagtctcatgccgcagggtgctcagtagctgggtctgttcccccagccccttgggctcacctgaagtcctatcactgccgctctgcccctccccatgagccagatcccaccagtttctggacgtggagagtctggggcatctccttcttatgccaaggggcgcttggagttttcatggctgcccctccagactgcgagaaacaagtaaaaacccattggggcctcttgatgtctgggatggcacgtggcccgacctccacaagctccctcatgcttcctgtcccccgcttacacgacaacgggccagaccacgggaaggacggtgtttgtgtctgagggagctgctggccacagtgaacacccacgtttattcctgcctgctccggccaggactgaaccccttctccacacctgaacagttggctcaagggccaccagaagcatttctttattattattattttttaacctggacatgcattaaagggtctattagctttctttccgtctgtctcaacagctgagatggggccgccaaggagtgccttccttttgctccctcctagctgggagtgacgggtgggagtgtgtgtgcccaggtgggggtgtctcctggctgggaaggagggaaagggagggagagttttgcgggggttggcagtggagagcaggctggagaggagatggctaatagctgtttaatggaaacctgctgggctggagggagttaggctgaatttcccgacttcctctgccagttattgacacagctctctttgtaagagaggaaagaaactaaacccacccaagggatgatttcagggggagaggtggagggcagatgtcctgggcaaaccgggcccctctgcccacacacctcacttgatccttttgccaaacttgtcaaactcaggggaactggcttcccagttgcccctttgccatattccaagtccccctcagacttcatgtctctgctcatcagcactgtcccaggatcctggagagggagaacccctggccccaggggaaagaggggggggtctcccgtttcctgtgcctgcaccagccctgcccccattgcgtctgcacacccctgcgtgtaactgcattccaaccactaataaagtgcctattgtacaggtc

SEQ ID NO: 427994 - DNA, 3412 bp, Homo sapiens
tgcaataggtaactaatgaacaccgcttgctagttatacgtgtccgtcgatcgggatagctcgcgcggctgggtgcgctggctcggactcgctcccgccccgcgcggcgggccccaagtggggatgggacgaagcgggaaaaaaacggagcctacggaacgccacagaagtatgatcccactttcaaaggacccatttacaataggggctgcacggatatcatatgctgtgtgttcctgctcctggccattgtgggctacgtggctgtaggcatcatagcctggactcatggagaccctcgaaaggtgatctaccccactgatagccggggcgagttctgcgggcagaagggcacaaaaaacgagaacaaaccctatctgttttatttcaacattgtgaaatgtgccagccccctggttctgctggaattccaatgtcccactccccagatctgcgtggaaaaatgccccgaccgctacctcacgtacctgaatgctcgcagctcccgggactttgagtactataagcagttctgtgttcctggcttcaagaacaataaaggagtggctgaggtgcttcgagatggtgactgccctgctgtcctcatccccagcaaacccttggcccggagatgcttccccgctatccacgcctacaagggtgtcctgatggtgggcaatgagacgacctatgaggatgggcatggctcccggaaaaacatcacagacctggtggagggcgccaagaaagccaatggagtcctagaggcgcggcaactcgccatgcgcatatttgaagattacaccgtctcttggtactggattatcataggcctggtcattgccatggcgatgagcctcctgttcatcatcctgcttcgcttcctggctggtattatggtctgggtgatgatcatcatggtgattctggtgctgggctacggaatatttcactgctacatggagtactcccgactgcgtggtgaggccggctctgatgtctctttggtggacctcggctttcagacggatttccgggtgtacctgcacttacggcagacctggttggcctttatgatcattctgagtatccttgaagtcattatcatcttgctgctcatctttctccggaagagaattctcatcgcgattgcactcatcaaagaagccagcagggctgtgggatacgtcatgtgctccttgctctacccactggtcaccttcttcttgctgtgcctctgcatcgcctactgggccagcactgctgtcttcctgtccacttccaacgaagcggtctataagatctttgatgacagcccctgcccatttactgcgaaaacctgcaacccagagaccttcccctcctccaatgagtcccgccaatgccccaatgcccgttgccagttcgccttctacggtggtgagtcgggctaccaccgggccctgctgggcctgcagatcttcaatgccttcatgttcttctggttggccaacttcgtgctggcgctgggccaggtcacgctggccggggcctttgcctcctactactgggccctgcgcaagccggacgacctgccggccttcccgctcttctctgcctttggccgggcgctcaggtaccacacaggctccctggcctttggcgcgctcatcctggccattgtgcagatcatccgtgtgatactcgagtacctggatcagcggctgaaagctgcagagaacaagtttgccaagtgcctcatgacctgtctcaaatgctgcttctggtgcctggagaagttcatcaaattccttaataggaatgcctacatcatgattgccatctacggcaccaatttctgcacctcggccaggaatgccttcttcctgctcatgagaaacatcatcagagtggctgtcctggataaagttactgacttcctcttcctgttgggcaaacttctgatcgttggtagtgtggggatcctggctttcttcttcttcacccaccgtatcaggatcgtgcaggatacagcaccacccctcaattattactgggttcctatactgacggtgatcgttggctcctacttgattgcacacggtttcttcagcgtctatggcatgtgtgtggacacgctgttcctctgcttcttggaggacctggagaggaatgacggctcggccgagaggccttacttcatgtcttccaccctcaagaaactcttgaacaagaccaacaagaaggcagcggagtcctgaaggccccgtgctccccacctctcaaggagtctcatgccgcagggtgctcagtagctgggtctgttcccccagccccttgggctcacctgaagtcctatcactgccgctctgcccctccccatgagccagatcccaccagtttctggacgtggagagtctggggcatctccttcttatgccaaggggcgcttggagttttcatggctgcccctccagactgcgagaaacaagtaaaaacccattggggcctcttgatgtctgggatggcacgtggcccgacctccacaagctccctcatgcttcctgtcccccgcttacacgacaacgggccagaccacgggaaggacggtgtttgtgtctgagggagctgctggccacagtgaacacccacgtttattcctgcctgctccggccaggactgaaccccttctccacacctgaacagttggctcaagggccaccagaagcatttctttattattattattttttaacctggacatgcattaaagggtctattagctttctttccgtctgtctcaacagctgagatggggccgccaaggagtgccttccttttgctccctcctagctgggagtgacgggtgggagtgtgtgtgcccaggtgggggtgtctcctggctgggaaggagggaaagggagggagagttttgcgggggttggcagtggagagcaggctggagaggagatggctaatagctgtttaatggaaacctgctgggctggagggagttaggctgaatttcccgacttcctctgccagttattgacacagctctctttgtaagagaggaaagaaactaaacccacccaagggatgatttcagggggagaggtggagggcagatgtcctgggcaaaccgggcccctctgcccacacacctcacttgatccttttgccaaacttgtcaaactcaggggaactggcttcccagttgcccctttgccatattccaagtccccctcagacttcatgtctctgctcatcagcactgtcccaggatcctggagagggagaacccctggccccaggggaaagaggggggggtctcccgtttcctgtgcctgcaccagccctgcccccattgcgtctgcacacccctgcgtgtaactgcattccaaccactaataaagtgcctattgtacaggtc

SEQ ID NO: 427995 - DNA, 3462 bp, Homo sapiens
cggggcggggcgtgcagcccgcggagcctcccgcccgcccgggctggggtcgcgctggctcggactccgctccccgccccgccgcggccatggaggacgagcggaaaaacggagcctacggaacgccacagaagtatgatcccactttcaaaggacccatttacaataggggctgcacggatatcatatgctgtgtgttcctgctcctggccattgtgggctacgtggctgtaggcatcatagcctggactcatggagaccctcgaaaggtgatctaccccactgatagccggggcgagttctgcgggcagaagggcacaaaaaacgagaacaaaccctatctgttttatttcaacattgtgaaatgtgccagccccctggttctgctggaattccaatgtcccactccccagatctgcgtggaaaaatgccccgaccgctacctcacgtacctgaatgctcgcagctcccgggactttgagtactataagcagttctgtgttcctggcttcaagaacaataaaggagtggctgaggtgcttcgagatggtgactgccctgctgtcctcatccccagcaaacccttggcccggagatgcttccccgctatccacgcctacaagggtgtcctgatggtgggcaatgagacgacctatgaggatgggcatggctcccggaaaaacatcacagacctggtggagggcgccaagaaagccaatggagtcctagaggcgcggcaactcgccatgcgcatatttgaagattacaccgtctcttggtactggattatcataggcctggtcattgccatggcgatgagcctcctgttcatcatcctgcttcgcttcctggctggtattatggtctgggtgatgatcatcatggtgattctggtgctgggctacggaatatttcactgctacatggagtactcccgactgcgtggtgaggccggctctgatgtctctttggtggacctcggctttcagacggatttccgggtgtacctgcacttacggcagacctggttggcctttagtgagtcacagtctcccattcctgcccccacatgaggccttggagggagtggggagcccagccggctcagcctttgccctttgcagtgatcattctgagtatccttgaagtcattatcatcttgctgctcatctttctccggaagagaattctcatcgcgattgcactcatcaaagaagccagcagggctgtgggatacgtcatgtgctccttgctctacccactggtcaccttcttcttgctgtgcctctgcatcgcctactgggccagcactgctgtcttcctgtccacttccaacgaagcggtctataagatctttgatgacagcccctgcccatttactgcgaaaacctgcaacccagagaccttcccctcctccaatgagtcccgccaatgccccaatgcccgttgccagttcgccttctacggtggtgagtcgggctaccaccgggccctgctgggcctgcagatcttcaatgccttcatgttcttctggttggccaacttcgtgctggcgctgggccaggtcacgctggccggggcctttgcctcctactactgggccctgcgcaagccggacgacctgccggccttcccgctcttctctgcctttggccgggcgctcaggtaccacacaggctccctggcctttggcgcgctcatcctggccattgtgcagatcatccgtgtgatactcgagtacctggatcagcggctgaaagctgcagagaacaagtttgccaagtgcctcatgacctgtctcaaatgctgcttctggtgcctggagaagttcatcaaattccttaataggaatgcctacatcatgattgccatctacggcaccaatttctgcacctcggccaggaatgccttcttcctgctcatgagaaacatcatcagagtggctgtcctggataaagttactgacttcctcttcctgttgggcaaacttctgatcgttggtagtgtggggatcctggctttcttcttcttcacccaccgtatcaggatcgtgcaggatacagcaccacccctcaattattactgggttcctatactgacggtgatcgttggctcctacttgattgcacacggtttcttcagcgtctatggcatgtgtgtggacacgctgttcctctgcttcttggaggacctggagaggaatgacggctcggccgagaggccttacttcatgtcttccaccctcaagaaactcttgaacaagaccaacaagaaggcagcggagtcctgaaggccccgtgctccccacctctcaaggagtctcatgccgcagggtgctcagtagctgggtctgttcccccagccccttgggctcacctgaagtcctatcactgccgctctgcccctccccatgagccagatcccaccagtttctggacgtggagagtctggggcatctccttcttatgccaaggggcgcttggagttttcatggctgcccctccagactgcgagaaacaagtaaaaacccattggggcctcttgatgtctgggatggcacgtggcccgacctccacaagctccctcatgcttcctgtcccccgcttacacgacaacgggccagaccacgggaaggacggtgtttgtgtctgagggagctgctggccacagtgaacacccacgtttattcctgcctgctccggccaggactgaaccccttctccacacctgaacagttggctcaagggccaccagaagcatttctttattattattattttttaacctggacatgcattaaagggtctattagctttctttccgtctgtctcaacagctgagatggggccgccaaggagtgccttccttttgctccctcctagctgggagtgacgggtgggagtgtgtgtgcccaggtgggggtgtctcctggctgggaaggagggaaagggagggagagttttgcgggggttggcagtggagagcaggctggagaggagatggctaatagctgtttaatggaaacctgctgggctggagggagttaggctgaatttcccgacttcctctgccagttattgacacagctctctttgtaagagaggaaagaaactaaacccacccaagggatgatttcagggggagaggtggagggcagatgtcctgggcaaaccgggcccctctgcccacacacctcacttgatccttttgccaaacttgtcaaactcaggggaactggcttcccagttgcccctttgccatattccaagtccccctcagacttcatgtctctgctcatcagcactgtcccaggatcctggagagggagaacccctggccccaggggaaagaggggggggtctcccgtttcctgtgcctgcaccagccctgcccccattgcgtctgcacacccctgcgtgtaactgcattccaaccactaataaagtgcctattgtacaggtc

SEQ ID NO: 427996 - DNA, 3899 bp, Homo sapiens
gggagcagctgcagccccgcccgcgccctcccgggtcccttagtctgggcagctgcccagctcgggccggtctgaccggtttgggccgccccgcctggcgctgtgctgggaggagccgccgccagtcgcgcggtcagtgcctccctccagactcgggagggtcgagggggcgcgggagagagcgcgggcggccgccggggctggtcgcctgcagggatgggggacgagcggccccactactacgggaaacacggaacgccacagaagtatgatcccactttcaaaggacccatttacaataggggctgcacggatatcatatgctgtgtgttcctgctcctggccattgtgggctacgtggctgtaggcatcatagcctggactcatggagaccctcgaaaggtgatctaccccactgatagccggggcgagttctgcgggcagaagggcacaaaaaacgagaacaaaccctatctgttttatttcaacattgtgaaatgtgccagccccctggttctgctggaattccaatgtcccactccccagatctgcgtggaaaaatgccccgaccgctacctcacgtacctgaatgctcgcagctcccgggactttgagtactataagcagttctgtgttcctggcttcaagaacaataaaggagtggctgaggtgcttcgagatggtgactgccctgctgtcctcatccccagcaaacccttggcccggagatgcttccccgctatccacgcctacaagggtgtcctgatggtgggcaatgagacgacctatgaggatgggcatggctcccggaaaaacatcacagacctggtggagggcgccaagaaagccaatggagtcctagaggcgcggcaactcgccatgcgcatatttgaagattacaccgtctcttggtactggattatcataggcctggtcattgccatggcgatgagcctcctgttcatcatcctgcttcgcttcctggctggtattatggtctgggtgatgatcatcatggtgattctggtgctgggctacggaatatttcactgctacatggagtactcccgactgcgtggtgaggccggctctgatgtctctttggtggacctcggctttcagacggatttccgggtgtacctgcacttacggcagacctggttggcctttatgatcattctgagtatccttgaagtcattatcatcttgctgctcatctttctccggaagagaattctcatcgcgattgcactcatcaaagaagccagcagggctgtgggatacgtcatgtgctccttgctctacccactggtcaccttcttcttgctgtgcctctgcatcgcctactgggccagcactgctgtcttcctgtccacttccaacgaagcggtctataagatctttgatgacagcccctgcccatttactgcgaaaacctgcaacccagagaccttcccctcctccaatgagtcccgccaatgccccaatgcccgttgccagttcgccttctacggtggtgagtcgggctaccaccgggccctgctgggcctgcagatcttcaatgccttcatgttcttctggttggccaacttcgtgctggcgctgggccaggtcacgctggccggggcctttgcctcctactactgggccctgcgcaagccggacgacctgccggccttcccgctcttctctgcctttggccgggcgctcaggtaccacacaggctccctggcctttggcgcgctcatcctggccattgtgcagatcatccgtgtgatactcgagtacctggatcagcggctgaaagctgcagagaacaagtttgccaagtgcctcatgacctgtctcaaatgctgcttctggtgcctggagaagttcatcaaattccttaataggaatgcctacatcatgattgccatctacggcaccaatttctgcacctcggccaggaatgccttcttcctgctcatgagaaacatcatcagagtggctgtcctggataaagttactgacttcctcttcctgttgggcaaacttctgatcgttggtagtgtggggatcctggctttcttcttcttcacccaccgtatcaggatcgtgcaggatacagcaccacccctcaattattactgggttcctatactgacggtgatcgttggctcctacttgattgcacacggtttcttcagcgtctatggcatgtgtgtggacacgctgttcctctgcttcttggaggacctggagaggaatgacggctcggccgagaggccttacttcatgtcttccaccctcaagaaactcttgaacaagaccaacaagaaggcagcggagtcctgaaggccccgtgctccccacctctcaaggagtctcatgccgcagggtgctcagtagctgggtctgttcccccagccccttgggctcacctgaagtcctatcactgccgctctgcccctccccatgagccagatcccaccagtttctggacgtggagagtctggggcatctccttcttatgccaaggggcgcttggagttttcatggctgcccctccagactgcgagaaacaagtaaaaacccattggggcctcttgatgtctgggatggcacgtggcccgacctccacaagctccctcatgcttcctgtcccccgcttacacgacaacgggccagaccacgggaaggacggtgtttgtgtctgagggagctgctggccacagtgaacacccacgtttattcctgcctgctccggccaggactgaaccccttctccacacctgaacagttggctcaagggccaccagaagcatttctttattattattattttttaacctggacatgcattaaagggtctattagctttctttccgtctgtctcaacagctgagatggggccgccaaggagtgccttccttttgctccctcctagctgggagtgacgggtgggagtgtgtgtgcccaggtgggggtgtctcctggctgggaaggagggaaagggagggagagttttgcgggggttggcagtggagagcaggctggagaggagatggctaatagctgtttaatggaaacctgctgggctggagggagttaggctgaatttcccgacttcctctgccagttattgacacagctctctttgtaagagaggaaagaaactaaacccacccaagggatgatttcagggggagaggtggagggcagatgtcctgggcaaaccgggcccctctgcccacacacctcacttgatccttttgccaaacttgtcaaactcaggggaactggcttcccagttgcccctttgccatattccaagtccccctcagacttcatgtctctgctcatcagcactgtcccaggatcctggagagggagaacccctggccccaggggaaagaggggggggtctcccgtttcctgtgcctgcaccagccctgcccccattgcgtctgcacacccctgcgtgtaactgcattccaaccactaataaagtgcctattgtacaggtcaaaaaaaaaaaaaaaaaaaaaaaagaaaaaaaaaaaaaaaaaaaaaaaaaaaaaaaaaaaaaaaaaaaaaaaggggggggggggcgtaaaaaatattccccggggggggcaccatgtatgatgtcgagcaccattttgttttataaagggggggctacctagagagagggatagttatttataacgacgaagaacgggggggggttatcaaaaagattggtagaggagaaaaagcagtatgagggagtattggaaagggacaccatcatctggtgggggaaactatgggaacccacccgagggaaattaacgcggggggaaataaaagagggtatgggtaaacccgattgtggggaaaatgttggttgatttaataggggtagttatatg

SEQ ID NO: 427997 - DNA, 3423 bp, Homo sapiens
gggagcagctgcagccccgcccgcgccctcccgggtcccttagtctgggcagctgcccagctcgggccggtctgaccggtttgggccgccccgcctggcgctgtgctgggaggagccgccgccagtcgcgcggtcagtgcctccctccagactcgggagggtcgagggggcgcgggagagagcgcgggcggccgccggggctggtcgcctgcagggatgggggacgagcggccccactactacgggaaacacggaacgccacagaagtatgatcccactttcaaaggacccatttacaataggggctgcacggatatcatatgctgtgtgttcctgctcctggccattgtgggctacgtggctgtaggcatcatagcctggactcatggagaccctcgaaaggtgatctaccccactgatagccggggcgagttctgcgggcagaagggcacaaaaaacgagaacaaaccctatctgttttatttcaacattgtgaaatgtgccagccccctggttctgctggaattccaatgtcccactccccagatctgcgtggaaaaatgccccgaccgctacctcacgtacctgaatgctcgcagctcccgggactttgagtactataagcagttctgtgttcctggcttcaagaacaataaaggagtggctgaggtgcttcgagatggtgactgccctgctgtcctcatccccagcaaacccttggcccggagatgcttccccgctatccacgcctacaagggtgtcctgatggtgggcaatgagacgacctatgaggatgggcatggctcccggaaaaacatcacagacctggtggagggcgccaagaaagccaatggagtcctagaggcgcggcaactcgccatgcgcatatttgaagattacaccgtctcttggtactggattatcataggcctggtcattgccatggcgatgagcctcctgttcatcatcctgcttcgcttcctggctggtattatggtctgggtgatgatcatcatggtgattctggtgctgggctacggaatatttcactgctacatggagtactcccgactgcgtggtgaggccggctctgatgtctctttggtggacctcggctttcagacggatttccgggtgtacctgcacttacggcagacctggttggcctttatgatcattctgagtatccttgaagtcattatcatcttgctgctcatctttctccggaagagaattctcatcgcgattgcactcatcaaagaagccagcagggctgtgggatacgtcatgtgctccttgctctacccactggtcaccttcttcttgctgtgcctctgcatcgcctactgggccagcactgctgtcttcctgtccacttccaacgaagcggtctataagatctttgatgacagcccctgcccatttactgcgaaaacctgcaacccagagaccttcccctcctccaatgagtcccgccaatgccccaatgcccgttgccagttcgccttctacggtggtgagtcgggctaccaccgggccctgctgggcctgcagatcttcaatgccttcatgttcttctggttggccaacttcgtgctggcgctgggccaggtcacgctggccggggcctttgcctcctactactgggccctgcgcaagccggacgacctgccggccttcccgctcttctctgcctttggccgggcgctcaggtaccacacaggctccctggcctttggcgcgctcatcctggccattgtgcagatcatccgtgtgatactcgagtacctggatcagcggctgaaagctgcagagaacaagtttgccaagtgcctcatgacctgtctcaaatgctgcttctggtgcctggagaagttcatcaaattccttaataggaatgcctacatcatgattgccatctacggcaccaatttctgcacctcggccaggaatgccttcttcctgctcatgagaaacatcatcagagtggctgtcctggataaagttactgacttcctcttcctgttgggcaaacttctgatcgttggtagtgtggggatcctggctttcttcttcttcacccaccgtatcaggatcgtgcaggatacagcaccacccctcaattattactgggttcctatactgacggtgatcgttggctcctacttgattgcacacggtttcttcagcgtctatggcatgtgtgtggacacgctgttcctctgcttcttggaggacctggagaggaatgacggctcggccgagaggccttacttcatgtcttccaccctcaagaaactcttgaacaagaccaacaagaaggcagcggagtcctgaaggccccgtgctccccacctctcaaggagtctcatgccgcagggtgctcagtagctgggtctgttcccccagccccttgggctcacctgaagtcctatcactgccgctctgcccctccccatgagccagatcccaccagtttctggacgtggagagtctggggcatctccttcttatgccaaggggcgcttggagttttcatggctgcccctccagactgcgagaaacaagtaaaaacccattggggcctcttgatgtctgggatggcacgtggcccgacctccacaagctccctcatgcttcctgtcccccgcttacacgacaacgggccagaccacgggaaggacggtgtttgtgtctgagggagctgctggccacagtgaacacccacgtttattcctgcctgctccggccaggactgaaccccttctccacacctgaacagttggctcaagggccaccagaagcatttctttattattattattttttaacctggacatgcattaaagggtctattagctttctttccgtctgtctcaacagctgagatggggccgccaaggaggaaagggagggagagttttgcgggggttggcagtggagagcaggctggagaggagatggctaatagctgtttaatggaaacctgctgggctggagggagttaggctgaatttcccgacttcctctgccagttattgacacagctctctttgtaagagaggaaagaaactaaacccacccaagggatgatttcagggggagaggtggagggcagatgtcctgggcaaaccgggcccctctgcccacacacctcacttgatccttttgccaaacttgtcaaactcaggggaactggcttcccagttgcccctttgccatattccaagtccccctcagacttcatgtctctgctcatcagcactgtcccaggatcctggagagggagaacccctggccccaggggaaagaggggggggtctcccgtttcctgtgcctgcaccagccctgcccccattgcgtctgcacacccctgcgtgtaactgcattccaaccactaataaagtgcctattgtacaggtc

SEQ ID NO: 427998 - DNA, 2818 bp, Homo sapiens
cggggcggggcgtgcagcccgcggagcctcccgcccgcccgggctggggtcgcgctggctcggactccgctccccgccccgccgcggccatggaggacgagcggaaaaacggagcctacggaacgccacagaagtatgatcccactttcaaaggacccatttacaataggggctgcacggatatcatatgctgtgtgttcctgctcctggccattgtgggctacgtggctgtaggcatcatagcctggactcatggagaccctcgaaaggtgatctaccccactgatagccggggcgagttctgcgggcagaagggcacaaaaaacgagaacaaaccctatctgttttatttcaacattgtgaaatgtgccagccccctggttctgctggaattccaatgtcccactccccagatctgcgtggaaaaatgccccgaccgctacctcacgtacctgaatgctcgcagctcccgggactttgagtactataagcagttctgtgttcctggcttcaagaacaataaaggagtggctgaggtgcttcgagatggtgactgccctgctgtcctcatccccagcaaacccttggcccggagatgcttccccgctatccacgcctacaagggtgtcctgatggtgggcaatgagacgacctatgaggatgggcatggctcccggaaaaacatcacagacctggtggagggcgccaagaaagccaatggagtcctagaggcgcggcaactcgccatgcgcatatttgaagattacaccgtctcttggtactggattatcataggcctggtcattgccatggcgatgagcctcctgttcatcatcctgcttcgcttcctggctggtattatggtctgggtgatgatcatcatggtgattctggtgctgggctacggaatatttcactgctacatggagtactcccgactgcgtggtgaggccggctctgatgtctctttggtggacctcggctttcagacggatttccgggtgtacctgcacttacggcagacctggttggcctttatgatcattctgagtatccttgaagtcattatcatcttgctgctcatctttctccggaagagaattctcatcgcgattgcactcatcaaagaagccagcagggctgtgggatacgtcatgtgctccttgctctacccactggagaagttcatcaaattccttaataggaatgcctacatcatgattgccatctacggcaccaatttctgcacctcggccaggaatgccttcttcctgctcatgagaaacatcatcagagtggctgtcctggataaagttactgacttcctcttcctgttgggcaaacttctgatcgttggtagtgtggggatcctggctttcttcttcttcacccaccgtatcaggatcgtgcaggatacagcaccacccctcaattattactgggttcctatactgacggtgatcgttggctcctacttgattgcacacggtttcttcagcgtctatggcatgtgtgtggacacgctgttcctctgcttcttggaggacctggagaggaatgacggctcggccgagaggccttacttcatgtcttccaccctcaagaaactcttgaacaagaccaacaagaaggcagcggagtcctgaaggccccgtgctccccacctctcaaggagtctcatgccgcagggtgctcagtagctgggtctgttcccccagccccttgggctcacctgaagtcctatcactgccgctctgcccctccccatgagccagatcccaccagtttctggacgtggagagtctggggcatctccttcttatgccaaggggcgcttggagttttcatggctgcccctccagactgcgagaaacaagtaaaaacccattggggcctcttgatgtctgggatggcacgtggcccgacctccacaagctccctcatgcttcctgtcccccgcttacacgacaacgggccagaccacgggaaggacggtgtttgtgtctgagggagctgctggccacagtgaacacccacgtttattcctgcctgctccggccaggactgaaccccttctccacacctgaacagttggctcaagggccaccagaagcatttctttattattattattttttaacctggacatgcattaaagggtctattagctttctttccgtctgtctcaacagctgagatggggccgccaaggagtgccttccttttgctccctcctagctgggagtgacgggtgggagtgtgtgtgcccaggtgggggtgtctcctggctgggaaggagggaaagggagggagagttttgcgggggttggcagtggagagcaggctggagaggagatggctaatagctgtttaatggaaacctgctgggctggagggagttaggctgaatttcccgacttcctctgccagttattgacacagctctctttgtaagagaggaaagaaactaaacccacccaagggatgatttcagggggagaggtggagggcagatgtcctgggcaaaccgggcccctctgcccacacacctcacttgatccttttgccaaacttgtcaaactcaggggaactggcttcccagttgcccctttgccatattccaagtccccctcagacttcatgtctctgctcatcagcactgtcccaggatcctggagagggagaacccctggccccaggggaaagaggggggggtctcccgtttcctgtgcctgcaccagccctgcccccattgcgtctgcacacccctgcgtgtaactgcattccaaccactaataaagtgcctattgtacaggtc

SEQ ID NO: 427999 - DNA, 3758 bp, Homo sapiens
cggggcggggcgtgcagcccgcggagcctcccgcccgcccgggctggggtcgcgctggctcggactccgctccccgccccgccgcggccatggaggacgagcggaaaaacggagcctacggaacgccacagaagtatgatcccactttcaaaggacccatttacaataggggctgcacggatatcatatgctgtgtgttcctgctcctggccattgtgggctacgtggctgtaggcatcatagcctggactcatggagaccctcgaaaggtgatctaccccactgatagccggggcgagttctgcgggcagaagggcacaaaaaacgagaacaaaccctatctgttttatttcaacattgtgaaatgtgccagccccctggttctgctggaattccaatgtcccactccccagatctgcgtggaaaaatgccccgaccgctacctcacgtacctgaatgctcgcagctcccgggactttgagtactataagcagttctgtgttcctggcttcaagaacaataaaggagtggctgaggtgcttcgagatggtgactgccctgctgtcctcatccccagcaaacccttggcccggagatgcttccccgctatccacgcctacaagggtgtcctgatggtgggcaatgagacgacctatgaggatgggcatggctcccggaaaaacatcacagacctggtggagggcgccaagaaagccaatggagtcctagaggcgcggcaactcgccatgcgcatatttgaagattacaccgtctcttggtactggattatcataggcctggtcattgccatggcgatgagcctcctgttcatcatcctgcttcgcttcctggctggtattatggtctgggtgatgatcatcatggtgattctggtgctgggctacggaatatttcactgctacatggagtactcccgactgcgtggtgaggccggctctgatgtctctttggtggacctcggctttcagacggatttccgggtgtacctgcacttacggcagacctggttggcctttatgatcattctgagtatccttgaagtcattatcatcttgctgctcatctttctccggaagagaattctcatcgcgattgcactcatcaaagaagccagcagggctgtgggatacgtcatgtgctccttgctctacccactggtcaccttcttcttgctgtgcctctgcatcgcctactgggccagcactgctgtcttcctgtccacttccaacgaagcggtctataagatctttgatgacagcccctgcccatttactgcgaaaacctgcaacccagagaccttcccctcctccaatgagtcccgccaatgccccaatgcccgttgccagttcgccttctacggtggtgagtcgggctaccaccgggccctgctgggcctgcagatcttcaatgccttcatgttcttctggttggccaacttcgtgctggcgctgggccaggtcacgctggccggggcctttgcctcctactactgggccctgcgcaagccggacgacctgccggccttcccgctcttctctgcctttggccgggcgctcaggtaccacacaggctccctggcctttggcgcgctcatcctggccattgtgcagatcatccgtgtgatactcgagtacctggatcagcggctgaaagctgcagagaacaagtttgccaagtgcctcatgacctgtctcaaatgctgcttctggtgcctggagaagttcatcaaattccttaataggaatgcctacatcatgattgccatctacggcaccaatttctgcacctcggccaggaatgccttcttcctgctcatgagaaacatcatcagagtggctgtcctggataaagttactgacttcctcttcctgttgggcaaacttctgatcgttggtagtgtggggatcctggctttcttcttcttcacccaccgtatcaggatcgtgcaggatacagcaccacccctcaattattactgggttcctatactgacggtgatcgttggctcctacttgattgcacacggtttcttcagcgtctatggcatgtgtgtggacacgctgttcctctgcttctgtgaggacctggaaaggaatgacggctctcaggagcgaccctacttcatgtcgcccgagctgagagacatcctgttgaaggggagtgcggaggaggggaagcgggcagaagccgaggagtagagagtgagggagactggcgtgggggccaggtttcctccatgtagactgggggtgcatgaagcgggggggttcctggcctgcgagtgtggggatcctgtgtgtccctcggagcccactacagtctgcccctctctggtcccagtgtgtctgctttctaaccctctgaggcttctctgtgaccctcatccacctaccctgtccttgaggcccctgcccgtgggctcccctcatgcctcctgctctgggacctctctccacagtggaggacctggagaggaatgacggctcggccgagaggccttacttcatgtcttccaccctcaagaaactcttgaacaagaccaacaagaaggcagcggagtcctgaaggccccgtgctccccacctctcaaggagtctcatgccgcagggtgctcagtagctgggtctgttcccccagccccttgggctcacctgaagtcctatcactgccgctctgcccctccccatgagccagatcccaccagtttctggacgtggagagtctggggcatctccttcttatgccaaggggcgcttggagttttcatggctgcccctccagactgcgagaaacaagtaaaaacccattggggcctcttgatgtctgggatggcacgtggcccgacctccacaagctccctcatgcttcctgtcccccgcttacacgacaacgggccagaccacgggaaggacggtgtttgtgtctgagggagctgctggccacagtgaacacccacgtttattcctgcctgctccggccaggactgaaccccttctccacacctgaacagttggctcaagggccaccagaagcatttctttattattattattttttaacctggacatgcattaaagggtctattagctttctttccgtctgtctcaacagctgagatggggccgccaaggagtgccttccttttgctccctcctagctgggagtgacgggtgggagtgtgtgtgcccaggtgggggtgtctcctggctgggaaggagggaaagggagggagagttttgcgggggttggcagtggagagcaggctggagaggagatggctaatagctgtttaatggaaacctgctgggctggagggagttaggctgaatttcccgacttcctctgccagttattgacacagctctctttgtaagagaggaaagaaactaaacccacccaagggatgatttcagggggagaggtggagggcagatgtcctgggcaaaccgggcccctctgcccacacacctcacttgatccttttgccaaacttgtcaaactcaggggaactggcttcccagttgcccctttgccatattccaagtccccctcagacttcatgtctctgctcatcagcactgtcccaggatcctggagagggagaacccctggccccaggggaaagaggggggggtctcccgtttcctgtgcctgcaccagccctgcccccattgcgtctgcacacccctgcgtgtaactgcattccaaccactaataaagtgcctattgtacaggtc

SEQ ID NO: 428000 - DNA, 3501 bp, Homo sapiens
cggggcggggcgtgcagcccgcggagcctcccgcccgcccgggctggggtcgcgctggctcggactccgctccccgccccgccgcggccatggaggacgagcggaaaaacggagcctacggaacgccacagaagtatgatcccactttcaaaggacccatttacaataggggctgcacggatatcatatgctgtgtgttcctgctcctggccattgtgggctacgtggctgtaggcatcatagcctggactcatggagaccctcgaaaggtgatctaccccactgatagccggggcgagttctgcgggcagaagggcacaaaaaacgagaacaaaccctatctgttttatttcaacattgtgaaatgtgccagccccctggttctgctggaattccaatgtcccactccccagatctgcgtggaaaaatgccccgaccgctacctcacgtacctgaatgctcgcagctcccgggactttgagtactataagcagttctgtgttcctggcttcaagaacaataaaggagtggctgaggtgcttcgagatggtgactgccctgctgtcctcatccccagcaaacccttggcccggagatgcttccccgctatccacgcctacaagggtgtcctgatggtgggcaatgagacgacctatgaggatgggcatggctcccggaaaaacatcacagacctggtggagggcgccaagaaagccaatggagtcctagaggcgcggcaactcgccatgcgcatatttgaagattacaccgtctcttggtactggattatcataggcctggtcattgccatggcgatgagcctcctgttcatcatcctgcttcgcttcctggctggtattatggtctgggtgatgatcatcatggtgattctggtgctgggctacggaatatttcactgctacatggagtactcccgactgcgtggtgaggccggctctgatgtctctttggtggacctcggctttcagacggatttccgggtgtacctgcacttacggcagacctggttggcctttatgatcattctgagtatccttgaagtcattatcatcttgctgctcatctttctccggaagagaattctcatcgcgattgcactcatcaaagaagccagcagggctgtgggatacgtcatgtgctccttgctctacccactggtcaccttcttcttgctgtgcctctgcatcgcctactgggccagcactgctgtcttcctgtccacttccaacgaagcggtctataagatctttgatgacagcccctgcccatttactgcgaaaacctgcaacccagagaccttcccctcctccaatgagtcccgccaatgccccaatgcccgttgccagttcgccttctacggtggtgagtcgggctaccaccgggccctgctgggcctgcagatcttcaatgccttcatgttcttctggttggccaacttcgtgctggcgctgggccaggtcacgctggccggggcctttgcctcctactactgggccctgcgcaagccggacgacctgccggccttcccgctcttctctgcctttggccgggcgctcaggtaccacacaggctccctggcctttggcgcgctcatcctggccattgtgcagatcatccgtgtgatactcgagtacctggatcagcggctgaaagctgcagagaacaagtttgccaagtgcctcatgacctgtctcaaatgctgcttctggtgcctggagaagttcatcaaattccttaataggaatgcctacatcatgattgccatctacggcaccaatttctgcacctcggccaggaatgccttcttcctgctcatgagaaacatcatcagagtggctgtcctggataaagttactgacttcctcttcctgttgggcaaacttctgatcgttggtagtgtggggatcctggctttcttcttcttcacccaccgtatcaggatcgtgcaggatacagcaccacccctcaattattactgggttcctatactgacggtgatcgttggctcctacttgattgcacacggtttcttcagcgtctatggcatgtgtgtggacacgctgttcctctgcttctgtgaggacctggaaaggaatgacggctctcaggagcgaccctacttcatgtcgcccgagctgagagacatcctgttgaaggggagtgcggaggaggggaagcgggcagaagccgaggagtagagatggaggacctggagaggaatgacggctcggccgagaggccttacttcatgtcttccaccctcaagaaactcttgaacaagaccaacaagaaggcagcggagtcctgaaggccccgtgctccccacctctcaaggagtctcatgccgcagggtgctcagtagctgggtctgttcccccagccccttgggctcacctgaagtcctatcactgccgctctgcccctccccatgagccagatcccaccagtttctggacgtggagagtctggggcatctccttcttatgccaaggggcgcttggagttttcatggctgcccctccagactgcgagaaacaagtaaaaacccattggggcctcttgatgtctgggatggcacgtggcccgacctccacaagctccctcatgcttcctgtcccccgcttacacgacaacgggccagaccacgggaaggacggtgtttgtgtctgagggagctgctggccacagtgaacacccacgtttattcctgcctgctccggccaggactgaaccccttctccacacctgaacagttggctcaagggccaccagaagcatttctttattattattattttttaacctggacatgcattaaagggtctattagctttctttccgtctgtctcaacagctgagatggggccgccaaggagtgccttccttttgctccctcctagctgggagtgacgggtgggagtgtgtgtgcccaggtgggggtgtctcctggctgggaaggagggaaagggagggagagttttgcgggggttggcagtggagagcaggctggagaggagatggctaatagctgtttaatggaaacctgctgggctggagggagttaggctgaatttcccgacttcctctgccagttattgacacagctctctttgtaagagaggaaagaaactaaacccacccaagggatgatttcagggggagaggtggagggcagatgtcctgggcaaaccgggcccctctgcccacacacctcacttgatccttttgccaaacttgtcaaactcaggggaactggcttcccagttgcccctttgccatattccaagtccccctcagacttcatgtctctgctcatcagcactgtcccaggatcctggagagggagaacccctggccccaggggaaagaggggggggtctcccgtttcctgtgcctgcaccagccctgcccccattgcgtctgcacacccctgcgtgtaactgcattccaaccactaataaagtgcctattgtacaggtc

SEQ ID NO: 428001 - DNA, 1717 bp, Homo sapiens
gatttgagacaggtcatgaggcacttggcaccagaagctgcctcatgacctgtctccaggcaccagaagcagcactggagaagttcatcaaattccttaataggaatgcctacatcatgattgccatctacggcaccaatttctgcacctcggccaggaatgccttcttcctgctcatgagaaacatcatcagagtggctgtcctggataaagttactgacttcctcttcctgttgggcaaacttctgatcgttggtagtgtggggatcctggctttcttcttcttcacccaccgtatcaggatcgtgcaggatacagcaccacccctcaattattactgggttcctatactgacggtgatcgttggctcctacttgattgcacacggtttcttcagcgtctatggcatgtgtgtggacacgctgttcctctgcttcttggaggacctggagaggaatgacggctcggccgagaggccttacttcatgtcttccaccctcaagaaactcttgaacaagaccaacaagaaggcagcggagtcctgaaggccccgtgctccccacctctcaaggagtctcatgccgcagggtgctcagtagctgggtctgttcccccagccccttgggctcacctgaagtcctatcactgccgctctgcccctccccatgagccagatcccaccagtttctggacgtggagagtctggggcatctccttcttatgccaaggggcgcttggagttttcatggctgcccctccagactgcgagaaacaagtaaaaacccattggggcctcttgatgtctgggatggcacgtggcccgacctccacaagctccctcatgcttcctgtcccccgcttacacgacaacgggccagaccacgggaaggacggtgtttgtgtctgagggagctgctggccacagtgaacacccacgtttattcctgcctgctccggccaggactgaaccccttctccacacctgaacagttggctcaagggccaccagaagcatttctttattattattattttttaacctggacatgcattaaagggtctattagctttctttccgtctgtctcaacagctgagatggggccgccaaggagtgccttccttttgctccctcctagctgggagtgacgggtgggagtgtgtgtgcccaggtgggggtgtctcctggctgggaaggagggaaagggagggagagttttgcgggggttggcagtggagagcaggctggagaggagatggctaatagctgtttaatggaaacctgctgggctggagggagttaggctgaatttcccgacttcctctgccagttattgacacagctctctttgtaagagaggaaagaaactaaacccacccaagggatgatttcagggggagaggtggagggcagatgtcctgggcaaaccgggcccctctgcccacacacctcacttgatccttttgccaaacttgtcaaactcaggggaactggcttcccagttgcccctttgccatattccaagtccccctcagacttcatgtctctgctcatcagcactgtcccaggatcctggagagggagaacccctggccccaggggaaagaggggggggtctcccgtttcctgtgcctgcaccagccctgcccccattgcgtctgcacacccctgcgtgtaactgcattccaaccactaataaagtgcctattgtacaggtc

SEQ ID NO: 428002 - DNA, 2862 bp, Homo sapiens
gggagcagctgcagccccgcccgcgccctcccgggtcccttagtctgggcagctgcccagctcgggccggtctgaccggtttgggccgccccgcctggcgctgtgctgggaggagccgccgccagtcgcgcggtcagtgcctccctccagactcgggagggtcgagggggcgcgggagagagcgcgggcggccgccggggctggtcgcctgcagggatgggggacgagcggccccactactacgggaaacacggaacgccacagaagtatgatcccactttcaaaggacccatttacaataggggctgcacggatatcatatgctgtgtgttcctgctcctggccattgtgggctacgtggctgtaggcatcatagcctggactcatggagaccctcgaaaggtgatctaccccactgatagccggggcgagttctgcgggcagaagggcacaaaaaacgagaacaaaccctatctgttttatttcaacattgtgaaatgtgccagccccctggttctgctggaattccaatgtcccactccccagatctgcgtggaaaaatgccccgaccgctacctcacgtacctgaatgctcgcagctcccgggactttgagtactataagcagttctgtgttcctggcttcaagaacaataaaggagtggctgaggtgcttcgagatggtgactgccctgctgtcctcatccccagcaaacccttggcccggagatgcttccccgctatccacgcctacaagggtgtcctgatggtgggcaatgagacgacctatgaggatgggcatggctcccggaaaaacatcacagacctggtggagggcgccaagaaagccaatggagtcctagaggcgcggcaactcgccatgcgcatatttgaagattacaccgtctcttggtactggattatcataggcctggtcattgccatggcgatgagcctcctgttcatcatcctgcttcgcttcctggctggtattatggtctgggtgatgatcatcatggtgattctggtgctgggctacggaatatttcactgctacatggagtactcccgactgcgtggtgaggccggctctgatgtctctttggtggacctcggctttcagacggatttccgggtgtacctgcacttacggcagacctggttggcctttatgatcattctgagtatccttgaagtcattatcatcttgctgctcatctttctccggaagagaattctcatcgcgattgcactcatcaaagaagccagcagggctgtgggatacgtcatgtgctccttgctctacccactggtcaccttcttcttgctgtgcctctgcatcgcctactgggccagcactgctgtcttcctgtccacttccaacgaagcggtctataagatctttgatgacagcccctgcccatttactgcgaaaacctgcaacccagagaccttcccctcctccaatgagtcccgccaatgccccaatgcccgttgccagttcgccttctacggtggtgagtcgggctaccaccgggccctgctgggcctgcagatcttcaatgccttcatgttcttctggttggccaacttcgtgctggcgctgggccaggtcacgctggccggggcctttgcctcctactactgggccctgcgcaagccggacgacctgccggccttcccgctcttctctgcctttggccgggcgctcaggtaccacacaggctccctggcctttggcgcgctcatcctggccattgtgcagatcatccgtgtgatactcgagtacctggatcagcggctgaaagctgcagagaacaagtttgccaagtgcctcatgacctgtctcaaatgctgcttctggtgcctggagaagttcatcaaattccttaataggaatgcctacatcatgattgccatctacggcaccaatttctgcacctcggccaggaatgccttcttcctgctcatgagaaacatcatcagagtggctgtcctggataaagttactgacttcctcttcctgttgggcaaacttctgatcgttggtagtgtggggatcctggctttcttcttcttcacccaccgtatcaggatcgtgcaggatacagcaccacccctcaattattactgggttcctatactgacggtgatcgttggctcctacttgattgcacacggtttcttcagcgtctatggcatgtgtgtggacacgctgttcctctgcttcttggaggacctggagaggaatgacggctcggccgagaggccttacttcatgtcttccaccctcaagaaactcttgaacaagaccaacaagaaggcagcggagtcctgaaggccccgtgctccccacctctcaaggagtctcatgccgcagggtgctcagtagctgggtctgttcccccagccccttgggctcacctgaagtcctatcactgccgctctgcccctccccatgagccagatcccaccagtttctggacgtggagagtctggggcatctccttcttatgccaaggggcgcttggagttttcatggctgcccctccagactgcgagaaacaagtaaaaacccattggggcctcttgatgtctgggatggcacgtggcccgacctccacaagctccctcatgcttcctgtcccccgcttacacgacaacgggccagaccacgggaaggacggtgtttgtgtctgagggagctgctggccacagtgaacacccacgtttattcctgcctgctccggccaggactgaaccccttctccacacctgaacagttggctcaagggccaccagaagcatttctttattattattattttttaacctggacatgcattaaagggtctattagctt

SEQ ID NO: 428003 - DNA, 3454 bp, Homo sapiens
gggagcagctgcagccccgcccgcgccctcccgggtcccttagtctgggcagctgcccagctcgggccggtctgaccggtttgggccgccccgcctggcgctgtgctgggaggagccgccgccagtcgcgcggtcagtgcctccctccagactcgggagggtcgagggggcgcgggagagagcgcgggcggccgccggggctggtcgcctgcagggatgggggacgagcggccccactactacgggaaacacggaacgccacagaagtatgatcccactttcaaaggacccatttacaataggggctgcacggatatcatatgctgtgtgttcctgctcctggccattgtgggctacgtggctgtaggcatcatagcctggactcatggagaccctcgaaaggtgatctaccccactgatagccggggcgagttctgcgggcagaagggcacaaaaaacgagaacaaaccctatctgttttatttcaacattgtgaaatgtgccagccccctggttctgctggaattccaatgtcccactccccagatctgcgtggaaaaatgccccgaccgctacctcacgtacctgaatgctcgcagctcccgggactttgagtactataagcagttctgtgttcctggcttcaagaacaataaaggagtggctgaggtgcttcgagatggtgactgccctgctgtcctcatccccagcaaacccttggcccggagatgcttccccgctatccacgcctacaagggtgtcctgatggtgggcaatgagacgacctatgaggatgggcatggctcccggaaaaacatcacagacctggtggagggcgccaagaaagccaatggagtcctagaggcgcggcaactcgccatgcgcatatttgaagattacaccgtctcttggtactggattatcataggcctggtcattgccatggcgatgagcctcctgttcatcatcctgcttcgcttcctggctggtattatggtctgggtgatgatcatcatggtgattctggtgctgggctacggaatatttcactgctacatggagtactcccgactgcgtggtgaggccggctctgatgtctctttggtggacctcggctttcagacggatttccgggtgtacctgcacttacggcagacctggttggcctttatgatcattctgagtatccttgaagtcattatcatcttgctgctcatctttctccggaagagaattctcatcgcgattgcactcatcaaagaagccagcagggctgtgggatacgtcatgtgctccttgctctacccactggtcaccttcttcttgctgtgcctctgcatcgcctactgggccagcactgctgtcttcctgtccacttccaacgaagcggtctataagatctttgatgacagcccctgcccatttactgcgaaaacctgcaacccagagaccttcccctcctccaatgagtcccgccaatgccccaatgcccgttgccagttcgccttctacggtggtgagtcgggctaccaccgggccctgctgggcctgcagatcttcaatgccttcatgttcttctggttggccaacttcgtgctggcgctgggccaggtcacgctggccggggcctttgcctcctactactgggccctgcgcaagccggacgacctgccggccttcccgctcttctctgcctttggccgggcgctcaggtaccacacaggctccctggcctttggcgcgctcatcctggccattgtgcagatcatccgtgtgatactcgagtacctggatcagcggctgaaagctgcagagaacaagtttgccaagtgcctcatgacctgtctcaaatgctgcttctggtgcctggagaagttcatcaaattccttaataggaatgcctacatcatgattgccatctacggcaccaatttctgcacctcggccaggaatgccttcttcctgctcatgagaaacatcatcagagtggctgtcctggataaagttactgacttcctcttcctgttgggcaaacttctgatcgttggtagtgtggggatcctggctttcttcttcttcacccaccgtatcaggatcgtgcaggatacagcaccacccctcaattattactgggttcctatactgacggtgatcgttggctcctacttgattgcacacggtttcttcagcgtctatggcatgtgtgtggacacgctgttcctctgcttcttggaggacctggagaggaatgacggctcggccgagaggccttacttcatgtcttccaccctcaagaaactcttgaacaagaccaacaagaaggcagcggagtcctgaaggccccgtgctccccacctctcaaggagtctcatgccgcagggtgctcagtagctgggtctgttcccccagccccttgggctcacctgaagtcctatcactgccgctctgcccctccccatgagccagatcccaccagtttctggacgtggagagtctggggcatctccttcttatgccaaggggcgcttggagttttcatggctgcccctccagactgcgagaaaccacaagctccctcatgcttcctgtcccccgcttacacgacaacgggccagaccacgggaaggacggtgtttgtgtctgagggagctgctggccacagtgaacacccacgtttattcctgcctgctccggccaggactgaaccccttctccacacctgaacagttggctcaagggccaccagaagcatttctttattattattattttttaacctggacatgcattaaagggtctattagctttctttccgtctgtctcaacagctgagatggggccgccaaggagtgccttccttttgctccctcctagctgggagtgacgggtgggagtgtgtgtgcccaggtgggggtgtctcctggctgggaaggagggaaagggagggagagttttgcgggggttggcagtggagagcaggctggagaggagatggctaatagctgtttaatggaaacctgctgggctggagggagttaggctgaatttcccgacttcctctgccagttattgacacagctctctttgtaagagaggaaagaaactaaacccacccaagggatgatttcagggggagaggtggagggcagatgtcctgggcaaaccgggcccctctgcccacacacctcacttgatccttttgccaaacttgtcaaactcaggggaactggcttcccagttgcccctttgccatattccaagtccccctcagacttcatgtctctgctcatcagcactgtcccaggatcctggagagggagaacccctggccccaggggaaagaggggggggtctcccgtttcctgtgcctgcaccagccctgcccccattgcgtctgcacacccctgcgtgtaactgcattccaaccactaataaagtgcctattgtacaggtc

SEQ ID NO: 428004 - DNA, 2797 bp, Homo sapiens
gggagcagctgcagccccgcccgcgccctcccgggtcccttagtctgggcagctgcccagctcgggccggtctgaccggtttgggccgccccgcctggcgctgtgctgggaggagccgccgccagtcgcgcggtcagtgcctccctccagactcgggagggtcgagggggcgcgggagagagcgcgggcggccgccggggctggtcgcctgcagggatgggggacgagcggccccactactacgggaaacacggaacgccacagaagtatgatcccactttcaaaggacccatttacaataggggctgcacggatatcatatgctgtgtgttcctgctcctggccattgtgggctacgtggctgtaggcatcatagcctggactcatggagaccctcgaaaggtgatctaccccactgatagccggggcgagttctgcgggcagaagggcacaaaaaacgagaacaaaccctatctgttttatttcaacattgtgaaatgtgccagccccctggttctgctggaattccaatgtcccactccccagatctgcgtggaaaaatgccccgaccgctacctcacgtacctgaatgctcgcagctcccgggactttgagtactataagcagttctgtgttcctggcttcaagaacaataaaggagtggctgaggtgcttcgagatggtgactgccctgctgtcctcatccccagcaaacccttggcccggagatgcttccccgctatccacgcctacaagggtgtcctgatggtgggcaatgagacgacctatgaggatgggcatggctcccggaaaaacatcacagacctggtggagggcgccaagaaagccaatggagtcctagaggcgcggcaactcgccatgcgcatatttgaagattacaccgtctcttggtactggattatcataggcctggtcattgccatggcgatgagcctcctgttcatcatcctgcttcgcttcctggctggtattatggtctgggtgatgatcatcatggtgattctggtgctgggctacggaatatttcactgctacatggagtactcccgactgcgtggtgaggccggctctgatgtctctttggtggacctcggctttcagacggatttccgggtgtacctgcacttacggcagacctggttggcctttatgatcattctgagtatccttgaagtcattatcatcttgctgctcatctttctccggaagagaattctcatcgcgattgcactcatcaaagaagccagcagggctgtgggatacgtcatgtgctccttgctctacccactggtcaccttcttcttgctgtgcctctgcatcgcctactgggccagcactgctgtcttcctgtccacttccaacgaagcggtctataagatctttgatgacagcccctgcccatttactgcgaaaacctgcaacccagagaccttcccctcctccaatgagtcccgccaatgccccaatgcccgttgccagttcgccttctacggtggtgagtcgggctaccaccgggccctgctgggcctgcagatcttcaatgccttcatgttcttctggttggccaacttcgtgctggcgctgggccaggtcacgctggccggggcctttgcctcctactactgggccctgcgcaagccggacgacctgccggccttcccgctcttctctgcctttggccgggcgctcaggtaccacacaggctccctggcctttggcgcgctcatcctggccattgtgcagatcatccgtgtgatactcgagtacctggatcagcggctgaaagctgcagagaacaagtttgccaagtgcctcatgacctgtctcaaatgctgcttctggtgcctggagaagttcatcaaattccttaataggaatgcctacatcatgattgccatctacggcaccaatttctgcacctcggccaggaatgccttcttcctgctcatgagaaacatcatcagagtggctgtcctggataaagttactgacttcctcttcctgttgggcaaacttctgatcgttggtagtgtggggatcctggctttcttcttcttcacccaccgtatcaggatcgtgcaggatacagcaccacccctcaattattactgggttcctatactgacggtgatcgttggctcctacttgattgcacacggtttcttcagcgtctatggcatgtgtgtggacacgctgttcctctgcttcttggaggacctggagaggaatgacggctcggccgagaggccttacttcatgtcttccaccctcaagaaactcttgaacaagaccaacaagaaggcagcggagtcctgaaggccccgtgctccccacctctcaaggagtctcatgccgcagggtgctcagtagctgggtctgttcccccagccccttgggctcacctgaagtcctatcactgccgctctgcccctccccatgagccagatcccaccagtttctggacgtggagagtctggggcatctccttcttatgccaaggggcgcttggagttttcatggctgcccctccagactgcgagaaacaagtaaaaacccattggggcctcttgatgtctgggatggcacgtggcccgacctccacaagctccctcatgcttcctgtcccccgcttacacgacaacgggccagaccacgggaaggacggtgtttgtgtctgagggagctgctggccacagtgaacacccacgtttattcctgcctgctccggccaggactgaaccccttcgccgcgatcctatctctgggtaccgagctt

SEQ ID NO: 428005 - DNA, 3395 bp, Homo sapiens
gggagcagctgcagccccgcccgcgccctcccgggtcccttagtctgggcagctgcccagctcgggccggtctgaccggtttgggccgccccgcctggcgctgtgctgggaggagccgccgccagtcgcgcggtcagtgcctccctccagactcgggagggtcgagggggcgcgggagagagcgcgggcggccgccggggctggtcgcctgcagggatgggggacgagcggccccactactacgggaaacacggaacgccacagaagtatgatcccactttcaaaggacccatttacaataggggctgcacggatatcatatgctgtgtgttcctgctcctggccattgtgggctacgtggctgtaggcatcatagcctggactcatggagaccctcgaaaggtgatctaccccactgatagccggggcgagttctgcgggcagaagggcacaaaaaacgagaacaaaccctatctgttttatttcaacattgtgaaatgtgccagccccctggttctgctggaattccaatgtcccactccccagatctgcgtggaaaaatgccccgaccgctacctcacgtacctgaatgctcgcagctcccgggactttgagtactataagcagttctgtgttcctggcttcaagaacaataaaggagtggctgaggtgcttcgagatggtgactgccctgctgtcctcatccccagcaaacccttggcccggagatgcttccccgctatccacgcctacaagggtgtcctgatggtgggcaatgagacgacctatgaggatgggcatggctcccggaaaaacatcacagacctggtggagggcgccaagaaagccaatggagtcctagaggcgcggcaactcgccatgcgcatatttgaagattacaccgtctcttggtactggattatcataggcctggtcattgccatggcgatgagcctcctgttcatcatcctgcttcgcttcctggctggtattatggtctgggtgatgatcatcatggtgattctggtgctgggctacggaatatttcactgctacatggagtactcccgactgcgtggtgaggccggctctgatgtctctttggtggacctcggctttcagacggatttccgggtgtacctgcacttacggcagacctggttggcctttatgatcattctgagtatccttgaagtcattatcatcttgctgctcatctttctccggaagagaattctcatcgcgattgcactcatcaaagaagccagcagggctgtgggatacgtcatgtgctccttgctctacccactggtcaccttcttcttgctgtgcctctgcatcgcctactgggccagcactgctgtcttcctgtccacttccaacgaagcggtctataagatctttgatgacagcccctgcccatttactgcgaaaacctgcaacccagagaccttcccctcctccaatgagtcccgccaatgccccaatgcccgttgccagttcgccttctacggtggtgagtcgggctaccaccgggccctgctgggcctgcagatcttcaatgccttcatgttcttctggttggccaacttcgtgctggcgctgggccaggtcacgctggccggggcctttgcctcctactactgggccctgcgcaagccggacgacctgccggccttcccgctcttctctgcctttggccgggcgctcaggtaccacacaggctccctggcctttggcgcgctcatcctggccattgtgcagatcatccgtgtgatactcgagtacctggatcagcggctgaaagctgcagagaacaagtttgccaagtgcctcatgacctgtctcaaatgctgcttctggtgcctggagaagttcatcaaattccttaataggaatgcctacatcatgattgccatctacggcaccaatttctgcacctcggccaggaatgccttcttcctgctcatgagaaacatcatcagagtggctgtcctggataaagttactgacttcctcttcctgttgggcaaacttctgatcgttggtagtgtggggatcctggctttcttcttcttcacccaccgtatcaggatcgtgcaggatacagcaccacccctcaattattactgggttcctatactgacggtgatcgttggctcctacttgattgcacacggtttcttcagcgtctatggcatgtgtgtggacacgctgttcctctgcttcttggaggacctggagaggaatgacggctcggccgagaggccttacttcatgtcttccaccctcaagaaactcttgaacaagaccaacaagaaggcagcggagtcctgaaggccccgtgctccccacctctcaaggagtctcatgccgcagggtgctcagtagctgggtctgttcccccagccccttgggctcacctgaagtcctatcactgccgctctgcccctccccatgagccagatcccaccagtttctggacgtggagagtctggggcatctccacaagctccctcatgcttcctgtcccccgcttacacgacaacgggccagaccacgggaaggacggtgtttgtgtctgagggagctgctggccacagtgaacacccacgtttattcctgcctgctccggccaggactgaaccccttctccacacctgaacagttggctcaagggccaccagaagcatttctttattattattattttttaacctggacatgcattaaagggtctattagctttctttccgtctgtctcaacagctgagatggggccgccaaggagtgccttccttttgctccctcctagctgggagtgacgggtgggagtgtgtgtgcccaggtgggggtgtctcctggctgggaaggagggaaagggagggagagttttgcgggggttggcagtggagagcaggctggagaggagatggctaatagctgtttaatggaaacctgctgggctggagggagttaggctgaatttcccgacttcctctgccagttattgacacagctctctttgtaagagaggaaagaaactaaacccacccaagggatgatttcagggggagaggtggagggcagatgtcctgggcaaaccgggcccctctgcccacacacctcacttgatccttttgccaaacttgtcaaactcaggggaactggcttcccagttgcccctttgccatattccaagtccccctcagacttcatgtctctgctcatcagcactgtcccaggatcctggagagggagaacccctggccccaggggaaagaggggggggtctcccgtttcctgtgcctgcaccagccctgcccccattgcgtctgcacacccctgcgtgtaactgcattccaaccactaataaagtgcctattgtacaggtc

SEQ ID NO: 428006 - DNA, 2629 bp, Homo sapiens
gggagcagctgcagccccgcccgcgccctcccgggtcccttagtctgggcagctgcccagctcgggccggtctgaccggtttgggccgccccgcctggcgctgtgctgggaggagccgccgccagtcgcgcggtcagtgcctccctccagactcgggagggtcgagggggcgcgggagagagcgcgggcggccgccggggctggtcgcctgcagggatgggggacgagcggccccactactacgggaaacacggaacgccacagaagtatgatcccactttcaaaggacccatttacaataggggctgcacggatatcatatgctgtgtgttcctgctcctggccattgtgggctacgtggctgtaggcatcatagcctggactcatggagaccctcgaaaggtgatctaccccactgatagccggggcgagttctgcgggcagaagggcacaaaaaacgagaacaaaccctatctgttttatttcaacattgtgaaatgtgccagccccctggttctgctggaattccaatgtcccactccccagatctgcgtggaaaaatgccccgaccgctacctcacgtacctgaatgctcgcagctcccgggactttgagtactataagcagttctgtgttcctggcttcaagaacaataaaggagtggctgaggtgcttcgagatggtgactgccctgctgtcctcatccccagcaaacccttggcccggagatgcttccccgctatccacgcctacaagggtgtcctgatggtgggcaatgagacgacctatgaggatgggcatggctcccggaaaaacatcacagacctggtggagggcgccaagaaagccaatggagtcctagaggcgcggcaactcgccatgcgcatatttgaagattacaccgtctcttggtactggattatcataggcctggtcattgccatggcgatgagcctcctgttcatcatcctgcttcgcttcctggctggtattatggtctgggtgatgatcatcatggtgattctggtgctgggctacggaatatttcactgctacatggagtactcccgactgcgtggtgaggccggctctgatgtctctttggtggacctcggctttcagacggatttccgggtgtacctgcacttacggcagacctggttggcctttatgatcattctgagtatccttgaagtcattatcatcttgctgctcatctttctccggaagagaattctcatcgcgattgcactcatcaaagaagccagcagggctgtgggatacgtcatgtgctccttgctctacccactggtcaccttcttcttgctgtgcctctgcatcgcctactgggccagcactgctgtcttcctgtccacttccaacgaagcggtctataagatctttgatgacagcccctgcccatttactgcgaaaacctgcaacccagagaccttcccctcctccaatgagtcccgccaatgccccaatgcccgttgccagttcgccttctacggtggtgagtcgggctaccaccgggccctgctgggcctgcagatcttcaatgccttcatgttcttctggttggccaacttcgtgctggcgctgggccaggtcacgctggccggggcctttgcctcctactactgggccctgcgcaagccggacgacctgccggccttcccgctcttctctgcctttggccgggcgctcaggtaccacacaggctccctggcctttggcgcgctcatcctggccattgtgcagatcatccgtgtgatactcgagtacctggatcagcggctgaaagctgcagagaacaagtttgccaagtgcctcatgacctgtctcaaatgctgcttctggtgcctggagaagttcatcaaattccttaataggaatgcctacatcatgattgccatctacggcaccaatttctgcacctcggccaggaatgccttcttcctgctcatgagaaacatcatcagagtggctgtcctggataaagttactgacttcctcttcctgttgggcaaacttctgatcgttggtagtgtggggatcctggctttcttcttcttcacccaccgtatcaggatcgtgcaggatacagcaccacccctcaattattactgggttcctatactgacggtgatcgttggctcctacttgattgcacacggtttcttcagcgtctatggcatgtgtgtggacacgctgttcctctgcttcttggaggacctggagaggaatgacggctcggccgagaggccttacttcatgtcttccaccctcaagaaactcttgaacaagaccaacaagaaggcagcggagtcctgaaggccccgtgctccccacctctcaaggagtctcatgccgcagggtgctcagtagctgggtctgttcccccagccccttgggctcacctgaagtcctatcactgccgctctgcccctccccatgagccagatcccaccagtttctggacgtggagagtctggggcatctccttcttatgccaaggggcgcttggagttttcatggctgcccctccagactgcgagaaacggtggtttaaccccagtagggagtaatgaccacgatgatggattcgggggcggtctttttaagt

SEQ ID NO: 428007 - DNA, 3035 bp, Homo sapiens
gggagcagctgcagccccgcccgcgccctcccgggtcccttagtctgggcagctgcccagctcgggccggtctgaccggtttgggccgccccgcctggcgctgtgctgggaggagccgccgccagtcgcgcggtcagtgcctccctccagactcgggagggtcgagggggcgcgggagagagcgcgggcggccgccggggctggtcgcctgcagggatgggggacgagcggccccactactacgggaaacacggaacgccacagaagtatgatcccactttcaaaggacccatttacaataggggctgcacggatatcatatgctgtgtgttcctgctcctggccattgtgggctacgtggctgtaggcatcatagcctggactcatggagaccctcgaaaggtgatctaccccactgatagccggggcgagttctgcgggcagaagggcacaaaaaacgagaacaaaccctatctgttttatttcaacattgtgaaatgtgccagccccctggttctgctggaattccaatgtcccactccccagatctgcgtggaaaaatgccccgaccgctacctcacgtacctgaatgctcgcagctcccgggactttgagtactataagcagttctgtgttcctggcttcaagaacaataaaggagtggctgaggtgcttcgagatggtgactgccctgctgtcctcatccccagcaaacccttggcccggagatgcttccccgctatccacgcctacaagggtgtcctgatggtgggcaatgagacgacctatgaggatgggcatggctcccggaaaaacatcacagacctggtggagggcgccaagaaagccaatggagtcctagaggcgcggcaactcgccatgcgcatatttgaagattacaccgtctcttggtactggattatcataggcctggtcattgccatggcgatgagcctcctgttcatcatcctgcttcgcttcctggctggtattatggtctgggtgatgatcatcatggtgattctggtgctgggctacggaatatttcactgctacatggagtactcccgactgcgtggtgaggccggctctgatgtctctttggtggacctcggctttcagacggatttccgggtgtacctgcacttacggcagacctggttggcctttatgatcattctgagtatccttgaagtcattatcatcttgctgctcatctttctccggaagagaattctcatcgcgattgcactcatcaaagaagccagcagggctgtgggatacgtcatgtgctccttgctctacccactggtcaccttcttcttgctgtgcctctgcatcgcctactgggccagcactgctgtcttcctgtccacttccaacgaagcggtctataagatctttgatgacagcccctgcccatttactgcgaaaacctgcaacccagagaccttcccctcctccaatgagtcccgccaatgccccaatgcccgttgccagttcgccttctacggtggtgagtcgggctaccaccgggccctgctgggcctgcagatcttcaatgccttcatgttcttctggttggccaacttcgtgctggcgctgggccaggtcacgctggccggggcctttgcctcctactactgggccctgcgcaagccggacgacctgccggccttcccgctcttctctgcctttggccgggcgctcaggtaccacacaggctccctggcctttggcgcgctcatcctggccattgtgcagatcatccgtgtgatactcgagtacctggatcagcggctgaaagctgcagagaacaagtttgccaagtgcctcatgacctgtctcaaatgctgcttctggtgcctggagaagttcatcaaattccttaataggaatgcctacatcatgattgccatctacggcaccaatttctgcacctcggccaggaatgccttcttcctgctcatgagaaacatcatcagagtggctgtcctggataaagttactgacttcctcttcctgttgggcaaacttctgatcgttggtagtgtggggatcctggctttcttcttcttcacccaccgtatcaggatcgtgcaggatacagcaccacccctcaattattactgggttcctatactgacggtgatcgttggctcctacttgattgcacacggtttcttcagcgtctatggcatgtgtgtggacacgctgttcctctgcttcttggaggacctggagaggaatgacggctcggccgagaggccttacttcatgtcttccaccctcaagaaactcttgaacaagaccaacaagaaggcagcggagtcctgaaggccccgtgctccccacctctcaaggagtctcatgccgcagggtgctcagtagctgggtctgttcccccagccccttgggctcacctgaagtcctatcactgccgctctgcccctccccatgagccagatcccaccagtttctggacgtggagagtctggggcatctccacaagctccctcatgcttcctgtcccccgcttacacgacaacgggccagaccacgggaaggacggtgtttgtgtctgagggagctgctggccacagtgaacacccacgtttattcctgcctgctccggccaggactgaaccccttctccacacctgaacagttggctcaagggccaccagaagcatttctttattattattattttttaacctggacatgcattaaagggtctattagcttaaaaaaacaacaacacaaaacaaaaacacaacatgtgtgacacgcgatggagcccgcaaaaaagctctcccaaacccactggttgggcgcgccggggcccagaaggcaacggcacacgggggcaaacagacgggttcccccagaggaacaccgcggcacagacacaaggctggggaatccacccaagtaaaaaaaccgcgcggagacacacgagttgtggacacaaccccaaaggagatccggaagacacaaggggaccaccaacgggacccagggaccgaaacaag

SEQ ID NO: 428008 - DNA, 2495 bp, Homo sapiens
gggagcagctgcagccccgcccgcgccctcccgggtcccttagtctgggcagctgcccagctcgggccggtctgaccggtttgggccgccccgcctggcgctgtgctgggaggagccgccgccagtcgcgcggtcagtgcctccctccagactcgggagggtcgagggggcgcgggagagagcgcgggcggccgccggggctggtcgcctgcagggatgggggacgagcggccccactactacgggaaacacggaacgccacagaagtatgatcccactttcaaaggacccatttacaataggggctgcacggatatcatatgctgtgtgttcctgctcctggccattgtgggctacgtggctgtaggcatcatagcctggactcatggagaccctcgaaaggtgatctaccccactgatagccggggcgagttctgcgggcagaagggcacaaaaaacgagaacaaaccctatctgttttatttcaacattgtgaaatgtgccagccccctggttctgctggaattccaatgtcccactccccagatctgcgtggaaaaatgccccgaccgctacctcacgtacctgaatgctcgcagctcccgggactttgagtactataagcagttctgtgttcctggcttcaagaacaataaaggagtggctgaggtgcttcgagatggtgactgccctgctgtcctcatccccagcaaacccttggcccggagatgcttccccgctatccacgcctacaagggtgtcctgatggtgggcaatgagacgacctatgaggatgggcatggctcccggaaaaacatcacagacctggtggagggcgccaagaaagccaatggagtcctagaggcgcggcaactcgccatgcgcatatttgaagattacaccgtctcttggtactggattatcataggcctggtcattgccatggcgatgagcctcctgttcatcatcctgcttcgcttcctggctggtattatggtctgggtgatgatcatcatggtgattctggtgctgggctacggaatatttcactgctacatggagtactcccgactgcgtggtgaggccggctctgatgtctctttggtggacctcggctttcagacggatttccgggtgtacctgcacttacggcagacctggttggcctttatgatcattctgagtatccttgaagtcattatcatcttgctgctcatctttctccggaagagaattctcatcgcgattgcactcatcaaagaagccagcagggctgtgggatacgtcatgtgctccttgctctacccactggtcaccttcttcttgctgtgcctctgcatcgcctactgggccagcactgctgtcttcctgtccacttccaacgaagcggtctataagatctttgatgacagcccctgcccatttactgcgaaaacctgcaacccagagaccttcccctcctccaatgagtcccgccaatgccccaatgcccgttgccagttcgccttctacggtggtgagtcgggctaccaccgggccctgctgggcctgcagatcttcaatgccttcatgttcttctggttggccaacttcgtgctggcgctgggccaggtcacgctggccggggcctttgcctcctactactgggccctgcgcaagccggacgacctgccggccttcccgctcttctctgcctttggccgggcgctcaggtaccacacaggctccctggcctttggcgcgctcatcctggccattgtgcagatcatccgtgtgatactcgagtacctggatcagcggctgaaagctgcagagaacaagtttgccaagtgcctcatgacctgtctcaaatgctgcttctggtgcctggagaagttcatcaaattccttaataggaatgcctacatcatgattgccatctacggcaccaatttctgcacctcggccaggaatgccttcttcctgctcatgagaaacatcatcagagtggctgtcctggataaagttactgacttcctcttcctgttgggcaaacttctgatcgttggtagtgtggggatcctggctttcttcttcttcacccaccgtatcaggatcgtgcaggatacagcaccacccctcaattattactgggttcctatactgacggtgatcgttggctcctacttgattgcacacggtttcttcagcgtctatggcatgtgtgtggacacgctgttcctctgcttcttggaggacctggagaggaatgacggctcggccgagaggccttacttcatgtcttccaccctcaagaaactcttgaacaagaccaacaagaaggcagcggagtcctgaaggccccgtgctccccacctctcaaggagtctcatgccgcagggtgctcagtagctggggttaaagctgatactactggcggaagcatgtctgcttcccatggtggtacgtgctggcattgatcctgtttgtggcttgaccaatggactctatcacag

SEQ ID NO: 428009 - DNA, 2050 bp, Homo sapiens
cggggcggggcgtgcagcccgcggagcctcccgcccgcccgggctggggtcgcgctggctcggactccgctccccgccccgccgcggccatggaggacgagcggaaaaacggagcctacggaacgccacagaagtatgatcccactttcaaaggacccatttacaataggggctgcacggatatcatatgctgtgtgttcctgctcctggccattgtgggctacgtggctgtaggcatcatagcctggactcatggagaccctcgaaaggtgatctaccccactgatagccggggcgagttctgcgggcagaagggcacaaaaaacgagaacaaaccctatctgttttatttcaacattgtgaaatgtgccagccccctggttctgctggaattccaatgtcccactccccagatctgcgtggaaaaatgccccgaccgctacctcacgtacctgaatgctcgcagctcccgggactttgagtactataagcagttctgtgttcctggcttcaagaacaataaaggagtggctgaggtgcttcgagatggtgactgccctgctgtcctcatccccagcaaacccttggcccggagatgcttccccgctatccacgcctacaagggtgtcctgatggtgggcaatgagacgacctatgaggatgggcatggctcccggaaaaacatcacagacctggtggagggcgccaagaaagccaatggagtcctagaggcgcggcaactcgccatgcgcatatttgaagattacaccgtctcttggtactggattatcataggcctggtcattgccatggcgatgagcctcctgttcatcatcctgcttcgcttcctggctggtattatggtctgggtgatgatcatcatggtgattctggtgctgggctacggaatatttcactgctacatggagtactcccgactgcgtggtgaggccggctctgatgtctctttggtggacctcggctttcagacggatttccgggtgtacctgcacttacggcagacctggttggcctttatgatcattctgagtatccttgaagtcattatcatcttgctgctcatctttctccggaagagaattctcatcgcgattgcactcatcaaagaagccagcagggctgtgggatacgtcatgtgctccttgctctacccactggtcaccttcttcttgctgtgcctctgcatcgcctactgggccagcactgctgtcttcctgtccacttccaacgaagcggtctataagatctttgatgacagcccctgcccatttactgcgaaaacctgcaacccagagaccttcccctcctccaatgagtcccgccaatgccccaatgcccgttgccagttcgccttctacggtggtgagtcgggctaccaccgggccctgctgggcctgcagatcttcaatgccttcatgttcttctggttggccaacttcgtgctggcgctgggccaggtcacgctggccggggcctttgcctcctactactgggccctgcgcaagccggacgacctgccggccttcccgctcttctctgcctttggccgggcgctcaggtaccacacaggctccctggcctttggcgcgctcatcctggccattgtgcagatcatccgtgtgatactcgagtacctggatcagcggctgaaagctgcagagaacaagtttgccaagtgcctcatgacctgtctcaaatgctgcttctggtgcctggagaagttcatcaaattccttaataggaatgcctacatcatgattgccatctacggcaccaatttctgcacctcggccaggaatgccttcttcctgctcatgagaaacatcatcagagtggctgtcctggataaagttactgacttcctcttcctgttgggcaaacttctgatcgttggtagtgtgggtgagtgccgcccacctagcctctcggggtgtgggagcctgatttctgtcttctgtgatgagtgtcatcttcttaggaggctgtttcctatatccagaacccttcgccatcttgctttcttctcctt

SEQ ID NO: 428010 - DNA, 1758 bp, Homo sapiens
  misc_feature (1542)..(1542): n is a, c, g, or t
  misc_feature (1555)..(1556): n is a, c, g, or t
  misc_feature (1560)..(1560): n is a, c, g, or t
  misc_feature (1562)..(1562): n is a, c, g, or t
  misc_feature (1564)..(1564): n is a, c, g, or t
  misc_feature (1566)..(1566): n is a, c, g, or t
  misc_feature (1571)..(1571): n is a, c, g, or t
  misc_feature (1580)..(1582): n is a, c, g, or t
  misc_feature (1591)..(1591): n is a, c, g, or t
  misc_feature (1603)..(1604): n is a, c, g, or t
  misc_feature (1611)..(1611): n is a, c, g, or t
  misc_feature (1614)..(1615): n is a, c, g, or t
cggggcggggcgtgcagcccgcggagcctcccgcccgcccgggctggggtcgcgctggctcggactccgctccccgccccgccgcggccatggaggacgagcggaaaaacggagcctacggaacgccacagaagtatgatcccactttcaaaggacccatttacaataggggctgcacggatatcatatgctgtgtgttcctgctcctggccattgtgggctacgtggctgtaggcatcatagcctggactcatggagaccctcgaaaggtgatctaccccactgatagccggggcgagttctgcgggcagaagggcacaaaaaacgagaacaaaccctatctgttttatttcaacattgtgaaatgtgccagccccctggttctgctggaattccaatgtcccactccccagatctgcgtggaaaaatgccccgaccgctacctcacgtacctgaatgctcgcagctcccgggactttgagtactataagcagttctgtgttcctggcttcaagaacaataaaggagtggctgaggtgcttcgagatggtgactgccctgctgtcctcatccccagcaaacccttggcccggagatgcttccccgctatccacgcctacaagggtgtcctgatggtgggcaatgagacgacctatgaggatgggcatggctcccggaaaaacatcacagacctggtggagggcgccaagaaagccaatggagtcctagaggcgcggcaactcgccatgcgcatatttgaagattacaccgtctcttggtactggattatcataggcctggtcattgccatggcgatgagcctcctgttcatcatcctgcttcgcttcctggctggtattatggtctgggtgatgatcatcatggtgattctggtgctgggctacggaatatttcactgctacatggagtactcccgactgcgtggtgaggccggctctgatgtctctttggtggacctcggctttcagacggatttccgggtgtacctgcacttacggcagacctggttggcctttatgatcattctgagtatccttgaagtcattatcatcttgctgctcatctttctccggaagagaattctcatcgcgattgcactcatcaaagaagccagcagggctgtgggatacgtcatgtgctccttgctctacccactggtcaccttcttcttgctgtgcctctgcatcgcctactgggccagcactgctgtcttcctgtccacttccaacgaagcggtctataagatctttgatgacagcccctgcccatttactgcgaaaacctgcaacccagagaccttcccctcctccaatgagtcccgccaatgccccaatgcccgttgccagttcgccttctacggtggtgagtcgggctaccaccgggccctgctgggcctgcagatcttcaatgccttcatgttcttctggttggccaacttcgtgctggcgctgggccaggtcacgctggccggggcctttgcctcctatatggcctggcagcggagactgcggctccgtcttntgcttggcggggnnaggncnanangtccnggctggggnnnctggcaggnacaccgggaacnnaccgaanggnngaccgcacaaagtcgcgggccaggcgtccaggggtcggggaaacacatccaaaaagacacaggcagaatagggcggagtgccgagaaagagggggcagccgggaacagggaggaacaggaccctgtgcacgtggtcgcgcgcc

SEQ ID NO: 428011 - DNA, 461 bp, Homo sapiens
ccatggcctctggagtgggaacagggctggatctgaggagtggcagtgtctcagtatccctggatctttccacagcctggactcatggagaccctcgaaaggtgatctaccccactgatagccggggcgagttctgcgggcagaagggcacaaaaaacgagtgagttgactccttgcggcctggtggggctggggaagagggggcagaagattctaggcattccccatctctctaagtccagttaacaagtgcttataggctgggcgcggtgactcacgcccgaaattccaacactttgggaggccgaggcaggaatattgctttaggctaggagttcgagaccagcctggccaacatggcaaaaccccgtctccactaaaaatacacaaattagccaggcatggtggcacatgcctgtaatcccagctactcaggaggctgaggcaggagaatcacttga

SEQ ID NO: 428012 - DNA, 462 bp, Homo sapiens
agcatatgattatgattccaagtagggggaaagggttctggaagttctcttctgaaggtgacacttgagcagagacctaaggatgtgtgggatccagccatggggagagaatgcaccgggcggtgggaactgcaagtgtaaagtccctgaggcagaagcctcgatgtttgcttctgttaaatgggggcagttgtagctgctttgcaaagttgcaggaggcactgctggactgagcttgtggttcccccatgcaggaatatttcactgctacatggagtactcccgactgcgtggtgaggccggctctgatgtctctttggtggacctcggctttcagacggatttccgggtgtacctgcacttacggcagacctggttggcctttagtgagtcacagtctcccattcctgcccccacatgaggccttggagggagtggggagcccagccggctcagcctttg

SEQ ID NO: 428013 - DNA, 340 bp, Homo sapiens
gtggtgaggccggctctgatgtctctttggtggacctcggctttcagacggatttccgggtgtacctgcacttacggcagacctggttggcctttagtgagtcacagtctcccattcctgcccccacatgaggccttggagggagtggggagcccagccggctcagcctttgccctttgcagtgatcattctgagtatccttgaagtcattatcatcttgctgctcatctttctccggaagagaattctcatcgcgattgcactcatcaaagaagccagcaggtggggggccagggtgccaggggccaggatggagctgtccctagagttgtgtcttttg

SEQ ID NO: 428014 - DNA, 3376 bp, Homo sapiens
cggggcggggcgtgcagcccgcggagcctcccgcccgcccgggctggggtcgcgctggctcggactccgctccccgccccgccgcggccatggaggacgagcggaaaaacggagcctacggaacgccacagaagtatgatcccactttcaaaggacccatttacaataggggctgcacggatatcatatgctgtgtgttcctgctcctggccattgtgggctacgtggctgtaggcatcatagcctggactcatggagaccctcgaaaggtgatctaccccactgatagccggggcgagttctgcgggcagaagggcacaaaaaacgagaacaaaccctatctgttttatttcaacattgtgaaatgtgccagccccctggttctgctggaattccaatgtcccactccccagatctgcgtggaaaaatgccccgaccgctacctcacgtacctgaatgctcgcagctcccgggactttgagtactataagcagttctgtgttcctggcttcaagaacaataaaggagtggctgaggtgcttcgagatggtgactgccctgctgtcctcatccccagcaaacccttggcccggagatgcttccccgctatccacgcctacaagggtgtcctgatggtgggcaatgagacgacctatgaggatgggcatggctcccggaaaaacatcacagacctggtggagggcgccaagaaagccaatggagtcctagaggcgcggcaactcgccatgcgcatatttgaagattacaccgtctcttggtactggattatcataggcctggtcattgccatggcgatgagcctcctgttcatcatcctgcttcgcttcctggctggtattatggtctgggtgatgatcatcatggtgattctggtgctgggctacggaatatttcactgctacatggagtactcccgactgcgtggtgaggccggctctgatgtctctttggtggacctcggctttcagacggatttccgggtgtacctgcacttacggcagacctggttggcctttatgatcattctgagtatccttgaagtcattatcatcttgctgctcatctttctccggaagagaattctcatcgcgattgcactcatcaaagaagccagcagggctgtgggatacgtcatgtgctccttgctctacccactggtcaccttcttcttgctgtgcctctgcatcgcctactgggccagcactgctgtcttcctgtccacttccaacgaagcggtctataagatctttgatgacagcccctgcccatttactgcgaaaacctgcaacccagagaccttcccctcctccaatgagtcccgccaatgccccaatgcccgttgccagttcgccttctacggtggtgagtcgggctaccaccgggccctgctgggcctgcagatcttcaatgccttcatgttcttctggttggccaacttcgtgctggcgctgggccaggtcacgctggccggggcctttgcctcctactactgggccctgcgcaagccggacgacctgccggccttcccgctcttctctgcctttggccgggcgctcaggtaccacacaggctccctggcctttggcgcgctcatcctggccattgtgcagatcatccgtgtgatactcgagtacctggatcagcggctgaaagctgcagagaacaagtttgccaagtgcctcatgacctgtctcaaatgctgcttctggtgcctggagaagttcatcaaattccttaataggaatgcctacatcatgattgccatctacggcaccaatttctgcacctcggccaggaatgccttcttcctgctcatgagaaacatcatcagagtggctgtcctggataaagttactgacttcctcttcctgttgggcaaacttctgatcgttggtagtgtggggatcctggctttcttcttcttcacccaccgtatcaggatcgtgcaggatacagcaccacccctcaattattactgggttcctatactgacggtgatcgttggctcctacttgattgcacacggtttcttcagcgtctatggcatgtgtgtggacacgctgttcctctgcttcttggaggacctggagaggaatgacggctcggccgagaggccttacttcatgtcttccaccctcaagaaactcttgaacaagaccaacaagaaggcagcggagtcctgaaggccccgtgctccccacctctcaaggagtctcatgccgcagggtgctcagtagctgggtctgttcccccagccccttgggctcacctgaagtcctatcactgccgctctgcccctccccatgagccagatcccaccagtttctggacgtggagagtctggggcatctccttcttatgccaaggggcgcttggagttttcatggctgcccctccagactgcgagaaacaagtaaaaacccattggggcctcttgatgtctgggatggcacgtggcccgacctccacaagctccctcatgcttcctgtcccccgcttacacgacaacgggccagaccacgggaaggacggtgtttgtgtctgagggagctgctggccacagtgaacacccacgtttattcctgcctgctccggccaggactgaaccccttctccacacctgaacagttggctcaagggccaccagaagcatttctttattattattattttttaacctggacatgcattaaagggtctattagctttctttccgtctgtctcaacagctgagatggggccgccaaggagtgccttccttttgctccctcctagctgggagtgacgggtgggagtgtgtgtgcccaggtgggggtgtctcctggctgggaaggagggaaagggagggagagttttgcgggggttggcagtggagagcaggctggagaggagatggctaatagctgtttaatggaaacctgctgggctggagggagttaggctgaatttcccgacttcctctgccagttattgacacagctctctttgtaagagaggaaagaaactaaacccacccaagggatgatttcagggggagaggtggagggcagatgtcctgggcaaaccgggcccctctgcccacacacctcacttgatccttttgccaaacttgtcaaactcaggggaactggcttcccagttgcccctttgccatattccaagtccccctcagacttcatgtctctgctcatcagcactgtcccaggatcctggagagggagaacccctggccccaggggaaagaggggggggtctcccgtttcctgtgcctgcaccagccctgcccccattgcgtctgcacacccctgcgtgtaactgcattccaaccactaataaagtgcctattgtacaggtc

SEQ ID NO: 428015 - DNA, 3843 bp, Homo sapiens
gggagcagctgcagccccgcccgcgccctcccgggtcccttagtctgggcagctgcccagctcgggccggtctgaccggtttgggccgccccgcctggcgctgtgctgggaggagccgccgccagtcgcgcggtcagtgcctccctccagactcgggagggtcgagggggcgcgggagagagcgcgggcggccgccggggctggtcgcctgcagggatgggggacgagcggccccactactacgggaaacacggaacgccacagaagtatgatcccactttcaaaggacccatttacaataggggctgcacggatatcatatgctgtgtgttcctgctcctggccattgtgggctacgtggctgtaggcatcatagcctggactcatggagaccctcgaaaggtgatctaccccactgatagccggggcgagttctgcgggcagaagggcacaaaaaacgagaacaaaccctatctgttttatttcaacattgtgaaatgtgccagccccctggttctgctggaattccaatgtcccactccccagatctgcgtggaaaaatgccccgaccgctacctcacgtacctgaatgctcgcagctcccgggactttgagtactataagcagttctgtgttcctggcttcaagaacaataaaggagtggctgaggtgcttcgagatggtgactgccctgctgtcctcatccccagcaaacccttggcccggagatgcttccccgctatccacgcctacaagggtgtcctgatggtgggcaatgagacgacctatgaggatgggcatggctcccggaaaaacatcacagacctggtggagggcgccaagaaagccaatggagtcctagaggcgcggcaactcgccatgcgcatatttgaagattacaccgtctcttggtactggattatcataggcctggtcattgccatggcgatgagcctcctgttcatcatcctgcttcgcttcctggctggtattatggtctgggtgatgatcatcatggtgattctggtgctgggctacggaatatttcactgctacatggagtactcccgactgcgtggtgaggccggctctgatgtctctttggtggacctcggctttcagacggatttccgggtgtacctgcacttacggcagacctggttggcctttatgatcattctgagtatccttgaagtcattatcatcttgctgctcatctttctccggaagagaattctcatcgcgattgcactcatcaaagaagccagcagggctgtgggatacgtcatgtgctccttgctctacccactggtcaccttcttcttgctgtgcctctgcatcgcctactgggccagcactgctgtcttcctgtccacttccaacgaagcggtctataagatctttgatgacagcccctgcccatttactgcgaaaacctgcaacccagagaccttcccctcctccaatgagtcccgccaatgccccaatgcccgttgccagttcgccttctacggtggtgagtcgggctaccaccgggccctgctgggcctgcagatcttcaatgccttcatgttcttctggttggccaacttcgtgctggcgctgggccaggtcacgctggccggggcctttgcctcctactactgggccctgcgcaagccggacgacctgccggccttcccgctcttctctgcctttggccgggcgctcaggtaccacacaggctccctggcctttggcgcgctcatcctggccattgtgcagatcatccgtgtgatactcgagtacctggatcagcggctgaaagctgcagagaacaagtttgccaagtgcctcatgacctgtctcaaatgctgcttctggtgcctggagaagttcatcaaattccttaataggaatgcctacatcatgattgccatctacggcaccaatttctgcacctcggccaggaatgccttcttcctgctcatgagaaacatcatcagagtggctgtcctggataaagttactgacttcctcttcctgttgggcaaacttctgatcgttggtagtgtggggatcctggctttcttcttcttcacccaccgtatcaggatcgtgcaggatacagcaccacccctcaattattactgggttcctatactgacggtgatcgttggctcctacttgattgcacacggtttcttcagcgtctatggcatgtgtgtggacacgctgttcctctgcttcttggaggacctggagaggaatgacggctcggccgagaggccttacttcatgtcttccaccctcaagaaactcttgaacaagaccaacaagaaggcagcggagtcctgaaggccccgtgctccccacctctcaaggagtctcatgccgcagggtgctcagtagctgggtctgttcccccagccccttgggctcacctgaagtcctatcactgccgctctgcccctccccatgagccagatcccaccagtttctggacgtggagagtctggggcatctccttcttatgccaaggggcgcttggagttttcatggctgcccctccagactgcgagaaacaagtaaaaacccattggggcctcttgatgtctgggatggcacgtggcccgacctccacaagctccctcatgcttcctgtcccccgcttacacgacaacgggccagaccacgggaaggacggtgtttgtgtctgagggagctgctggccacagtgaacacccacgtttattcctgcctgctccggccaggactgaaccccttctccacacctgaacagttggctcaagggccaccagaagcatttctttattattattattttttaacctggacatgcattaaagggtctattagctttctttccgtctgtctcaacagctgagatggggccgccaaggagtgccttccttttgctccctcctagctgggagtgacgggtgggagtgtgtgtgcccaggtgggggtgtctcctggctgggaaggagggaaagggagggagagttttgcgggggttggcagtggagagcaggctggagaggagatggctaatagctgtttaatggaaacctgctgggctggagggagttaggctgaatttcccgacttcctctgccagttattgacacagctctctttgtaagagaggaaagaaactaaacccacccaagggatgatttcagggggagaggtggagggcagatgtcctgggcaaaccgggcccctctgcccacacacctcacttgatccttttgccaaacttgtcaaactcaggggaactggcttcccagttgcccctttgccatattccaagtccccctcagacttcatgtctctgctcatcagcactgtcccaggatcctggagagggagaacccctggccccaggggaaagaggggggggtctcccgtttcctgtgcctgcaccagccctgcccccattgcgtctgcacacccctgcgtgtaactgcattccaaccactaataaagtgcctattgtacaggtcaaaaaaaaacaaaacaaaaacgacaacaaaacaaacggggaacacgaaaagaagaactgccacagggggccaaagtagaagaacacagaaatagagtaagacgaggggccacacagcgcagcaatataaacagcgcacgacaagccacgcgcgaggacaaggcagacaaggtggaaaacagcaccacgcgccaccatggaagcgcacacccacaccgcggcgtagaaaacatcgcacacacaacaaagaacaacgaccaaggcgcaaaaagacacgcgacaacgccgacagcacgcaaacgccgcgcgaagacgcggacaagcagaaactacgg

SEQ ID NO: 428016 - DNA, 3435 bp, Homo sapiens
gggagcagctgcagccccgcccgcgccctcccgggtcccttagtctgggcagctgcccagctcgggccggtctgaccggtttgggccgccccgcctggcgctgtgctgggaggagccgccgccagtcgcgcggtcagtgcctccctccagactcgggagggtcgagggggcgcgggagagagcgcgggcggccgccggggctggtcgcctgcagggatgggggacgagcggccccactactacgggaaacacggaacgccacagaagtatgatcccactttcaaaggacccatttacaatagcctggactcatggagaccctcgaaaggtgatctaccccactgatagccggggcgagttctgcgggcagaagggcacaaaaaacgagaacaaaccctatctgttttatttcaacattgtgaaatgtgccagccccctggttctgctggaattccaatgtcccactccccagatctgcgtggaaaaatgccccgaccgctacctcacgtacctgaatgctcgcagctcccgggactttgagtactataagcagttctgtgttcctggcttcaagaacaataaaggagtggctgaggtgcttcgagatggtgactgccctgctgtcctcatccccagcaaacccttggcccggagatgcttccccgctatccacgcctacaagggtgtcctgatggtgggcaatgagacgacctatgaggatgggcatggctcccggaaaaacatcacagacctggtggagggcgccaagaaagccaatggagtcctagaggcgcggcaactcgccatgcgcatatttgaagattacaccgtctcttggtactggattatcataggcctggtcattgccatggcgatgagcctcctgttcatcatcctgcttcgcttcctggctggtattatggtctgggtgatgatcatcatggtgattctggtgctgggctacggaatatttcactgctacatggagtactcccgactgcgtggtgaggccggctctgatgtctctttggtggacctcggctttcagacggatttccgggtgtacctgcacttacggcagacctggttggcctttatgatcattctgagtatccttgaagtcattatcatcttgctgctcatctttctccggaagagaattctcatcgcgattgcactcatcaaagaagccagcagggctgtgggatacgtcatgtgctccttgctctacccactggtcaccttcttcttgctgtgcctctgcatcgcctactgggccagcactgctgtcttcctgtccacttccaacgaagcggtctataagatctttgatgacagcccctgcccatttactgcgaaaacctgcaacccagagaccttcccctcctccaatgagtcccgccaatgccccaatgcccgttgccagttcgccttctacggtggtgagtcgggctaccaccgggccctgctgggcctgcagatcttcaatgccttcatgttcttctggttggccaacttcgtgctggcgctgggccaggtcacgctggccggggcctttgcctcctactactgggccctgcgcaagccggacgacctgccggccttcccgctcttctctgcctttggccgggcgctcaggtaccacacaggctccctggcctttggcgcgctcatcctggccattgtgcagatcatccgtgtgatactcgagtacctggatcagcggctgaaagctgcagagaacaagtttgccaagtgcctcatgacctgtctcaaatgctgcttctggtgcctggagaagttcatcaaattccttaataggaatgcctacatcatgattgccatctacggcaccaatttctgcacctcggccaggaatgccttcttcctgctcatgagaaacatcatcagagtggctgtcctggataaagttactgacttcctcttcctgttgggcaaacttctgatcgttggtagtgtggggatcctggctttcttcttcttcacccaccgtatcaggatcgtgcaggatacagcaccacccctcaattattactgggttcctatactgacggtgatcgttggctcctacttgattgcacacggtttcttcagcgtctatggcatgtgtgtggacacgctgttcctctgcttcttggaggacctggagaggaatgacggctcggccgagaggccttacttcatgtcttccaccctcaagaaactcttgaacaagaccaacaagaaggcagcggagtcctgaaggccccgtgctccccacctctcaaggagtctcatgccgcagggtgctcagtagctgggtctgttcccccagccccttgggctcacctgaagtcctatcactgccgctctgcccctccccatgagccagatcccaccagtttctggacgtggagagtctggggcatctccttcttatgccaaggggcgcttggagttttcatggctgcccctccagactgcgagaaacaagtaaaaacccattggggcctcttgatgtctgggatggcacgtggcccgacctccacaagctccctcatgcttcctgtcccccgcttacacgacaacgggccagaccacgggaaggacggtgtttgtgtctgagggagctgctggccacagtgaacacccacgtttattcctgcctgctccggccaggactgaaccccttctccacacctgaacagttggctcaagggccaccagaagcatttctttattattattattttttaacctggacatgcattaaagggtctattagctttctttccgtctgtctcaacagctgagatggggccgccaaggagtgccttccttttgctccctcctagctgggagtgacgggtgggagtgtgtgtgcccaggtgggggtgtctcctggctgggaaggagggaaagggagggagagttttgcgggggttggcagtggagagcaggctggagaggagatggctaatagctgtttaatggaaacctgctgggctggagggagttaggctgaatttcccgacttcctctgccagttattgacacagctctctttgtaagagaggaaagaaactaaacccacccaagggatgatttcagggggagaggtggagggcagatgtcctgggcaaaccgggcccctctgcccacacacctcacttgatccttttgccaaacttgtcaaactcaggggaactggcttcccagttgcccctttgccatattccaagtccccctcagacttcatgtctctgctcatcagcactgtcccaggatcctggagagggagaacccctggccccaggggaaagaggggggggtctcccgtttcctgtgcctgcaccagccctgcccccattgcgtctgcacacccctgcgtgtaactgcattccaaccactaataaagtgcctattgtacaggtc

SEQ ID NO: 428017 - DNA, 3551 bp, Homo sapiens
cggggcggggcgtgcagcccgcggagcctcccgcccgcccgggctggggtcgcgctggctcggactccgctccccgccccgccgcggccatggaggacgagcggaaaaacggagcctacggaacgccacagaagtatgatcccactttcaaaggacccatttacaataggggctgcacggatatcatatgctgtgtgttcctgctcctggccattgtgggctacgtggctgtaggcatcatagcctggactcatggagaccctcgaaaggtgatctaccccactgatagccggggcgagttctgcgggcagaagggcacaaaaaacgagaacaaaccctatctgttttatttcaacattgtgaaatgtgccagccccctggttctgctggaattccaatgtcccactccccagatctgcgtggaaaaatgccccgaccgctacctcacgtacctgaatgctcgcagctcccgggactttgagtactataagcagttctgtgttcctggcttcaagaacaataaaggagtggctgaggtgcttcgagatggtgactgccctgctgtcctcatccccagcaaacccttggcccggagatgcttccccgctatccacgcctacaagggtgtcctgatggtgggcaatgagacgacctatgaggatgggcatggctcccggaaaaacatcacagacctggtggagggcgccaagaaagccaatggagtcctagaggcgcggcaactcgccatgcgcatatttgaagattacaccgtctcttggtactggattatcataggcctggtcattgccatggcgatgagcctcctgttcatcatcctgcttcgcttcctggctggtattatggtctgggtgatgatcatcatggtgattctggtgctgggctacggaatatttcactgctacatggagtactcccgactgcgtggtgaggccggctctgatgtctctttggtggacctcggctttcagacggatttccgggtgtacctgcacttacggcagacctggttggcctttatgatcattctgagtatccttgaagtcattatcatcttgctgctcatctttctccggaagagaattctcatcgcgattgcactcatcaaagaagccagcagggctgtgggatacgtcatgtgctccttgctctacccactggtcaccttcttcttgctgtgcctctgcatcgcctactgggccagcactgctgtgtatctgcccccagacactgatctctgaccccagggatggctaaagaccaactttgcctagaagtgacctgcagcttagggatagggctggaaactggtgggagaatggattctttcccacaaaagtccctggggtcctcagtcctagacctctgcttccttaacgaacctccagcttcctgtccacttccaacgaagcggtctataagatctttgatgacagcccctgcccatttactgcgaaaacctgcaacccagagaccttcccctcctccaatgagtcccgccaatgccccaatgcccgttgccagttcgccttctacggtggtgagtcgggctaccaccgggccctgctgggcctgcagatcttcaatgccttcatgttcttctggttggccaacttcgtgctggcgctgggccaggtcacgctggccggggcctttgcctcctactactgggccctgcgcaagccggacgacctgccggccttcccgctcttctctgcctttggccgggcgctcaggtaccacacaggctccctggcctttggcgcgctcatcctggccattgtgcagatcatccgtgtgatactcgagtacctggatcagcggctgaaagctgcagagaacaagtttgccaagtgcctcatgacctgtctcaaatgctgcttctggtgcctggagaagttcatcaaattccttaataggaatgcctacatcatgattgccatctacggcaccaatttctgcacctcggccaggaatgccttcttcctgctcatgagaaacatcatcagagtggctgtcctggataaagttactgacttcctcttcctgttgggcaaacttctgatcgttggtagtgtggggatcctggctttcttcttcttcacccaccgtatcaggatcgtgcaggatacagcaccacccctcaattattactgggttcctatactgacggtgatcgttggctcctacttgattgcacacggtttcttcagcgtctatggcatgtgtgtggacacgctgttcctctgcttcttggaggacctggagaggaatgacggctcggccgagaggccttacttcatgtcttccaccctcaagaaactcttgaacaagaccaacaagaaggcagcggagtcctgaaggccccgtgctccccacctctcaaggagtctcatgccgcagggtgctcagtagctgggtctgttcccccagccccttgggctcacctgaagtcctatcactgccgctctgcccctccccatgagccagatcccaccagtttctggacgtggagagtctggggcatctccttcttatgccaaggggcgcttggagttttcatggctgcccctccagactgcgagaaacaagtaaaaacccattggggcctcttgatgtctgggatggcacgtggcccgacctccacaagctccctcatgcttcctgtcccccgcttacacgacaacgggccagaccacgggaaggacggtgtttgtgtctgagggagctgctggccacagtgaacacccacgtttattcctgcctgctccggccaggactgaaccccttctccacacctgaacagttggctcaagggccaccagaagcatttctttattattattattttttaacctggacatgcattaaagggtctattagctttctttccgtctgtctcaacagctgagatggggccgccaaggagtgccttccttttgctccctcctagctgggagtgacgggtgggagtgtgtgtgcccaggtgggggtgtctcctggctgggaaggagggaaagggagggagagttttgcgggggttggcagtggagagcaggctggagaggagatggctaatagctgtttaatggaaacctgctgggctggagggagttaggctgaatttcccgacttcctctgccagttattgacacagctctctttgtaagagaggaaagaaactaaacccacccaagggatgatttcagggggagaggtggagggcagatgtcctgggcaaaccgggcccctctgcccacacacctcacttgatccttttgccaaacttgtcaaactcaggggaactggcttcccagttgcccctttgccatattccaagtccccctcagacttcatgtctctgctcatcagcactgtcccaggatcctggagagggagaacccctggccccaggggaaagaggggggggtctcccgtttcctgtgcctgcaccagccctgcccccattgcgtctgcacacccctgcgtgtaactgcattccaaccactaataaagtgcctattgtacaggtc

SEQ ID NO: 428018 - DNA, 3332 bp, Homo sapiens
cggggcggggcgtgcagcccgcggagcctcccgcccgcccgggctggggtcgcgctggctcggactccgctccccgccccgccgcggccatggaggacgagcggaaaaacggagcctacggaacgccacagaagtatgatcccactttcaaaggacccatttacaataggggctgcacggatatcatatgctgtgtgttcctgctcctggccattgtgggctacgtggctgtaggcatcatagcctggactcatggagaccctcgaaaggtgatctaccccactgatagccggggcgagttctgcgggcagaagggcacaaaaaacgagaacaaaccctatctgttttatttcaacattgtgaaatgtgccagccccctggttctgctggaattccaatgtcccactccccagatctgcgtggaaaaatgccccgaccgctacctcacgtacctgaatgctcgcagctcccgggactttgagtactataagcagttctgtgttcctggcttcaagaacaataaaggagtggctgaggtgcttcgagatggtgactgccctgctgtcctcatccccagcaaacccttggcccggagatgcttccccgctatccacgcctacaagggtgtcctgatggtgggcaatgagacgacctatgaggatgggcatggctcccggaaaaacatcacagacctggtggagggcgccaagaaagccaatggagtcctagaggcgcggcaactcgccatgcgcatatttgaagattacaccgtctcttggtactggattatcataggcctggtcattgccatggcgatgagcctcctgttcatcatcctgcttcgcttcctggctggtattatggtctgggtgatgatcatcatggtgattctggtgctgggctacggaatatttcactgctacatggagtactcccgactgcgtggtgaggccggctctgatgtctctttggtggacctcggctttcagacggatttccgggtgtacctgcacttacggcagacctggttggcctttatgatcattctgagtatccttgaagtcattatcatcttgctgctcatctttctccggaagagaattctcatcgcgattgcactcatcaaagaagccagcagggctgtgggatacgtcatgtgctccttgctctacccactggtcaccttcttcttgctgtgcctctgcatcgcctactgggccagcactgctgtcttcctgtccacttccaacgaagcggtctataagatctttgatgacagcccctgcccatttactgcgaaaacctgcaacccagagaccttcccctcctccaatgagtcccgccaatgccccaatgcccgttgccagttcgccttctacggtggtgagtcgggctaccaccgggccctgctgggcctgcagatcttcaatgccttcatgttcttctggttggccaacttcgtgctggcgctgggccaggtcacgctggccggggcctttgcctcctactactgggccctgcgcaagccggacgacctgccggccttcccgctcttctctgcctttggccgggcgctcaggtaccacacaggctccctggcctttggcgcgctcatcctggccattgtgcagatcatccgtgtgatactcgagtacctggatcagcggctgaaagctgcagagaacaagtttgccaagtgcctcatgacctgtctcaaatgctgcttctggtgcctggagaagttcatcaaattccttaataggaatgcctacatcatgcttcttcctgctcatgagaaacatcatcagagtggctgtcctggataaagttactgacttcctcttcctgttgggcaaacttctgatcgttggtagtgtggggatcctggctttcttcttcttcacccaccgtatcaggatcgtgcaggatacagcaccacccctcaattattactgggttcctatactgacggtgatcgttggctcctacttgattgcacacggtttcttcagcgtctatggcatgtgtgtggacacgctgttcctctgcttcttggaggacctggagaggaatgacggctcggccgagaggccttacttcatgtcttccaccctcaagaaactcttgaacaagaccaacaagaaggcagcggagtcctgaaggccccgtgctccccacctctcaaggagtctcatgccgcagggtgctcagtagctgggtctgttcccccagccccttgggctcacctgaagtcctatcactgccgctctgcccctccccatgagccagatcccaccagtttctggacgtggagagtctggggcatctccttcttatgccaaggggcgcttggagttttcatggctgcccctccagactgcgagaaacaagtaaaaacccattggggcctcttgatgtctgggatggcacgtggcccgacctccacaagctccctcatgcttcctgtcccccgcttacacgacaacgggccagaccacgggaaggacggtgtttgtgtctgagggagctgctggccacagtgaacacccacgtttattcctgcctgctccggccaggactgaaccccttctccacacctgaacagttggctcaagggccaccagaagcatttctttattattattattttttaacctggacatgcattaaagggtctattagctttctttccgtctgtctcaacagctgagatggggccgccaaggagtgccttccttttgctccctcctagctgggagtgacgggtgggagtgtgtgtgcccaggtgggggtgtctcctggctgggaaggagggaaagggagggagagttttgcgggggttggcagtggagagcaggctggagaggagatggctaatagctgtttaatggaaacctgctgggctggagggagttaggctgaatttcccgacttcctctgccagttattgacacagctctctttgtaagagaggaaagaaactaaacccacccaagggatgatttcagggggagaggtggagggcagatgtcctgggcaaaccgggcccctctgcccacacacctcacttgatccttttgccaaacttgtcaaactcaggggaactggcttcccagttgcccctttgccatattccaagtccccctcagacttcatgtctctgctcatcagcactgtcccaggatcctggagagggagaacccctggccccaggggaaagaggggggggtctcccgtttcctgtgcctgcaccagccctgcccccattgcgtctgcacacccctgcgtgtaactgcattccaaccactaataaagtgcctattgtacaggtc

SEQ ID NO: 428019 - DNA, 2610 bp, Homo sapiens
ccttcatacttctgactacatacttccgcatggtgattctggtgctgggctacggaatatttcactgctacatggagtactcccgactgcgtggtgaggccggctctgatgtctctttggtggacctcggctttcagacggatttccgggtgtacctgcacttacggcagacctggttggcctttagtgagtcacagtctcccattcctgcccccacatgaggccttggagggagtggggagcccagccggctcagcctttgccctttgcagtgatcattctgagtatccttgaagtcattatcatcttgctgctcatctttctccggaagagaattctcatcgcgattgcactcatcaaagaagccagcagggctgtgggatacgtcatgtgctccttgctctacccactggtcaccttcttcttgctgtgcctctgcatcgcctactgggccagcactgctgtcttcctgtccacttccaacgaagcggtctataagatctttgatgacagcccctgcccatttactgcgaaaacctgcaacccagagaccttcccctcctccaatgagtcccgccaatgccccaatgcccgttgccagttcgccttctacggtggtgagtcgggctaccaccgggccctgctgggcctgcagatcttcaatgccttcatgttcttctggttggccaacttcgtgctggcgctgggccaggtcacgctggccggggcctttgcctcctactactgggccctgcgcaagccggacgacctgccggccttcccgctcttctctgcctttggccgggcgctcaggtaccacacaggctccctggcctttggcgcgctcatcctggccattgtgcagatcatccgtgtgatactcgagtacctggatcagcggctgaaagctgcagagaacaagtttgccaagtgcctcatgacctgtctcaaatgctgcttctggtgcctggagaagttcatcaaattccttaataggaatgcctacatcatgattgccatctacggcaccaatttctgcacctcggccaggaatgccttcttcctgctcatgagaaacatcatcagagtggctgtcctggataaagttactgacttcctcttcctgttgggcaaacttctgatcgttggtagtgtggggatcctggctttcttcttcttcacccaccgtatcaggatcgtgcaggatacagcaccacccctcaattattactgggttcctatactgacggtgatcgttggctcctacttgattgcacacggtttcttcagcgtctatggcatgtgtgtggacacgctgttcctctgcttcttggaggacctggagaggaatgacggctcggccgagaggccttacttcatgtcttccaccctcaagaaactcttgaacaagaccaacaagaaggcagcggagtcctgaaggccccgtgctccccacctctcaaggagtctcatgccgcagggtgctcagtagctgggtctgttcccccagccccttgggctcacctgaagtcctatcactgccgctctgcccctccccatgagccagatcccaccagtttctggacgtggagagtctggggcatctccttcttatgccaaggggcgcttggagttttcatggctgcccctccagactgcgagaaacaagtaaaaacccattggggcctcttgatgtctgggatggcacgtggcccgacctccacaagctccctcatgcttcctgtcccccgcttacacgacaacgggccagaccacgggaaggacggtgtttgtgtctgagggagctgctggccacagtgaacacccacgtttattcctgcctgctccggccaggactgaaccccttctccacacctgaacagttggctcaagggccaccagaagcatttctttattattattattttttaacctggacatgcattaaagggtctattagctttctttccgtctgtctcaacagctgagatggggccgccaaggagtgccttccttttgctccctcctagctgggagtgacgggtgggagtgtgtgtgcccaggtgggggtgtctcctggctgggaaggagggaaagggagggagagttttgcgggggttggcagtggagagcaggctggagaggagatggctaatagctgtttaatggaaacctgctgggctggagggagttaggctgaatttcccgacttcctctgccagttattgacacagctctctttgtaagagaggaaagaaactaaacccacccaagggatgatttcagggggagaggtggagggcagatgtcctgggcaaaccgggcccctctgcccacacacctcacttgatccttttgccaaacttgtcaaactcaggggaactggcttcccagttgcccctttgccatattccaagtccccctcagacttcatgtctctgctcatcagcactgtcccaggatcctggagagggagaacccctggccccaggggaaagaggggggggtctcccgtttcctgtgcctgcaccagccctgcccccattgcgtctgcacacccctgcgtgtaactgcattccaaccactaataaagtgcctattgtacaggtc

SEQ ID NO: 428020 - DNA, 1956 bp, Homo sapiens
agtcctgcgatggaggagcaaaccagagaacctactgggtggaattcttgctgttgaggggacaggcccaagaggcctggcccaccattggttattaccagagtgaattggagtggtatatatttgcgctgaagagagcaggaataagactggtttattagccgggcgccgtgactcacgcctgtaatcccagcactttgggaggctgaggcgagcggatcacctgagcgtggactcaggagacctggacattgctgcagagaacaagtttgccaagtgcctcatgacctgtctcaaatgctgcttctggtgcctggagaagttcatcaaattccttaataggaatgcctacatcatgattgccatctacggcaccaatttctgcacctcggccaggaatgccttcttcctgctcatgagaaacatcatcagagtggctgtcctggataaagttactgacttcctcttcctgttgggcaaacttctgatcgttggtagtgtggggatcctggctttcttcttcttcacccaccgtatcaggatcgtgcaggatacagcaccacccctcaattattactgggttcctatactgacggtgatcgttggctcctacttgattgcacacggtttcttcagcgtctatggcatgtgtgtggacacgctgttcctctgcttcttggaggacctggagaggaatgacggctcggccgagaggccttacttcatgtcttccaccctcaagaaactcttgaacaagaccaacaagaaggcagcggagtcctgaaggccccgtgctccccacctctcaaggagtctcatgccgcagggtgctcagtagctgggtctgttcccccagccccttgggctcacctgaagtcctatcactgccgctctgcccctccccatgagccagatcccaccagtttctggacgtggagagtctggggcatctccttcttatgccaaggggcgcttggagttttcatggctgcccctccagactgcgagaaacaagtaaaaacccattggggcctcttgatgtctgggatggcacgtggcccgacctccacaagctccctcatgcttcctgtcccccgcttacacgacaacgggccagaccacgggaaggacggtgtttgtgtctgagggagctgctggccacagtgaacacccacgtttattcctgcctgctccggccaggactgaaccccttctccacacctgaacagttggctcaagggccaccagaagcatttctttattattattattttttaacctggacatgcattaaagggtctattagctttctttccgtctgtctcaacagctgagatggggccgccaaggagtgccttccttttgctccctcctagctgggagtgacgggtgggagtgtgtgtgcccaggtgggggtgtctcctggctgggaaggagggaaagggagggagagttttgcgggggttggcagtggagagcaggctggagaggagatggctaatagctgtttaatggaaacctgctgggctggagggagttaggctgaatttcccgacttcctctgccagttattgacacagctctctttgtaagagaggaaagaaactaaacccacccaagggatgatttcagggggagaggtggagggcagatgtcctgggcaaaccgggcccctctgcccacacacctcacttgatccttttgccaaacttgtcaaactcaggggaactggcttcccagttgcccctttgccatattccaagtccccctcagacttcatgtctctgctcatcagcactgtcccaggatcctggagagggagaacccctggccccaggggaaagaggggggggtctcccgtttcctgtgcctgcaccagccctgcccccattgcgtctgcacacccctgcgtgtaactgcattccaaccactaataaagtgcctattgtacaggtc

SEQ ID NO: 428021 - DNA, 1615 bp, Homo sapiens
ctcccactctcctccagattgccatctacggcaccaatttctgcacctcggccaggaatgccttcttcctgctcatgagaaacatcatcagagtggctgtcctggataaagttactgacttcctcttcctgttgggcaaacttctgatcgttggtagtgtggggatcctggctttcttcttcttcacccaccgtatcaggatcgtgcaggatacagcaccacccctcaattattactgggttcctatactgacggtgatcgttggctcctacttgattgcacacggtttcttcagcgtctatggcatgtgtgtggacacgctgttcctctgcttcttggaggacctggagaggaatgacggctcggccgagaggccttacttcatgtcttccaccctcaagaaactcttgaacaagaccaacaagaaggcagcggagtcctgaaggccccgtgctccccacctctcaaggagtctcatgccgcagggtgctcagtagctgggtctgttcccccagccccttgggctcacctgaagtcctatcactgccgctctgcccctccccatgagccagatcccaccagtttctggacgtggagagtctggggcatctccttcttatgccaaggggcgcttggagttttcatggctgcccctccagactgcgagaaacaagtaaaaacccattggggcctcttgatgtctgggatggcacgtggcccgacctccacaagctccctcatgcttcctgtcccccgcttacacgacaacgggccagaccacgggaaggacggtgtttgtgtctgagggagctgctggccacagtgaacacccacgtttattcctgcctgctccggccaggactgaaccccttctccacacctgaacagttggctcaagggccaccagaagcatttctttattattattattttttaacctggacatgcattaaagggtctattagctttctttccgtctgtctcaacagctgagatggggccgccaaggagtgccttccttttgctccctcctagctgggagtgacgggtgggagtgtgtgtgcccaggtgggggtgtctcctggctgggaaggagggaaagggagggagagttttgcgggggttggcagtggagagcaggctggagaggagatggctaatagctgtttaatggaaacctgctgggctggagggagttaggctgaatttcccgacttcctctgccagttattgacacagctctctttgtaagagaggaaagaaactaaacccacccaagggatgatttcagggggagaggtggagggcagatgtcctgggcaaaccgggcccctctgcccacacacctcacttgatccttttgccaaacttgtcaaactcaggggaactggcttcccagttgcccctttgccatattccaagtccccctcagacttcatgtctctgctcatcagcactgtcccaggatcctggagagggagaacccctggccccaggggaaagaggggggggtctcccgtttcctgtgcctgcaccagccctgcccccattgcgtctgcacacccctgcgtgtaactgcattccaaccactaataaagtgcctattgtacaggtc

SEQ ID NO: 428022 - DNA, 1552 bp, Homo sapiens
tcacacctgcccctcgtgtcctcatcagagtggctgtcctggataaagttactgacttcctcttcctgttgggcaaacttctgatcgttggtagtgtggggatcctggctttcttcttcttcacccaccgtatcaggatcgtgcaggatacagcaccacccctcaattattactgggttcctatactgacggtgatcgttggctcctacttgattgcacacggtttcttcagcgtctatggcatgtgtgtggacacgctgttcctctgcttcttggaggacctggagaggaatgacggctcggccgagaggccttacttcatgtcttccaccctcaagaaactcttgaacaagaccaacaagaaggcagcggagtcctgaaggccccgtgctccccacctctcaaggagtctcatgccgcagggtgctcagtagctgggtctgttcccccagccccttgggctcacctgaagtcctatcactgccgctctgcccctccccatgagccagatcccaccagtttctggacgtggagagtctggggcatctccttcttatgccaaggggcgcttggagttttcatggctgcccctccagactgcgagaaacaagtaaaaacccattggggcctcttgatgtctgggatggcacgtggcccgacctccacaagctccctcatgcttcctgtcccccgcttacacgacaacgggccagaccacgggaaggacggtgtttgtgtctgagggagctgctggccacagtgaacacccacgtttattcctgcctgctccggccaggactgaaccccttctccacacctgaacagttggctcaagggccaccagaagcatttctttattattattattttttaacctggacatgcattaaagggtctattagctttctttccgtctgtctcaacagctgagatggggccgccaaggagtgccttccttttgctccctcctagctgggagtgacgggtgggagtgtgtgtgcccaggtgggggtgtctcctggctgggaaggagggaaagggagggagagttttgcgggggttggcagtggagagcaggctggagaggagatggctaatagctgtttaatggaaacctgctgggctggagggagttaggctgaatttcccgacttcctctgccagttattgacacagctctctttgtaagagaggaaagaaactaaacccacccaagggatgatttcagggggagaggtggagggcagatgtcctgggcaaaccgggcccctctgcccacacacctcacttgatccttttgccaaacttgtcaaactcaggggaactggcttcccagttgcccctttgccatattccaagtccccctcagacttcatgtctctgctcatcagcactgtcccaggatcctggagagggagaacccctggccccaggggaaagaggggggggtctcccgtttcctgtgcctgcaccagccctgcccccattgcgtctgcacacccctgcgtgtaactgcattccaaccactaataaagtgcctattgtacaggtc

SEQ ID NO: 428023 - DNA, 1419 bp, Homo sapiens
tcggatagtcctgaatcttggccatacctttatcctgacttgtaaacctatgctgacggtgatcgttggctcctacttgattgcacacggtttcttcagcgtctatggcatgtgtgtggacacgctgttcctctgcttcttggaggacctggagaggaatgacggctcggccgagaggccttacttcatgtcttccaccctcaagaaactcttgaacaagaccaacaagaaggcagcggagtcctgaaggccccgtgctccccacctctcaaggagtctcatgccgcagggtgctcagtagctgggtctgttcccccagccccttgggctcacctgaagtcctatcactgccgctctgcccctccccatgagccagatcccaccagtttctggacgtggagagtctggggcatctccttcttatgccaaggggcgcttggagttttcatggctgcccctccagactgcgagaaacaagtaaaaacccattggggcctcttgatgtctgggatggcacgtggcccgacctccacaagctccctcatgcttcctgtcccccgcttacacgacaacgggccagaccacgggaaggacggtgtttgtgtctgagggagctgctggccacagtgaacacccacgtttattcctgcctgctccggccaggactgaaccccttctccacacctgaacagttggctcaagggccaccagaagcatttctttattattattattttttaacctggacatgcattaaagggtctattagctttctttccgtctgtctcaacagctgagatggggccgccaaggagtgccttccttttgctccctcctagctgggagtgacgggtgggagtgtgtgtgcccaggtgggggtgtctcctggctgggaaggagggaaagggagggagagttttgcgggggttggcagtggagagcaggctggagaggagatggctaatagctgtttaatggaaacctgctgggctggagggagttaggctgaatttcccgacttcctctgccagttattgacacagctctctttgtaagagaggaaagaaactaaacccacccaagggatgatttcagggggagaggtggagggcagatgtcctgggcaaaccgggcccctctgcccacacacctcacttgatccttttgccaaacttgtcaaactcaggggaactggcttcccagttgcccctttgccatattccaagtccccctcagacttcatgtctctgctcatcagcactgtcccaggatcctggagagggagaacccctggccccaggggaaagaggggggggtctcccgtttcctgtgcctgcaccagccctgcccccattgcgtctgcacacccctgcgtgtaactgcattccaaccactaataaagtgcctattgtacaggtc

SEQ ID NO: 428024 - DNA, 1395 bp, Homo sapiens
gagcagggacagctcgtttctccttgcccagacggtgatcgttggctcctacttgattgcacacggtttcttcagcgtctatggcatgtgtgtggacacgctgttcctctgcttcttggaggacctggagaggaatgacggctcggccgagaggccttacttcatgtcttccaccctcaagaaactcttgaacaagaccaacaagaaggcagcggagtcctgaaggccccgtgctccccacctctcaaggagtctcatgccgcagggtgctcagtagctgggtctgttcccccagccccttgggctcacctgaagtcctatcactgccgctctgcccctccccatgagccagatcccaccagtttctggacgtggagagtctggggcatctccttcttatgccaaggggcgcttggagttttcatggctgcccctccagactgcgagaaacaagtaaaaacccattggggcctcttgatgtctgggatggcacgtggcccgacctccacaagctccctcatgcttcctgtcccccgcttacacgacaacgggccagaccacgggaaggacggtgtttgtgtctgagggagctgctggccacagtgaacacccacgtttattcctgcctgctccggccaggactgaaccccttctccacacctgaacagttggctcaagggccaccagaagcatttctttattattattattttttaacctggacatgcattaaagggtctattagctttctttccgtctgtctcaacagctgagatggggccgccaaggagtgccttccttttgctccctcctagctgggagtgacgggtgggagtgtgtgtgcccaggtgggggtgtctcctggctgggaaggagggaaagggagggagagttttgcgggggttggcagtggagagcaggctggagaggagatggctaatagctgtttaatggaaacctgctgggctggagggagttaggctgaatttcccgacttcctctgccagttattgacacagctctctttgtaagagaggaaagaaactaaacccacccaagggatgatttcagggggagaggtggagggcagatgtcctgggcaaaccgggcccctctgcccacacacctcacttgatccttttgccaaacttgtcaaactcaggggaactggcttcccagttgcccctttgccatattccaagtccccctcagacttcatgtctctgctcatcagcactgtcccaggatcctggagagggagaacccctggccccaggggaaagaggggggggtctcccgtttcctgtgcctgcaccagccctgcccccattgcgtctgcacacccctgcgtgtaactgcattccaaccactaataaagtgcctattgtacaggtc

SEQ ID NO: 428025 - DNA, 2854 bp, Homo sapiens
cggggcggggcgtgcagcccgcggagcctcccgcccgcccgggctggggtcgcgctggctcggactccgctccccgccccgccgcggccatggaggacgagcggaaaaacggagcctacggaacgccacagaagtatgatcccactttcaaaggacccatttacaataggggctgcacggatatcatatgctgtgtgttcctgctcctggccattgtgggctacgtggctgtaggcatcatagcctggactcatggagaccctcgaaaggtgatctaccccactgatagccggggcgagttctgcgggcagaagggcacaaaaaacgagaacaaaccctatctgttttatttcaacattgtgaaatgtgccagccccctggttctgctggaattccaatgtcccactccccagatctgcgtggaaaaatgccccgaccgctacctcacgtacctgaatgctcgcagctcccgggactttgagtactataagcagttctgtgttcctggcttcaagaacaataaaggagtggctgaggtgcttcgagatggtgactgccctgctgtcctcatccccagcaaacccttggcccggagatgcttccccgctatccacgcctacaagggtgtcctgatggtgggcaatgagacgacctatgaggatgggcatggctcccggaaaaacatcacagacctggtggagggcgccaagaaagccaatggagtcctagaggcgcggcaactcgccatgcgcatatttgaagattacaccgtctcttggtactggattatcataggcctggtcattgccatggcgatgagcctcctgttcatcatcctgcttcgcttcctggctggtattatggtctgggtgatgatcatcatggtgattctggtgctgggctacggaatatttcactgctacatggagtactcccgactgcgtggtgaggccggctctgatgtctctttggtggacctcggctttcagacggatttccgggtgtacctgcacttacggcagacctggttggcctttatgatcattctgagtatccttgaagtcattatcatcttgctgctcatctttctccggaagagaattctcatcgcgattgcactcatcaaagaagccagcagggctgtgggatacgtcatgtgctccttgctctacccactggtcaccttcttcttgctgtgcctctgcatcgcctactgggccagcactgctgtcttcctgtccacttccaacgaagcggtctataagatctttgatgacagcccctgcccatttactgcgaaaacctgcaacccagagaccttcccctcctccaatgagtcccgccaatgccccaatgcccgttgccagttcgccttctacggtggtgagtcgggctaccaccgggccctgctgggcctgcagatcttcaatgccttcatgttcttctggttggccaacttcgtgctggcgctgggccaggtcacgctggccggggcctttgcctcctactactgggccctgcgcaagccggacgacctgccggccttcccgctcttctctgcctttggccgggcgctcaggtaccacacaggctccctggcctttggcgcgctcatcctggccattgtgcagatcatccgtgtgatactcgagtacctggatcagcggctgaaagctgcagagaacaagtttgccaagtgcctcatgacctgtctcaaatgctgcttctggtgcctggagaagttcatcaaattccttaataggaatgcctacatcatgattgccatctacggcaccaatttctgcacctcggccaggaatgccttcttcctgctcatgagaaacatcatcagagtggctgtcctggataaagttactgacttcctcttcctgttgggcaaacttctgatcgttggtagtgtggggatcctggctttcttcttcttcacccaccgtatcaggatcgtgcaggatacagcaccacccctcaattattactgggttcctatactgacggtgatcgttggctcctacttgattgcacacggtttcttcagcgtctatggcatgtgtgtggacacgctgttcctctgcttctgtgaggacctggaaaggaatgacggctctcaggagcgaccctacttcatgtcgcccgagctgagagacatcctgttgaaggggagtgcggaggaggggaagcgggcagaagccgaggagtagagatggaggacctggagaggaatgacggctcggccgagaggccttacttcatgtcttccaccctcaagaaactcttgaacaagaccaacaagaaggcagcggagtcctgaaggccccgtgctccccacctctcaaggagtctcatgccgcagggtgctcagtagctgggtctgttcccccagccccttgggctcacctgaagtcctatcactgccgctctgcccctccccatgagccagatcccaccagtttctggacgtggagagtctggggcatctccttcttatgccaaggggcgcttggagttttcatggctgcccctccagactgcgagaaacaagtaaaaacccattggggcctcttgatgtctgggatggcacgtggcccgacctccacaagctccctcatgcttcctgtcccccgcttacacgacaacgggccagaccacgggaaggacggtgtttgtgtctgagggagctgctggccacagtgaacacccacgtttattcctgcctgctccggccaggactgaaccccttctccacacctgaacagttggctcaagggccaccagaagcatttctttattattattattttttaacctggacatgcattaaagggtctattagctt

SEQ ID NO: 428026 - DNA, 2494 bp, Homo sapiens
cggggcggggcgtgcagcccgcggagcctcccgcccgcccgggctggggtcgcgctggctcggactccgctccccgccccgccgcggccatggaggacgagcggaaaaacggagcctacggaacgccacagaagtatgatcccactttcaaaggacccatttacaataggggctgcacggatatcatatgctgtgtgttcctgctcctggccattgtgggctacgtggctgtaggcatcatagcctggactcatggagaccctcgaaaggtgatctaccccactgatagccggggcgagttctgcgggcagaagggcacaaaaaacgagaacaaaccctatctgttttatttcaacattgtgaaatgtgccagccccctggttctgctggaattccaatgtcccactccccagatctgcgtggaaaaatgccccgaccgctacctcacgtacctgaatgctcgcagctcccgggactttgagtactataagcagttctgtgttcctggcttcaagaacaataaaggagtggctgaggtgcttcgagatggtgactgccctgctgtcctcatccccagcaaacccttggcccggagatgcttccccgctatccacgcctacaagggtgtcctgatggtgggcaatgagacgacctatgaggatgggcatggctcccggaaaaacatcacagacctggtggagggcgccaagaaagccaatggagtcctagaggcgcggcaactcgccatgcgcatatttgaagattacaccgtctcttggtactggattatcataggcctggtcattgccatggcgatgagcctcctgttcatcatcctgcttcgcttcctggctggtattatggtctgggtgatgatcatcatggtgattctggtgctgggctacggaatatttcactgctacatggagtactcccgactgcgtggtgaggccggctctgatgtctctttggtggacctcggctttcagacggatttccgggtgtacctgcacttacggcagacctggttggcctttatgatcattctgagtatccttgaagtcattatcatcttgctgctcatctttctccggaagagaattctcatcgcgattgcactcatcaaagaagccagcagggctgtgggatacgtcatgtgctccttgctctacccactggtcaccttcttcttgctgtgcctctgcatcgcctactgggccagcactgctgtcttcctgtccacttccaacgaagcggtctataagatctttgatgacagcccctgcccatttactgcgaaaacctgcaacccagagaccttcccctcctccaatgagtcccgccaatgccccaatgcccgttgccagttcgccttctacggtggtgagtcgggctaccaccgggccctgctgggcctgcagatcttcaatgccttcatgttcttctggttggccaacttcgtgctggcgctgggccaggtcacgctggccggggcctttgcctcctactactgggccctgcgcaagccggacgacctgccggccttcccgctcttctctgcctttggccgggcgctcaggtaccacacaggctccctggcctttggcgcgctcatcctggccattgtgcagatcatccgtgtgatactcgagtacctggatcagcggctgaaagctgcagagaacaagtttgccaagtgcctcatgacctgtctcaaatgctgcttctggtgcctggagaagttcatcaaattccttaataggaatgcctacatcatgattgccatctacggcaccaatttctgcacctcggccaggaatgccttcttcctgctcatgagaaacatcatcagagtggctgtcctggataaagttactgacttcctcttcctgttgggcaaacttctgatcgttggtagtgtggggatcctggctttcttcttcttcacccaccgtatcaggatcgtgcaggatacagcaccacccctcaattattactgggttcctatactggtatggacctctggggagagatgggggtttgggaagaaagaggtgttgggatttgcttggtcttctttgactagataaatgtggatagaggtcagaggtggggaattgattatttattcagaccaccaactttttgtttgtttttgaatccagagtcttgccctgtcgccctgactggagtgccgtggtgccatcttgactcactgccacctctgccttccgggttccagcgaattctcgagctcttgcctcccgagtagttgggattacaggtgcctgcccccacacctgcctaatttttgtatatttatttttttaattttaatttaattttttttttgagacagactcactctgttgcccaggttggagtgcagtgaaatgatcttggcttactgaaaccttcacctctctagttcagcgattcttgtgcctcgccccctgtgtagctgggatactgccgggcacctgccaccacacct

SEQ ID NO: 428027 - DNA, 1610 bp, Homo sapiens
cggggcggggcgtgcagcccgcggagcctcccgcccgcccgggctggggtcgcgctggctcggactccgctccccgccccgccgcggccatggaggacgagcggaaaaacggagcctacggaacgccacagaagtatgatcccactttcaaaggacccatttacaataggggctgcacggatatcatatgctgtgtgttcctgctcctggccattgtgggctacgtggctgtaggcatcatagcctggactcatggagaccctcgaaaggtgatctaccccactgatagccggggcgagttctgcgggcagaagggcacaaaaaacgagaacaaaccctatctgttttatttcaacattgtgaaatgtgccagccccctggttctgctggaattccaatgtcccactccccagatctgcgtggaaaaatgccccgaccgctacctcacgtacctgaatgctcgcagctcccgggactttgagtactataagcagttctgtgttcctggcttcaagaacaataaaggagtggctgaggtgcttcgagatggtgactgccctgctgtcctcatccccagcaaacccttggcccggagatgcttccccgctatccacgcctacaagggtgtcctgatggtgggcaatgagacgacctatgaggatgggcatggctcccggaaaaacatcacagacctggtggagggcgccaagaaagccaatggagtcctagaggcgcggcaactcgccatgcgcatatttgaagattacaccgtctcttggtactggattatcataggcctggtcattgccatggcgatgagcctcctgttcatcatcctgcttcgcttcctggctggtattatggtctgggtgatgatcatcatggtgattctggtgctgggctacggaatatttcactgctacatggagtactcccgactgcgtggtgaggccggctctgatgtctctttggtggacctcggctttcagacggatttccgggtgtacctgcacttacggcagacctggttggcctttatgatcattctgagtatccttgaagtcattatcatcttgctgctcatctttctccggaagagaattctcatcgcgattgcactcatcaaagaagccagcagggctgtgggatacgtcatgtgctccttgctctacccactggtcaccttcttcttgctgtgcctctgcatcgcctactgggccagcactgctgtcttcctgtccacttccaacgaagcggtctataagatctttgatgacagcccctgcccatttactgcgaaaacctgcaacccagagaccttcccctcctccaatgagtcccgccaatgccccaatgcccgttgccagttcgccttctacggtggtgagtcgggctaccaccgggccctgctgggcctgcagatcttcaatgccttcatgttcttctggttggccaacttcgtgctggcgctgggccaggtcacgctggccggggcctttgcctcctactactgggccctgcgcaagccggacgacctgccggccttcccgctcttctctgcctttggccgggcgctcaggtaccacaccacgacgacgaattccggcacg

SEQ ID NO: 428028 - DNA, 1532 bp, Homo sapiens
cggggcggggcgtgcagcccgcggagcctcccgcccgcccgggctggggtcgcgctggctcggactccgctccccgccccgccgcggccatggaggacgagcggaaaaacggagcctacggaacgccacagaagtatgatcccactttcaaaggacccatttacaataggggctgcacggatatcatatgctgtgtgttcctgctcctggccattgtgggctacgtggctgtaggcatcatagcctggactcatggagaccctcgaaaggtgatctaccccactgatagccggggcgagttctgcgggcagaagggcacaaaaaacgagaacaaaccctatctgttttatttcaacattgtgaaatgtgccagccccctggttctgctggaattccaatgtcccactccccagatctgcgtggaaaaatgccccgaccgctacctcacgtacctgaatgctcgcagctcccgggactttgagtactataagcagttctgtgttcctggcttcaagaacaataaaggagtggctgaggtgcttcgagatggtgactgccctgctgtcctcatccccagcaaacccttggcccggagatgcttccccgctatccacgcctacaagggtgtcctgatggtgggcaatgagacgacctatgaggatgggcatggctcccggaaaaacatcacagacctggtggagggcgccaagaaagccaatggagtcctagaggcgcggcaactcgccatgcgcatatttgaagattacaccgtctcttggtactggattatcataggcctggtcattgccatggcgatgagcctcctgttcatcatcctgcttcgcttcctggctggtattatggtctgggtgatgatcatcatggtgattctggtgctgggctacggaatatttcactgctacatggagtactcccgactgcgtggtgaggccggctctgatgtctctttggtggacctcggctttcagacggatttccgggtgtacctgcacttacggcagacctggttggcctttatgatcattctgagtatccttgaagtcattatcatcttgctgctcatctttctccggaagagaattctcatcgcgattgcactcatcaaagaagccagcagggctgtgggatacgtcatgtgctccttgctctacccactggtcaccttcttcttgctgtgcctctgcatcgcctactgggccagcactgctgtgtatctgcccccagacactgatctctgaccccagggatggctaaagaccaactttgcctagaagtgacctgcagcttagggatagggctggaaactggtgggagaatggattctttcccacaaaagtccctggggtcctcagtcctagacctctgcttccttaacgaacctccagcttcctgtccacttccaacgaagcggtctataagatctttgatgacagcccctgcccatttactgcgaaaacctgcaacccagaggtgggcgtccccggggtggggagggcaggtattgccccagc

SEQ ID NO: 428029 - DNA, 1837 bp, Homo sapiens
cgtatttcttcttaaaacagaataaataaatagtctgtctctttctccttctgttcacatttgccccagtttcttctcttgaatcatgacagtttggaaaattgtctggattgcttagtgccactgaatcatgccatggaaggattttgtatttcacttttaaacttctctgtgacaggagaagcactgcttcatggcttcttgcccaaggattttagatggacacagtgggtaataaatggatgaatttttgtttgggttgaagaatctctctgagaagttgacacgtgggggcaatggtttgtttctcttgtatttctgaagttgcaaataatcatgtaagcagttcaaccaggagtttacaccaaacttttaataggcgatatatcattattttttttcccattggtttggataacatccactttaactggcagttagtcatacttagctatttttgttaaagcaggtgatttattgttattttatatttatgacatgattaataagtgaatatggaagattttacattgacttaggggatcaaagttttcattatattaacacctttaattgccatgagttttctatttctagcatgcatattttgtgttcattcaagtgaagaaaacagtcttttgtgttctcaggtactgcataagccgaccacagtataagacttcttgtggcatctcttcattaatttcttgttggaatttcttatacagcacaatgggagctggaaaccttccacctattacccaagaagaagctttacatattctgggctttcaacctccatttgaagatattaggtttggtcctttcacggggaatacaacacttatgaggtggtttagacaaattaatgaccacttccatgtaaaaggatgctcttatgttctatataagcctcatgggaagaataaaacagcaggagaaactgcttcaggggccctgtcaaagttaacccgtggattgaaagatgaatcgctggcttatatctatcattgccaaaatcattatttttgtccaattggcttcgaagcaacccctgttaaagctaataaagcattcagcaggggacctctctcaccacaggaagttgaatattggatcttaattggagaatcaagtagaaaacatcctgccattcactgtaaaaaatgggcagatattgttactgatctaaacactcaaaatccagaatacctggatatccggcacttagagaggggactgcagtatagaaaaacaaagaaggttgggggaaatttgcattgcatcatagcattccagagacttaactggcaaagatttggcctttggaactttccatttggaaccattagacaagaatcacaacctccaacacatgcccagggaattgccaaatctgagagtgaagacaatatttccaagaagcagcatgggcgtctgggccggtctttcagtgctagtttccatcaggactcggcatggaaaaagatgtctagtatccatgagagaaggaacagtggttaccagggttacagtgattacgatgggaatgattgactatgcttgctactgaacagctggcattatatatgaaactgctatatacaggactgtataaagacagtagaagattttagtaagcctacattaaataggagcagatcttgtggtataaaaaataaccttgtagttctccagatactaagcttgtatatgattatggtgggtgatttcagatatataagcagataagcacagattattgtcctttcaagttaagagtatataatctggacagaaaatttcacaaaattcaataaaattacaactgttgtct

SEQ ID NO: 428030 - DNA, 3705 bp, Homo sapiens
ctgccaggattttaccacctctcgcccatttatttacttctcggtcaccgctttcgggggacagataaacaccacagatgcccatcaaaggggcgcacgggtctggaggcgcagctcaggtttttgcgttggtcaccctgccctccgcacgtggagagggcaggcataaagcaccttgaaaggaaggtgctgtcaatgctatccgacgacctgtcgccgggcaccgcagcatcctcgctcgctccgatgggacgagggacgccggccccagggtaacaggaggcgcctcgccggccgcgcgctggatgctgtgatccaggaatcagtttagacttgaaattcagtttttcctgaaactgatcagaagttagtgacaccttgattggatccgtttttctgtcaggagctcattttgcagctctcaagcttttatagcatgctgtaaacaattgtcaaagttgtttatcaagaaacagatagagttgcaacttgtttctagtaatagaaacttttacactgcattcaatgcctaacgttgcagaaacagaaaggtcaaatgattctggaaatggtgagcacaaatctgagagaaagtcacctgaagagaatctacaaggtgctgtaaaatctttctgcacaagtgcctcaggagcacccttgggtcccaaaggagatggtcattatccatggagttgtccagtgactcatacacgggaaaaaatttatgccatctgttcggactatgcctttctcaaccaggcgacctcaatctataaaactccaaatccatcccgctctccttgcctccctgatagtacctctttatctgctggaaataattcatcaagatacattggtatcccgactagtacatcggaaattatctacaatgaagaaaatagcttggaaaacttatccaacagcctgggcaagctacctctcgcatgggaaattgataaatctgaatttgatggggtgaccacaaattcgaaacacaaatcaggcaatgcaaagaaacaagtttccaagagaaaaacttcagataaaaagggaagatatcagaaggaatgtcctcagcattctcctcttgaagatattaaacagcggaaagtattagacctcagacgatggtactgcataagccgaccacagtataagacttcttgtggcatctcttcattaatttcttgttggaatttcttatacagcacaatgggagctggaaaccttccacctattacccaagaagaagctttacatattctgggctttcaacctccatttgaagatattaggtttggtcctttcacggggaatacaacacttatgaggtggtttagacaaattaatgaccacttccatgtaaaaggatgctcttatgttctatataagcctcatgggaagaataaaacagcaggagaaactgcttcaggggccctgtcaaagttaacccgtggattgaaagatgaatcgctggcttatatctatcattgccaaaatcattatttttgtccaattggcttcgaagcaacccctgttaaagctaataaagcattcagcaggggacctctctcaccacaggaagttgaatattggatcttaattggagaatcaagtagaaaacatcctgccattcactgtaaaaaatgggcagatattgttactgatctaaacactcaaaatccagaatacctggatatccggcacttagagaggggactgcagtatagaaaaacaaagaaggttgggggaaatttgcattgcatcatagcattccagagacttaactggcaaagatttggcctttggaactttccatttggaaccattagacaagaatcacaacctccaacacatgcccagggaattgccaaatctgagagtgaagacaatatttccaagaagcagcatgggcgtctgggccggtctttcagtgctagtttccatcaggactcggcatggaaaaagatgtctagtatccatgagagaaggaacagtggttaccagggttacagtgattacgatgggaatgattgactatgcttgctactgaacagctggcattatatatgaaactgctatatacaggactgtataaagacagtagaagattttagtaagcctacattaaataggagcagatcttgtggtataaaaaataaccttgtagttctccagatactaagcttgtatatgattatggtgggtgatttcagatatataagcagataagcacagattattgtcctttcaagttaagagtatataatctggacagaaaatttcacaaaattcaataaaattacaactgttgtctaaataagtgaaacacaaattcacttaatagcatcaagatttgaaatacttaagcatgaagtgacttttataatgactcgatccctagacatttgttacagatagttttatgcctaagaccaagatgtaaagtaccatctgcccttaaaaaaaaattggggctgtcaatttctagttttcactcatggttaacacgcatttaaaattatttcatgagtctagtagttctttgatttatagcaggatcttgcttgcctcatttgtttcctggttatgttcttaggattctgactaagaggcaaaagagaaaagactcaagaaactgatcctggagatcgagaccatcctggctaacatggtgaaaccccgtctctactaaacatacaaaaaattagccgggtgtagtggtgggcacctgtagtcctagctactcgagaggctgaggcaggagaatggcgtgaacccgggaggtggagcttgcagtgagcggagatcgcgccactgcactccagcctgggcgacagggcaagactctgtctcaaaaaaaaaaaaaaaaaaaagacggatccttttttttggtgcaaatgggtgacttagtgcattgattcagatttttaaaatttcttgatgtggtttgtaataatcaaatattgacaagaaccttaggtctcgaaagacttttataggtctagatgacgtttgccttaggggtaaagtaaaagaacaattggcaccttaagtttctatacccaaggttatctgtgaaatgagatctcctgatatttgattgctttctcagtatggagtcatatgttgataacagtactgaagatgcataagaaatgcccaagtcactcagaggacaactacccatattccagactctgagctgtttcctttttaaaaatcatatagacaattagctgtttgaagtgagtattaaatatttcagaagtgtgaatttcatgtatttgagctcctctagttgctgtcggtttttcttctgctgccaacctgtgactcacaaatgactaggatctcttgttctttaattttagggtcttgttccaggactcaaatcagtaacttggtgattacaaggtgctgaatgtgttggtaaccatatcgcaatacacctcaaggaaaaggttcagatttttatttttaaaatattttcatttttttcttgaattttatatccgtttgttcactcgtacatgcctagcctacagaaggggatatatattatgaaatggtcatttttctgaagagaatattttgcttgaaatgcaaaggactgaaagagatttgtaggttgttgattttgttacttcatactggaacttttaaaaagatttcatcaaataaagttttgttttctacttttaa

SEQ ID NO: 428031 - DNA, 3578 bp, Homo sapiens
atccacccgcctcagcctcccaaagtgctgggattacaggtgtgagccaccacgccggcttagtaaatcttaatatagcaacacctcacttgcctggaagagggaaccgcaatcaatcaaaatgagggcctacagtaatgcctggcatgatgcaaacacttaaaaattatctgttgaatgagacgtctacaaatcctaggccctggggatacaataatctggaaaaccagacttgcaggatgcagacgttgatcatatgaacagatatgcacagaagagctcattttgcagctctcaagcttttatagcatgctgtaaacaattgtcaaagttgtttatcaagaaacagatagagttgcaacttgtttctagtaatagaaacttttacactgcattcaatgcctaacgttgcagaaacagaaaggtcaaatgattctggaaatggtgagcacaaatctgagagaaagtcacctgaagagaatctacaaggtgctgtaaaatctttctgcacaagtgcctcaggagcacccttgggtcccaaaggagatggtcattatccatggagttgtccagtgactcatacacgggaaaaaatttatgccatctgttcggactatgcctttctcaaccaggcgacctcaatctataaaactccaaatccatcccgctctccttgcctccctgatagtacctctttatctgctggaaataattcatcaagatacattggtatcccgactagtacatcggaaattatctacaatgaagaaaatagcttggaaaacttatccaacagcctgggcaagctacctctcgcatgggaaattgataaatctgaatttgatggggtgaccacaaattcgaaacacaaatcaggcaatgcaaagaaacaagtttccaagagaaaaacttcagataaaaagggaagatatcagaaggaatgtcctcagcattctcctcttgaagatattaaacagcggaaagtattagacctcagacgatggtactgcataagccgaccacagtataagacttcttgtggcatctcttcattaatttcttgttggaatttcttatacagcacaatgggagctggaaaccttccacctattacccaagaagaagctttacatattctgggctttcaacctccatttgaagatattaggtttggtcctttcacggggaatacaacacttatgaggtggtttagacaaattaatgaccacttccatgtaaaaggatgctcttatgttctatataagcctcatgggaagaataaaacagcaggagaaactgcttcaggggccctgtcaaagttaacccgtggattgaaagatgaatcgctggcttatatctatcattgccaaaatcattatttttgtccaattggcttcgaagcaacccctgttaaagctaataaagcattcagcaggggacctctctcaccacaggaagttgaatattggatcttaattggagaatcaagtagaaaacatcctgccattcactgtaaaaaatgggcagatattgttactgatctaaacactcaaaatccagaatacctggatatccggcacttagagaggggactgcagtatagaaaaacaaagaaggttgggggaaatttgcattgcatcatagcattccagagacttaactggcaaagatttggcctttggaactttccatttggaaccattagacaagaatcacaacctccaacacatgcccagggaattgccaaatctgagagtgaagacaatatttccaagaagcagcatgggcgtctgggccggtctttcagtgctagtttccatcaggactcggcatggaaaaagatgtctagtatccatgagagaaggaacagtggttaccagggttacagtgattacgatgggaatgattgactatgcttgctactgaacagctggcattatatatgaaactgctatatacaggactgtataaagacagtagaagattttagtaagcctacattaaataggagcagatcttgtggtataaaaaataaccttgtagttctccagatactaagcttgtatatgattatggtgggtgatttcagatatataagcagataagcacagattattgtcctttcaagttaagagtatataatctggacagaaaatttcacaaaattcaataaaattacaactgttgtctaaataagtgaaacacaaattcacttaatagcatcaagatttgaaatacttaagcatgaagtgacttttataatgactcgatccctagacatttgttacagatagttttatgcctaagaccaagatgtaaagtaccatctgcccttaaaaaaaaattggggctgtcaatttctagttttcactcatggttaacacgcatttaaaattatttcatgagtctagtagttctttgatttatagcaggatcttgcttgcctcatttgtttcctggttatgttcttaggattctgactaagaggcaaaagagaaaagactcaagaaactgatcctggagatcgagaccatcctggctaacatggtgaaaccccgtctctactaaacatacaaaaaattagccgggtgtagtggtgggcacctgtagtcctagctactcgagaggctgaggcaggagaatggcgtgaacccgggaggtggagcttgcagtgagcggagatcgcgccactgcactccagcctgggcgacagggcaagactctgtctcaaaaaaaaaaaaaaaaaaaagacggatccttttttttggtgcaaatgggtgacttagtgcattgattcagatttttaaaatttcttgatgtggtttgtaataatcaaatattgacaagaaccttaggtctcgaaagacttttataggtctagatgacgtttgccttaggggtaaagtaaaagaacaattggcaccttaagtttctatacccaaggttatctgtgaaatgagatctcctgatatttgattgctttctcagtatggagtcatatgttgataacagtactgaagatgcataagaaatgcccaagtcactcagaggacaactacccatattccagactctgagctgtttcctttttaaaaatcatatagacaattagctgtttgaagtgagtattaaatatttcagaagtgtgaatttcatgtatttgagctcctctagttgctgtcggtttttcttctgctgccaacctgtgactcacaaatgactaggatctcttgttctttaattttagggtcttgttccaggactcaaatcagtaacttggtgattacaaggtgctgaatgtgttggtaaccatatcgcaatacacctcaaggaaaaggttcagatttttatttttaaaatattttcatttttttcttgaattttatatccgtttgttcactcgtacatgcctagcctacagaaggggatatatattatgaaatggtcatttttctgaagagaatattttgcttgaaatgcaaaggactgaaagagatttgtaggttgttgattttgttacttcatactggaacttttaaaaagatttcatcaaataaagttttgttttctacttttaa

SEQ ID NO: 428032 - DNA, 3667 bp, Homo sapiens
cggcccttgggctctgcgggctggggactcggggtgcccgcgacacgcgcggaggcgcgggctgggttggccacgggcagggagcgcagccgcgctccttcctctctgcccgcgtcgcctccgcgcgcactggttctgcgcggcggggcttggcctgcgcgactgtctactccgtcccggcggcctcggagcccggccgagcggcgagcttgtcagaggacggtggtggaaacgctcccggcctccccaggggcgcgggctggaggctggcgccaggcgcggaggactcccggtatcttttgacaggctggcgcctcggctctggggacccgcaggaatcagtttagacttgaaattcagtttttcctgaaactgatcagaagttagtgacaccttgattggatccgtttttctgtcaggagctcattttgcagctctcaagcttttatagcatgctgtaaacaattgtcaaagttgtttatcaagaaacagatagagttgcaacttgtttctagtaatagaaacttttacactgcattcaatgcctaacgttgcagaaacagaaaggtcaaatgattctggaaatggtgagcacaaatctgagagaaagtcacctgaagagaatctacaaggtgctgtaaaatctttctgcacaagtgcctcaggagcacccttgggtcccaaaggagatggtcattatccatggagttgtccagtgactcatacacgggaaaaaatttatgccatctgttcggactatgcctttctcaaccaggcgacctcaatctataaaactccaaatccatcccgctctccttgcctccctgatagtacctctttatctgctggaaataattcatcaagatacattggtatcccgactagtacatcggaaattatctacaatgaagaaaatagcttggaaaacttatccaacagcctgggcaagctacctctcgcatgggaaattgataaatctgaatttgatggggtgaccacaaattcgaaacacaaatcaggcaatgcaaagaaacaagtttccaagagaaaaacttcagataaaaagcggaaagtattagacctcagacgatggtactgcataagccgaccacagtataagacttcttgtggcatctcttcattaatttcttgttggaatttcttatacagcacaatgggagctggaaaccttccacctattacccaagaagaagctttacatattctgggctttcaacctccatttgaagatattaggtttggtcctttcacggggaatacaacacttatgaggtggtttagacaaattaatgaccacttccatgtaaaaggatgctcttatgttctatataagcctcatgggaagaataaaacagcaggagaaactgcttcaggggccctgtcaaagttaacccgtggattgaaagatgaatcgctggcttatatctatcattgccaaaatcattatttttgtccaattggcttcgaagcaacccctgttaaagctaataaagcattcagcaggggacctctctcaccacaggaagttgaatattggatcttaattggagaatcaagtagaaaacatcctgccattcactgtaaaaaatgggcagatattgttactgatctaaacactcaaaatccagaatacctggatatccggcacttagagaggggactgcagtatagaaaaacaaagaaggttgggggaaatttgcattgcatcatagcattccagagacttaactggcaaagatttggcctttggaactttccatttggaaccattagacaagaatcacaacctccaacacatgcccagggaattgccaaatctgagagtgaagacaatatttccaagaagcagcatgggcgtctgggccggtctttcagtgctagtttccatcaggactcggcatggaaaaagatgtctagtatccatgagagaaggaacagtggttaccagggttacagtgattacgatgggaatgattgactatgcttgctactgaacagctggcattatatatgaaactgctatatacaggactgtataaagacagtagaagattttagtaagcctacattaaataggagcagatcttgtggtataaaaaataaccttgtagttctccagatactaagcttgtatatgattatggtgggtgatttcagatatataagcagataagcacagattattgtcctttcaagttaagagtatataatctggacagaaaatttcacaaaattcaataaaattacaactgttgtctaaataagtgaaacacaaattcacttaatagcatcaagatttgaaatacttaagcatgaagtgacttttataatgactcgatccctagacatttgttacagatagttttatgcctaagaccaagatgtaaagtaccatctgcccttaaaaaaaaattggggctgtcaatttctagttttcactcatggttaacacgcatttaaaattatttcatgagtctagtagttctttgatttatagcaggatcttgcttgcctcatttgtttcctggttatgttcttaggattctgactaagaggcaaaagagaaaagactcaagaaactgatcctggagatcgagaccatcctggctaacatggtgaaaccccgtctctactaaacatacaaaaaattagccgggtgtagtggtgggcacctgtagtcctagctactcgagaggctgaggcaggagaatggcgtgaacccgggaggtggagcttgcagtgagcggagatcgcgccactgcactccagcctgggcgacagggcaagactctgtctcaaaaaaaaaaaaaaaaaaaagacggatccttttttttggtgcaaatgggtgacttagtgcattgattcagatttttaaaatttcttgatgtggtttgtaataatcaaatattgacaagaaccttaggtctcgaaagacttttataggtctagatgacgtttgccttaggggtaaagtaaaagaacaattggcaccttaagtttctatacccaaggttatctgtgaaatgagatctcctgatatttgattgctttctcagtatggagtcatatgttgataacagtactgaagatgcataagaaatgcccaagtcactcagaggacaactacccatattccagactctgagctgtttcctttttaaaaatcatatagacaattagctgtttgaagtgagtattaaatatttcagaagtgtgaatttcatgtatttgagctcctctagttgctgtcggtttttcttctgctgccaacctgtgactcacaaatgactaggatctcttgttctttaattttagggtcttgttccaggactcaaatcagtaacttggtgattacaaggtgctgaatgtgttggtaaccatatcgcaatacacctcaaggaaaaggttcagatttttatttttaaaatattttcatttttttcttgaattttatatccgtttgttcactcgtacatgcctagcctacagaaggggatatatattatgaaatggtcatttttctgaagagaatattttgcttgaaatgcaaaggactgaaagagatttgtaggttgttgattttgttacttcatactggaacttttaaaaagatttcatcaaataaagttttgttttctacttttaa

SEQ ID NO: 428033 - DNA, 3171 bp, Homo sapiens
cgtatttcttcttaaaacagaataaataaatagtctgtctctttctccttctgttcacatttgccccagtttcttctcttgaatcatgacagtttggtttcacttttaaacttctctgtgacaggagaagcactgcttcatggcttcttgcccaaggattttagatggacacagtgggtaataaatggatgaatttttgtttgggttgaagaatctctctgagaagttgacacgtgggggcaatggtttgtttctcttgtatttctgaagttgcaaataatcatgtaagcagttcaaccaggagtttacaccaaacttttaataggcgatatatcattattttttttcccattggtttggataacatccactttaactggcagttagtcatacttagctatttttgttaaagcaggtgatttattgttattttatatttatgacatgattaataagtgaatatggaagattttacattgacttaggggatcaaagttttcattatattaacacctttaattgccatgagttttctatttctagcatgcatattttgtgttcattcaagtgaagaaaacagtcttttgtgttctcaggtactgcataagccgaccacagtataagacttcttgtggcatctcttcattaatttcttgttggaatttcttatacagcacaatgggagctggaaaccttccacctattacccaagaagaagctttacatattctgggctttcaacctccatttgaagatattaggtttggtcctttcacggggaatacaacacttatgaggtggtttagacaaattaatgaccacttccatgtaaaaggatgctcttatgttctatataagcctcatgggaagaataaaacagcaggagaaactgcttcaggggccctgtcaaagttaacccgtggattgaaagatgaatcgctggcttatatctatcattgccaaaatcattatttttgtccaattggcttcgaagcaacccctgttaaagctaataaagcattcagcaggggacctctctcaccacaggaagttgaatattggatcttaattggagaatcaagtagaaaacatcctgccattcactgtaaaaaatgggcagatattgttactgatctaaacactcaaaatccagaatacctggatatccggcacttagagaggggactgcagtatagaaaaacaaagaaggttgggggaaatttgcattgcatcatagcattccagagacttaactggcaaagatttggcctttggaactttccatttggaaccattagacaagaatcacaacctccaacacatgcccagggaattgccaaatctgagagtgaagacaatatttccaagaagcagcatgggcgtctgggccggtctttcagtgctagtttccatcaggactcggcatggaaaaagatgtctagtatccatgagagaaggaacagtggttaccagggttacagtgattacgatgggaatgattgactatgcttgctactgaacagctggcattatatatgaaactgctatatacaggactgtataaagacagtagaagattttagtaagcctacattaaataggagcagatcttgtggtataaaaaataaccttgtagttctccagatactaagcttgtatatgattatggtgggtgatttcagatatataagcagataagcacagattattgtcctttcaagttaagagtatataatctggacagaaaatttcacaaaattcaataaaattacaactgttgtctaaataagtgaaacacaaattcacttaatagcatcaagatttgaaatacttaagcatgaagtgacttttataatgactcgatccctagacatttgttacagatagttttatgcctaagaccaagatgtaaagtaccatctgcccttaaaaaaaaattggggctgtcaatttctagttttcactcatggttaacacgcatttaaaattatttcatgagtctagtagttctttgatttatagcaggatcttgcttgcctcatttgtttcctggttatgttcttaggattctgactaagaggcaaaagagaaaagactcaagaaactgatcctggagatcgagaccatcctggctaacatggtgaaaccccgtctctactaaacatacaaaaaattagccgggtgtagtggtgggcacctgtagtcctagctactcgagaggctgaggcaggagaatggcgtgaacccgggaggtggagcttgcagtgagcggagatcgcgccactgcactccagcctgggcgacagggcaagactctgtctcaaaaaaaaaaaaaaaaaaaagacggatccttttttttggtgcaaatgggtgacttagtgcattgattcagatttttaaaatttcttgatgtggtttgtaataatcaaatattgacaagaaccttaggtctcgaaagacttttataggtctagatgacgtttgccttaggggtaaagtaaaagaacaattggcaccttaagtttctatacccaaggttatctgtgaaatgagatctcctgatatttgattgctttctcagtatggagtcatatgttgataacagtactgaagatgcataagaaatgcccaagtcactcagaggacaactacccatattccagactctgagctgtttcctttttaaaaatcatatagacaattagctgtttgaagtgagtattaaatatttcagaagtgtgaatttcatgtatttgagctcctctagttgctgtcggtttttcttctgctgccaacctgtgactcacaaatgactaggatctcttgttctttaattttagggtcttgttccaggactcaaatcagtaacttggtgattacaaggtgctgaatgtgttggtaaccatatcgcaatacacctcaaggaaaaggttcagatttttatttttaaaatattttcatttttttcttgaattttatatccgtttgttcactcgtacatgcctagcctacagaaggggatatatattatgaaatggtcatttttctgaagagaatattttgcttgaaatgcaaaggactgaaagagatttgtaggttgttgattttgttacttcatactggaacttttaaaaagatttcatcaaataaagttttgttttctacttttaa

SEQ ID NO: 428034 - DNA, 3712 bp, Homo sapiens
ctgccaggattttaccacctctcgcccatttatttacttctcggtcaccgctttcgggggacagataaacaccacagatgcccatcaaaggggcgcacgggtctggaggcgcagctcaggtttttgcgttggtcaccctgccctccgcacgtggagagggcaggcataaagcaccttgaaaggaaggtgctgtcaatgctatccgacgacctgtcgccgggcaccgcagcatcctcgctcgctccgatgggacgagggacgccggccccagggtaacaggaggcgcctcgccggccgcgcgctggatgctgtgatccaggaatcagtttagacttgaaattcagtttttcctgaaactgatcagaagttagtgacaccttgattggatccgtttttctgtcaggagctcattttgcagctctcaagcttttatagcatgctgtaaacaattgtcaaagttgtttatcaagaaacagatagagttgcaacttgtttctagtaatagaaacttttacactgcattcaatgcctaacgttgcagaaacagaaaggtcaaatgattctggaaatggtgagcacaaatctgagagaaagtcacctgaagagaatctacaaggtgctgtaaaatctttctgcacaagtgcctcaggagcacccttgggtcccaaaggagatggtcattatccatggagttgtccagtgactcatacacgggaaaaaatttatgccatctgttcggactatgcctttctcaaccaggcgacctcaatctataaaactccaaatccatcccgctctccttgcctccctgatagtacctctttatctgctggaaataattcatcaagatacattggtatcccgactagtacatcggaaattatctacaatgaagaaaatagcttggaaaacttatccaacagcctgggcaagctacctctcgcatgggaaattgataaatctgaatttgatggggtgaccacaaattcgaaacacaaatcaggcaatgcaaagaaacaagtttccaagagaaaaacttcagataaaaagggaagatatcagaaggaatgtcctcagcattctcctcttgaagatattaaacagcggaaagtattagacctcagacgatggtactgcataagccgaccacagtataagacttcttgtggcatctcttcattaatttcttgttggaatttcttatacagcacaatgggagctggaaaccttccacctattacccaagaagaagctttacatattctgggctttcaacctccatttgaagatattaggtttggtcctttcacggggaatacaacacttatgaggtggtttagacaaattaatgaccacttccatgtaaaaggatgctcttatgttctatataagcctcatgggaagaataaaacagcaggagaaactgcttcaggggccctgtcaaagttaacccgtggattgaaagatgaatcgctggcttatatctatcattgccaaaatcattatttttgtccaattggcttcgaagcaacccctgttaaagctaataaagcattcagcaggggacctctctcaccacaggaagttgaatattggatcttaattggagaatcaagtagaaaacatcctgccattcactgtaaaaaatgggcagatattgttactgatctaaacactcaaaatccagaatacctggatatccggcacttagagaggggactgcagtatagaaaaacaaagaaggttgggggaaatttgcattgcatcatagcattccagagacttaactggcaaagatttggcctttggaactttccatttggaaccattagacaagaatcacaacctccaacacatgcccagggaattgccaaatctgagagtgaagacaatatttccaagaagcagcatgggcgtctgggccggtctttcagtgctagtttccatcaggactcggcatggaaaaagatgtctagtatccatgagagaaggaacagtggttaccagggttacagtgattacgatgggaatgattgactatgcttgctactgaacagctggcattatatatgaaactgctatatacaggactgtataaagacagtagaagattttagtaagcctacattaaataggagcagatcttgtggtataaaaaataaccttgtagttctccagatactaagcttgtatatgattatggtgggtgatttcagatatataagcagataagcacagattattgtcctttcaagttaagagtatataatctggacagaaaatttcacaaaattcaataaaattacaactgttgtctaaataagtgaaacacaaattcacttaatagcatcaagatttgaaatacttaagcatgaagtgacttttataatgactcgatccctagacatttgttacagatagttttatgcctaagaccaagatgtaaagtaccatctgcccttaaaaaaaaattggggctgtcaatttctagttttcactcatggttaacacgcatttaaaattatttcatgagtctagtagttctttgatttatagcaggatcttgcttgcctcatttgtttcctggttatgttcttaggattctgactaagaggcaaaagagaaaagactcaagaaactgatcctggagatcgagaccatcctggctaacatggtgaaaccccgtctctactaaacatacaaaaaattagccgggtgtagtggtgggcacctgtagtcctagctactcgagaggctgaggcaggagaatggcgtgaacccgggaggtggagcttgcagtgagcggagatcgcgccactgcactccagcctgggcgacagggcaagactctgtctcaaaaaaaaaaaaaaaaaaaagacggatccttttttttggtgcaaatgggtgacttagtgcattgattcagatttttaaaatttcttgatgtggtttgtaataatcaaatattgacaagaaccttaggtctcgaaagacttttataggtctagatgacgtttgccttaggggtaaagtaaaagaacaattggcaccttaagtttctatacccaaggttatctgtgaaatgagatctcctgatatttgattgctttctcagtatggagtcatatgttgataacagtactgaagatgcataagaaatgcccaagtcactcagaggacaactacccatattccagactctgagctgtttcctttttaaaaatcatatagacaattagctgtttgaagtgagtattaaatatttcagaagtgtgaatttcatgtatttgagctcctctagttgctgtcggtttttcttctgctgccaacctgtgactcacaaatgactaggatctcttgttctttaattttagggtcttgttccaggactcaaatcagtaacttggtgattacaaggtgctgaatgtgttggtaaccatatcgcaatacacctcaaggaaaaggttcagatttttatttttaaaatattttcatttttttcttgaattttatatccgtttgttcactcgtacatgcctagcctgcggaactgcagatacggtatgccatggtcagttttgtaaggcagaaagtagctttccagtgtgcagggcgcacaatgtgtagccgcctcttcggcccgtggagcagcaccagccgctgtcgccgccgctgctgctgggactgccgcggagccgggggtcatggagtg

SEQ ID NO: 428035 - DNA, 3653 bp, Homo sapiens
ctgccaggattttaccacctctcgcccatttatttacttctcggtcaccgctttcgggggacagataaacaccacagatgcccatcaaaggggcgcacgggtctggaggcgcagctcaggtttttgcgttggtcaccctgccctccgcacgtggagagggcaggcataaagcaccttgaaaggaaggtgctgtcaatgctatccgacgacctgtcgccgggcaccgcagcatcctcgctcgctccgatgggacgagggacgccggccccagggtaacaggaggcgcctcgccggccgcgcgctggatgctgtgatccaggaatcagtttagacttgaaattcagtttttcctgaaactgatcagaagttagtgacaccttgattggatccgtttttctgtcaggagctcattttgcagctctcaagcttttatagcatgctgtaaacaattgtcaaagttgtttatcaagaaacagatagagttgcaacttgtttctagtaatagaaacttttacactgcattcaatgcctaacgttgcagaaacagaaaggtcaaatgattctggaaatggtgagcacaaatctgagagaaagtcacctgaagagaatctacaaggtgctgtaaaatctttctgcacaagtgcctcaggagcacccttgggtcccaaaggagatggtcattatccatggagttgtccagtgactcatacacgggaaaaaatttatgccatctgttcggactatgcctttctcaaccaggcgacctcaatctataaaactccaaatccatcccgctctccttgcctccctgatagtacctctttatctgctggaaataattcatcaagatacattggtatcccgactagtacatcggaaattatctacaatgaagaaaatagcttggaaaacttatccaacagcctgggcaagctacctctcgcatgggaaattgataaatctgaatttgatggggtgaccacaaattcgaaacacaaatcaggcaatgcaaagaaacaagtttccaagagaaaaacttcagataaaaagggaagatatcagaaggaatgtcctcagcattctcctcttgaagatattaaacagcggaaagtattagacctcagacgatggtactgcataagccgaccacagtataagacttcttgtggcatctcttcattaatttcttgttggaatttcttatacagcacaatgggagctggaaaccttccacctattacccaagaagaagctttacatattctgggctttcaacctccatttgaagatattaggtttggtcctttcacggggaatacaacacttatgaggtggtttagacaaattaatgaccacttccatgtaaaaggatgctcttatgttctatataagcctcatgggaagaataaaacagcaggagaaactgcttcaggggccctgtcaaagttaacccgtggattgaaagatgaatcgctggcttatatctatcattgccaaaatcattatttttgtccaattggcttcgaagcaacccctgttaaagctaataaagcattcagcaggggacctctctcaccacaggaagttgaatattggatcttaattggagaatcaagtagaaaacatcctgccattcactgtaaaaaatgggcagatattgttactgatctaaacactcaaaatccagaatacctggatatccggcacttagagaggggactgcagtatagaaaaacaaagaaggttgggggaaatttgcattgcatcatagcattccagagacttaactggcaaagatttggcctttggaactttccatttggaaccattagacaagaatcacaacctccaacacatgcccagggaattgccaaatctgagagtgaagacaatatttccaagaagcagcatgggcgtctgggccggtctttcagtgctagtttccatcaggactcggcatggatgattacgatgggaatgattgactatgcttgctactgaacagctggcattatatatgaaactgctatatacaggactgtataaagacagtagaagattttagtaagcctacattaaataggagcagatcttgtggtataaaaaataaccttgtagttctccagatactaagcttgtatatgattatggtgggtgatttcagatatataagcagataagcacagattattgtcctttcaagttaagagtatataatctggacagaaaatttcacaaaattcaataaaattacaactgttgtctaaataagtgaaacacaaattcacttaatagcatcaagatttgaaatacttaagcatgaagtgacttttataatgactcgatccctagacatttgttacagatagttttatgcctaagaccaagatgtaaagtaccatctgcccttaaaaaaaaattggggctgtcaatttctagttttcactcatggttaacacgcatttaaaattatttcatgagtctagtagttctttgatttatagcaggatcttgcttgcctcatttgtttcctggttatgttcttaggattctgactaagaggcaaaagagaaaagactcaagaaactgatcctggagatcgagaccatcctggctaacatggtgaaaccccgtctctactaaacatacaaaaaattagccgggtgtagtggtgggcacctgtagtcctagctactcgagaggctgaggcaggagaatggcgtgaacccgggaggtggagcttgcagtgagcggagatcgcgccactgcactccagcctgggcgacagggcaagactctgtctcaaaaaaaaaaaaaaaaaaaagacggatccttttttttggtgcaaatgggtgacttagtgcattgattcagatttttaaaatttcttgatgtggtttgtaataatcaaatattgacaagaaccttaggtctcgaaagacttttataggtctagatgacgtttgccttaggggtaaagtaaaagaacaattggcaccttaagtttctatacccaaggttatctgtgaaatgagatctcctgatatttgattgctttctcagtatggagtcatatgttgataacagtactgaagatgcataagaaatgcccaagtcactcagaggacaactacccatattccagactctgagctgtttcctttttaaaaatcatatagacaattagctgtttgaagtgagtattaaatatttcagaagtgtgaatttcatgtatttgagctcctctagttgctgtcggtttttcttctgctgccaacctgtgactcacaaatgactaggatctcttgttctttaattttagggtcttgttccaggactcaaatcagtaacttggtgattacaaggtgctgaatgtgttggtaaccatatcgcaatacacctcaaggaaaaggttcagatttttatttttaaaatattttcatttttttcttgaattttatatccgtttgttcactcgtacatgcctagcctacagaaggggatatatattatgaaatggtcatttttctgaagagaatattttgcttgaaatgcaaaggactgaaagagatttgtaggttgttgattttgttacttcatactggaacttttaaaaagatttcatcaaataaagttttgttttctacttttaa

SEQ ID NO: 428036 - DNA, 625 bp, Homo sapiens
cttaatatagcaacacctcacttgcctggaagagggaaccgcaatcaatcaaaatgagggcctacagtaatgcctggcatgatgcaaacacttaaaaattatctgttgaatgagacgtctacaaatcctaggccctggggatacaataatctggaaaaccagacttgcaggatgcagacgttgatcatatgaacagatatgcacagaagtaagtgtaaaattgccacctggtaagacctgtgtgaggaaggtactagagtctgtaccgggtcacctggcctagtttgagaagccaagaaggtttcccccagaaagtgacatttgagctgacattggaaagatgaatgggaatgagctaagtaagggagacagtattgggagaaccaaaaagtaatgtggagcttggggggtgggggaaaggaatgagatggagctaaccagatagatctagggaccatcaggagttggccttttgttctaagagcagaggctttcaggcagaggagttctgtgatcatatatatgtagcaaactttattttctaatatctctgcacaggtcaggttagaagtgtcaactcactgggaatagtttataaatagagaaacaaaaggagataaaagat

SEQ ID NO: 428037 - DNA, 3721 bp, Homo sapiens
cggcccttgggctctgcgggctggggactcggggtgcccgcgacacgcgcggaggcgcgggctgggttggccacgggcagggagcgcagccgcgctccttcctctctgcccgcgtcgcctccgcgcgcactggttctgcgcggcggggcttggcctgcgcgactgtctactccgtcccggcggcctcggagcccggccgagcggcgagcttgtcagaggacggtggtggaaacgctcccggcctccccaggggcgcgggctggaggctggcgccaggcgcggaggactcccggtatcttttgacaggctggcgcctcggctctggggacccgcaggaatcagtttagacttgaaattcagtttttcctgaaactgatcagaagttagtgacaccttgattggatccgtttttctgtcaggagctcattttgcagctctcaagcttttatagcatgctgtaaacaattgtcaaagttgtttatcaagaaacagatagagttgcaacttgtttctagtaatagaaacttttacactgcattcaatgcctaacgttgcagaaacagaaaggtcaaatgattctggaaatggtgagcacaaatctgagagaaagtcacctgaagagaatctacaaggtgctgtaaaatctttctgcacaagtgcctcaggagcacccttgggtcccaaaggagatggtcattatccatggagttgtccagtgactcatacacgggaaaaaatttatgccatctgttcggactatgcctttctcaaccaggcgacctcaatctataaaactccaaatccatcccgctctccttgcctccctgatagtacctctttatctgctggaaataattcatcaagatacattggtatcccgactagtacatcggaaattatctacaatgaagaaaatagcttggaaaacttatccaacagcctgggcaagctacctctcgcatgggaaattgataaatctgaatttgatggggtgaccacaaattcgaaacacaaatcaggcaatgcaaagaaacaagtttccaagagaaaaacttcagataaaaagggaagatatcagaaggaatgtcctcagcattctcctcttgaagatattaaacagcggaaagtattagacctcagacgatggtactgcataagccgaccacagtataagacttcttgtggcatctcttcattaatttcttgttggaatttcttatacagcacaatgggagctggaaaccttccacctattacccaagaagaagctttacatattctgggctttcaacctccatttgaagatattaggtttggtcctttcacggggaatacaacacttatgaggtggtttagacaaattaatgaccacttccatgtaaaaggatgctcttatgttctatataagcctcatgggaagaataaaacagcaggagaaactgcttcaggggccctgtcaaagttaacccgtggattgaaagatgaatcgctggcttatatctatcattgccaaaatcattatttttgtccaattggcttcgaagcaacccctgttaaagctaataaagcattcagcaggggacctctctcaccacaggaagttgaatattggatcttaattggagaatcaagtagaaaacatcctgccattcactgtaaaaaatgggcagatattgttactgatctaaacactcaaaatccagaatacctggatatccggcacttagagaggggactgcagtatagaaaaacaaagaaggttgggggaaatttgcattgcatcatagcattccagagacttaactggcaaagatttggcctttggaactttccatttggaaccattagacaagaatcacaacctccaacacatgcccagggaattgccaaatctgagagtgaagacaatatttccaagaagcagcatgggcgtctgggccggtctttcagtgctagtttccatcaggactcggcatggaaaaagatgtctagtatccatgagagaaggaacagtggttaccagggttacagtgattacgatgggaatgattgactatgcttgctactgaacagctggcattatatatgaaactgctatatacaggactgtataaagacagtagaagattttagtaagcctacattaaataggagcagatcttgtggtataaaaaataaccttgtagttctccagatactaagcttgtatatgattatggtgggtgatttcagatatataagcagataagcacagattattgtcctttcaagttaagagtatataatctggacagaaaatttcacaaaattcaataaaattacaactgttgtctaaataagtgaaacacaaattcacttaatagcatcaagatttgaaatacttaagcatgaagtgacttttataatgactcgatccctagacatttgttacagatagttttatgcctaagaccaagatgtaaagtaccatctgcccttaaaaaaaaattggggctgtcaatttctagttttcactcatggttaacacgcatttaaaattatttcatgagtctagtagttctttgatttatagcaggatcttgcttgcctcatttgtttcctggttatgttcttaggattctgactaagaggcaaaagagaaaagactcaagaaactgatcctggagatcgagaccatcctggctaacatggtgaaaccccgtctctactaaacatacaaaaaattagccgggtgtagtggtgggcacctgtagtcctagctactcgagaggctgaggcaggagaatggcgtgaacccgggaggtggagcttgcagtgagcggagatcgcgccactgcactccagcctgggcgacagggcaagactctgtctcaaaaaaaaaaaaaaaaaaaagacggatccttttttttggtgcaaatgggtgacttagtgcattgattcagatttttaaaatttcttgatgtggtttgtaataatcaaatattgacaagaaccttaggtctcgaaagacttttataggtctagatgacgtttgccttaggggtaaagtaaaagaacaattggcaccttaagtttctatacccaaggttatctgtgaaatgagatctcctgatatttgattgctttctcagtatggagtcatatgttgataacagtactgaagatgcataagaaatgcccaagtcactcagaggacaactacccatattccagactctgagctgtttcctttttaaaaatcatatagacaattagctgtttgaagtgagtattaaatatttcagaagtgtgaatttcatgtatttgagctcctctagttgctgtcggtttttcttctgctgccaacctgtgactcacaaatgactaggatctcttgttctttaattttagggtcttgttccaggactcaaatcagtaacttggtgattacaaggtgctgaatgtgttggtaaccatatcgcaatacacctcaaggaaaaggttcagatttttatttttaaaatattttcatttttttcttgaattttatatccgtttgttcactcgtacatgcctagcctacagaaggggatatatattatgaaatggtcatttttctgaagagaatattttgcttgaaatgcaaaggactgaaagagatttgtaggttgttgattttgttacttcatactggaacttttaaaaagatttcatcaaataaagttttgttttctacttttaa

SEQ ID NO: 428038 - DNA, 4040 bp, Homo sapiens
ctgccaggattttaccacctctcgcccatttatttacttctcggtcaccgctttcgggggacagataaacaccacagatgcccatcaaaggggcgcacgggtctggaggcgcagctcaggtttttgcgttggtcaccctgccctccgcacgtggagagggcaggcataaagcaccttgaaaggaaggtgctgtcaatgctatccgacgacctgtcgccgggcaccgcagcatcctcgctcgctccgatgggacgagggacgccggccccagggtaacaggaggcgcctcgccggccgcgcgctggatgctgtgatccaggaatcagtttagacttgaaattcagtttttcctgaaactgatcagaagttagtgacaccttgattggatccgtttttctgtcaggagctcattttgcagctctcaagcttttatagcatgctgtaaacaattgtcaaagttgtttatcaagaaacagatagagttgcaacttgtttctagtaatagaaacttttacactgcattcaatgcctaacgttgcagaaacagaaaggtcaaatgattctggaaatggtgagcacaaatctgagagaaagtcacctgaagagaatctacaaggtgctgtaaaatctttctgcacaagtgcctcaggagcacccttgggtcccaaaggagatggtcattatccatggagttgtccagtgactcatacacgggaaaaaatttatgccatctgttcggactatgcctttctcaaccaggcgacctcaatctataaaactccaaatccatcccgctctccttgcctccctgatagtacctctttatctgctggaaataattcatcaagatacattggtatcccgactagtacatcggaaattatctacaatgaagaaaatagcttggaaaacttatccaacagcctgggcaagctacctctcgcatgggaaattgataaatctgaatttgatggggtgaccacaaattcgaaacacaaatcaggcaatgcaaagaaacaagtttccaagagaaaaacttcagataaaaagggaagatatcagaaggaatgtcctcagcattctcctcttgaagatattaaacagcggaaagtattagacctcagacgatggtactgcataagccgaccacagtataagacttcttgtggcatctcttcattaatttcttgttggaatttcttatacagcacaatgggagctggaaaccttccacctattacccaagaagaagctttacatattctgggctttcaacctccatttgaagatattaggtttggtcctttcacggggaatacaacacttatgaggtggtttagacaaattaatgaccacttccatgtaaaaggatgctcttatgttctatataagcctcatgggaagaataaaacagcaggagaaactgcttcaggggccctgtcaaagttaacccgtggattgaaagatgaatcgctggcttatatctatcattgccaaaatcattatttttgtccaattggcttcgaagcaacccctgttaaagctaataaagcattcagcaggggacctctctcaccacaggaagttgaatattggatcttaattggagaatcaagtagaaaacatcctgccattcactgtaaaaaatgggcagatattgttactgatctaaacactcaaaatccagaatacctggatatccggcacttagagaggggactgcagtatagaaaaacaaagaaggttgggggaaatttgcattgcatcatagcattccagagacttaactggcaaagatttggcctttggaactttccatttggaaccattagacaagaatcacaacctccaacacatgcccagggaattgccaaatctgagagtgaagacaatatttccaagaagcagcatgggcgtctgggccggtctttcagtgctagtttccatcaggactcggcatggaaaaagatgtctagtatccatgagagaaggaacagtggttaccagggttacagtgattacgatgggaatgattgactatgcttgctactgaacagctggcattatatatgaaactgctatatacaggactgtataaagacagtagaagattttagtaagcctacattaaataggagcagatcttgtggtataaaaaataaccttgtagttctccagatactaagcttgtatatgattatggtgggtgatttcagatatataagcagataagcacagattattgtcctttcaagttaagagtatataatctggacagaaaatttcacaaaattcaataaaattacaactgttgtctaaataagtgaaacacaaattcacttaatagcatcaagatttgaaatacttaagcatgaagtgacttttataatgactcgatccctagacatttgttacagatagttttatgcctaagaccaagatgtaaagtaccatctgcccttaaaaaaaaattggggctgtcaatttctagttttcactcatggttaacacgcatttaaaattatttcatgagtctagtagttctttgatttatagcaggatcttgcttgcctcatttgtttcctggttatgttcttaggattctgactaagaggcaaaagagaaaagactcaagaaactgatcctggagatcgagaccatcctggctaacatggtgaaaccccgtctctactaaacatacaaaaaattagccgggtgtagtggtgggcacctgtagtcctagctactcgagaggctgaggcaggagaatggcgtgaacccgggaggtggagcttgcagtgagcggagatcgcgccactgcactccagcctgggcgacagggcaagactctgtctcaaaaaaaaaaaaaaaaaaaagacggatccttttttttggtgcaaatgggtgacttagtgcattgattcagatttttaaaatttcttgatgtggtttgtaataatcaaatattgacaagaaccttaggtctcgaaagacttttataggtctagatgacgtttgccttaggggtaaagtaaaagaacaattggcaccttaagtttctatacccaaggttatctgtgaaatgagatctcctgatatttgattgctttctcagtatggagtcatatgttgataacagtactgaagatgcataagaaatgcccaagtcactcagaggacaactacccatattccagactctgagctgtttcctttttaaaaatcatatagacaattagctgtttgaagtgagtattaaatatttcagaagtgtgaatttcatgtatttgagctcctctagttgctgtcggtttttcttctgctgccaacctgtgactcacaaatgactaggatctcttgttctttaattttagggtcttgttccaggactcaaatcagtaacttggtgattacaaggtgctgaatgtgttggtaaccatatcgcaatacacctcaaggaaaaggttcagatttttatttttaaaatattttcatttttttcttgaattttatatccgtttgttcactcgtacatgcctagcctacagaaggggatatatattatgaaatggtcatttttctgaagagaatattttgcttgaaatgcaaaggactgaaagagatttgtaggttgttgattttgttacttcatactggaacttttaaaaagatttcatcaaataaagttttgttttctacttttaaaaatatgaatgtttttaaacctttgttttaggtagaaggtaccattgtgtctttgaagtacatgataatttgtcaattctgctcaactggtacattgtaagaaaccatcttgagccttttataattaatgaaacaatatgcattatgatgactgtaattttagatttctaatttaataggaaatagaaaatttgattcttttattagcttgaaccaaatgaagttgtcatctttgtaggtcaaaaatggttgaatattagcaatttcatacagttcaactgaatatttcagagaagacgtaggtaggaagaaccaagaggaaaggagaaaaatgc

SEQ ID NO: 428039 - DNA, 3079 bp, Homo sapiens
ctgccaggattttaccacctctcgcccatttatttacttctcggtcaccgctttcgggggacagataaacaccacagatgcccatcaaaggggcgcacgggtctggaggcgcagctcaggtttttgcgttggtcaccctgccctccgcacgtggagagggcaggcataaagcaccttgaaaggaaggtgctgtcaatgctatccgacgacctgtcgccgggcaccgcagcatcctcgctcgctccgatgggacgagggacgccggccccagggtaacaggaggcgcctcgccggccgcgcgctggatgctgtgatccaggtccggagccgggttccgccgcggccgcagcgacccgaccccacccgacaggccagaggcaatgcaaagaaacaagtttccaagagaaaaacttcagataaaaagggaagatatcagaaggaatgtcctcagcattctcctcttgaagatattaaacagcggaaagtattagacctcagacgatggtactgcataagccgaccacagtataagacttcttgtggcatctcttcattaatttcttgttggaatttcttatacagcacaatgggagctggaaaccttccacctattacccaagaagaagctttacatattctgggctttcaacctccatttgaagatattaggtttggtcctttcacggggaatacaacacttatgaggtggtttagacaaattaatgaccacttccatgtaaaaggatgctcttatgttctatataagcctcatgggaagaataaaacagcaggagaaactgcttcaggggccctgtcaaagttaacccgtggattgaaagatgaatcgctggcttatatctatcattgccaaaatcattatttttgtccaattggcttcgaagcaacccctgttaaagctaataaagcattcagcaggggacctctctcaccacaggaagttgaatattggatcttaattggagaatcaagtagaaaacatcctgccattcactgtaaaaaatgggcagatattgttactgatctaaacactcaaaatccagaatacctggatatccggcacttagagaggggactgcagtatagaaaaacaaagaaggttgggggaaatttgcattgcatcatagcattccagagacttaactggcaaagatttggcctttggaactttccatttggaaccattagacaagaatcacaacctccaacacatgcccagggaattgccaaatctgagagtgaagacaatatttccaagaagcagcatgggcgtctgggccggtctttcagtgctagtttccatcaggactcggcatggaaaaagatgtctagtatccatgagagaaggaacagtggttaccagggttacagtgattacgatgggaatgattgactatgcttgctactgaacagctggcattatatatgaaactgctatatacaggactgtataaagacagtagaagattttagtaagcctacattaaataggagcagatcttgtggtataaaaaataaccttgtagttctccagatactaagcttgtatatgattatggtgggtgatttcagatatataagcagataagcacagattattgtcctttcaagttaagagtatataatctggacagaaaatttcacaaaattcaataaaattacaactgttgtctaaataagtgaaacacaaattcacttaatagcatcaagatttgaaatacttaagcatgaagtgacttttataatgactcgatccctagacatttgttacagatagttttatgcctaagaccaagatgtaaagtaccatctgcccttaaaaaaaaattggggctgtcaatttctagttttcactcatggttaacacgcatttaaaattatttcatgagtctagtagttctttgatttatagcaggatcttgcttgcctcatttgtttcctggttatgttcttaggattctgactaagaggcaaaagagaaaagactcaagaaactgatcctggagatcgagaccatcctggctaacatggtgaaaccccgtctctactaaacatacaaaaaattagccgggtgtagtggtgggcacctgtagtcctagctactcgagaggctgaggcaggagaatggcgtgaacccgggaggtggagcttgcagtgagcggagatcgcgccactgcactccagcctgggcgacagggcaagactctgtctcaaaaaaaaaaaaaaaaaaaagacggatccttttttttggtgcaaatgggtgacttagtgcattgattcagatttttaaaatttcttgatgtggtttgtaataatcaaatattgacaagaaccttaggtctcgaaagacttttataggtctagatgacgtttgccttaggggtaaagtaaaagaacaattggcaccttaagtttctatacccaaggttatctgtgaaatgagatctcctgatatttgattgctttctcagtatggagtcatatgttgataacagtactgaagatgcataagaaatgcccaagtcactcagaggacaactacccatattccagactctgagctgtttcctttttaaaaatcatatagacaattagctgtttgaagtgagtattaaatatttcagaagtgtgaatttcatgtatttgagctcctctagttgctgtcggtttttcttctgctgccaacctgtgactcacaaatgactaggatctcttgttctttaattttagggtcttgttccaggactcaaatcagtaacttggtgattacaaggtgctgaatgtgttggtaaccatatcgcaatacacctcaaggaaaaggttcagatttttatttttaaaatattttcatttttttcttgaattttatatccgtttgttcactcgtacatgcctagcctacagaaggggatatatattatgaaatggtcatttttctgaagagaatattttgcttgaaatgcaaaggactgaaagagatttgtaggttgttgattttgttacttcatactggaacttttaaaaagatttcatcaaataaagttttgttttctacttttaa

SEQ ID NO: 428040 - DNA, 1770 bp, Homo sapiens
ctgccaggattttaccacctctcgcccatttatttacttctcggtcaccgctttcgggggacagataaacaccacagatgcccatcaaaggggcgcacgggtctggaggcgcagctcaggtttttgcgttggtcaccctgccctccgcacgtggagagggcaggcataaagcaccttgaaaggaaggtgctgtcaatgctatccgacgacctgtcgccgggcaccgcagcatcctcgctcgctccgatgggacgagggacgccggccccagggtaacaggaggcgcctcgccggccgcgcgctggatgctgtgatccaggaatcagtttagacttgaaattcagtttttcctgaaactgatcagaagttagtgacaccttgattggatccgtttttctgtcaggagctcattttgcagctctcaagcttttatagcatgctgtaaacaattgtcaaagttgtttatcaagaaacagatagagttgcaacttgtttctagtaatagaaacttttacactgcattcaatgcctaacgttgcagaaacagaaaggtcaaatgattctggaaatggtgagcacaaatctgagagaaagtcacctgaagagaatctacaaggtgctgtaaaatctttctgcacaagtgcctcaggagcacccttgggtcccaaaggagatggtcattatccatggagttgtccagtgactcatacacgggaaaaaatttatgccatctgttcggactatgcctttctcaaccaggcgacctcaatctataaaactccaaatccatcccgctctccttgcctccctgatagtacctctttatctgctggaaataattcatcaagatacattggtatcccgactagtacatcggaaattatctacaatgaagaaaatagcttggaaaacttatccaacagcctgggcaagctacctctcgcatgggaaattgataaatctgaatttgatggggtgaccacaaattcgaaacacaaatcaggcaatgcaaagaaacaagtttccaagagaaaaacttcagataaaaagggaagatatcagaaggaatgtcctcagcattctcctcttgaagatattaaacagcggaaagtattagacctcagacgatggtgatgttatcagtttttatttttttcatttttgaaatatgtaatatatgttggcaataacgtagcagtttacaaattaacacattatatgtatcataaatatttttatttctaaaattattaccaggatttctgaatatttaaagtcaccacaaatgtttgaagtagattaataatgagttatgctggtctttcccaaactcggcttattattagagtcatctgtgtgactccacgtaactgccatgtagatttaacaatgattaaccttttgatgtagttaaatacttagcttttcattgctgaagaattttcaagtaagtgactgatttttattatatttcatctcaagttacctaagtatgcatctctaaaaaatgacttttttctacttaaccacaatacttttgtcatacttaataagattaacgatatttccctagtgtctaattcccaggctaaattcacgtttcccagattgttctgaaaaggtcttcacatctgtttgttcaaagtgggacccagttgtgaaccacatgtttgcttgtcatgacccataattctctcaatctaggtcagtctccaccccactttcccccttgtcttttaaaaattctattattttaatcgacaaatgaga

SEQ ID NO: 428041 - DNA, 4824 bp, Homo sapiens
ggtccctgagcctccagttctgcgtcggtttcaaggctcctccctcctggtgaaagacagactacggggcgcctggaaaccggtccgagggcgcgcgaggcagaggagagggagcgagttgagggattgacacaaatggtcaggcggcggcggcggagaaggaggcggaggcgcaggggggagccgagcccgctgggctgcggagagttgcgctctctacggggccgcggccactagcgcggcgccgccagccgggagccagcgagccgagggccaggaaggcgggacacgaccccggcgcgccctagccacccgggttctccccgccgcccgcgcttcatgaatcgcaagtttccgcggcggcggcggctgcggtacgcagaacaggagccgggggagcgggccgaaagcggcttgggctcgacggagggcacccgcgcagaggtctccctggccgcagggggagccgccgccggccgtgcccctggcagccccagcggagcggcgccaagagaggagccgagaaagtatggctgaggaggaggcgcctaagaagtcccgggccgccggcggtggcgcgagctgggaactttgtgccggggcgctctcggcccggctggcggaggagggcagcggggacgccggtggccgccgccgcccgccagttgacccccggcgattggcgcgccagctgctgctgctgctttggctgctggaggctccgctgctgctgggggtccgggcccaggcggcgggccaggggccaggccaggggcccgggccggggcagcaaccgccgccgccgcctcagcagcaacagagcgggcagcagtacaacggcgagcggggcatctccgtcccggaccacggctattgccagcccatctccatcccgctgtgcacggacatcgcgtacaaccagaccatcatgcccaacctgctgggccacacgaaccaggaggacgcgggcctggaggtgcaccagttctaccctctagtgaaagtgcagtgttccgctgagctcaagttcttcctgtgctccatgtacgcgcccgtgtgcaccgtgctagagcaggcgctgccgccctgccgctccctgtgcgagcgcgcgcgccagggctgcgaggcgctcatgaacaagttcggcttccagtggccagacacgctcaagtgtgagaagttcccggtgcacggcgccggcgagctgtgcgtgggccagaacacgtccgacaagggcaccccgacgccctcgctgcttccagagttctggaccagcaaccctcagcacggcggcggagggcaccgtggcggcttcccggggggcgccggcgcgtcggagcgaggcaagttctcctgcccgcgcgccctcaaggtgccctcctacctcaactaccacttcctgggggagaaggactgcggcgcaccttgtgagccgaccaaggtgtatgggctcatgtacttcgggcccgaggagctgcgcttctcgcgcacctggattggcatttggtcagtgctgtgctgcgcctccacgctcttcacggtgcttacgtacctggtggacatgcggcgcttcagctacccggagcggcccatcatcttcttgtccggctgttacacggccgtggccgtggcctacatcgccggcttcctcctggaagaccgagtggtgtgtaatgacaagttcgccgaggacggggcacgcactgtggcgcagggcaccaagaaggagggctgcaccatcctcttcatgatgctctacttcttcagcatggccagctccatctggtgggtgatcctgtcgctcacctggttcctggcggctggcatgaagtggggccacgaggccatcgaagccaactcacagtattttcacctggccgcctgggctgtgccggccatcaagaccatcaccatcctggcgctgggccaggtggacggcgatgtgctgagcggagtgtgcttcgtggggcttaacaacgtggacgcgctgcgtggcttcgtgctggcgcccctcttcgtgtacctgtttatcggcacgtcctttctgctggccggctttgtgtcgctcttccgcatccgcaccatcatgaagcacgatggcaccaagaccgagaagctggagaagctcatggtgcgcattggcgtcttcagcgtgctgtacactgtgccagccaccatcgtcatcgcctgctacttctacgagcaggccttccgggaccagtgggaacgcagctgggtggcccagagctgcaagagctacgctatcccctgccctcacctccaggcgggcggaggcgccccgccgcacccgcccatgagcccggacttcacggtcttcatgattaagtaccttatgacgctgatcgtgggcatcacgtcgggcttctggatctggtccggcaagaccctcaactcctggaggaagttctacacgaggctcaccaacagcaaacaaggggagactacagtctgagacccggggctcagcccatgcccaggcctcggccggggcgcagcgatcccccaaagccagcgccgtggagttcgtgccaatcctgacatctcgaggtttcctcactagacaactctctttcgcaggctcctttgaacaactcagctcctgcaaaagcttccgtccctgaggcaaaaggacacgagggcccgactgccagagggaggatggacagacctcttgccctcacactctggtaccaggactgttcgcttttatgattgtaaatagcctgtgtaagatttttgtaagtatatttgtatttaaatgacgaccgatcacgcgtttttctttttcaaaagtttttaattatttagggcggtttaaccatttgaggcttttccttcttgcccttttcggagtattgcaaaggagctaaaactggtgtgcaaccgcacagcgctcctggtcgtcctcgcgcgcctctccctaccacgggtgctcgggacggctgggcgccagctccggggcgagttcagcactgcggggtgcgactagggctgcgctgccagggtcacttcccgcctcctccttttgccccctccccctccttctgtcccctccctttctttcctggcttgaggtaggggctcttaaggtacagaactccacaaaccttccaaatctggaggagggcccccatacattacaattcctcccttgctcggcggtggattgcgaaggcccgtcccttcgacttcctgaagctggatttttaactgtccagaactttcctccaacttcatgggggcccacgggtgtgggcgctggcagtctcagcctccctccacggtcaccttcaacgcccagacactcccttctcccaccttagttggttacagggtgagtgagataaccaatgccaaactttttgaagtctaatttttgaggggtgagctcatttcattctctagtgtctaaaacctggtatgggtttggccagcgtcatggaaagatgtggttactgagatttgggaagaagcatgaagctttgtgtgggttggaagagactgaagatatgggttataaaatgttaattctaattgcatacggatgcctggcaaccttgcctttgagaatgagacagcctgcgcttagattttaccggtctgtaaaatggaaatgttgaggtcacctggaaagctttgttaaggagttgatgtttgctttccttaacaagacagcaaaacgtaaacagaaattgaaaacttgaaggatatttcagtgtcatggacttcctcaaaatgaagtgctattttcttatttttaatcaaataactagacatatatcagaaactttaaaatgtaaaagttgtacactttcaacattttattacgattattattcagcagcacattctgaggggggaacaattcacaccaccaataataacctggtaagatttcaggaggtaaagaaggtggaataattgacggggagatagcgcctgaaataaacaaaatatgggcatgcatgctaaagggaaaatgtgtgcaggtctactgcattaaatcctgtgtgctcctcttttggatttacagaaatgtgtcaaatgtaaatctttcaaagccatttaaaaatattcactttagttctctgtgaagaagaggagaaaagcaatcctcctgattgtattgttttaaactttaagaatttatcaaaatgccggtacttaggacctaaatttatctatgtctgtcatacgctaaaatgatattggtctttgaatttggtatacatttattctgttcactatcacaaaatcatctatatttatagaggaatagaagtttatatatatataataccatatttttaatttcacaaataaaaaattcaaagttttgtacaaaattatatggattttgtgcctgaaaataatagagcttgagctgtctgaactattttacattttatggtgtctcatagccaatcccacagtgtaaaaattcaggaattcaatgaaaaaagtctacccttaaaccctcagatcagtctttccaaagaattactctgtttgcattgttgtgattgacatttgtgaagtcccaagaaaagatctgttttcatgacagtagaaaatagaagtttgcaaattatttctttactcaaagaggattaaaagagaactctaattttaatattaaagctttcttttctttcagggaataaatttacatgactttttatattatggaggtttatttttaaatcatcacctttctcatattttttagaggtattgtcttatctcttccataatcttggatattacaaaaccctaaataggcaatcaataaatggttaactg

SEQ ID NO: 428042 - DNA, 4750 bp, Homo sapiens
ggtccctgagcctccagttctgcgtcggtttcaaggctcctccctcctggtgaaagacagactacggggcgcctggaaaccggtccgagggcgcgcgaggcagaggagagggagcgagttgagggattgacacaaatggtcaggcggcggcggcggagaaggaggcggaggcgcaggggggagccgagcccgctgggctgcggagagttgcgctctctacggggccgcggccactagcgcggcgccgccagccgggagccagcgagccgagggccaggaaggcgggacacgaccccggcgcgccctagccacccgggttctccccgccgcccgcgcttcatgaatcgcaagtttccgcggcggcggcggctgcggtacgcagaacaggagccgggggagcgggccgaaagcggcttgggctcgacggagggcacccgcgcagaggtctccctggccgcagggggagccgccgccggccgtgcccctggcagccccagcggagcggcgccaagagaggagccgagaaagtatggctgaggaggaggcgcctaagaagtcccgggccgccggcggtggcgcgagctgggaactttgtgccggggcgctctcggcccggctggcggaggagggcagcggggacgccggtggccgccgccgcccgccagttgacccccggcgattggcgcgccagctgctgctgctgctttggctgctggaggctccgctgctgctgggggtccgggcccaggcggcgggccaggggccaggccaggggcccgggccggggcagcaaccgccgccgccgcctcagcagcaacagagcgggcagcagtacaacggcgagcggggcatctccgtcccggaccacggctattgccagcccatctccatcccgctgtgcacggacatcgcgtacaaccagaccatcatgcccaacctgctgggccacacgaaccaggaggacgcgggcctggaggtgcaccagttctaccctctagtgaaagtgcagtgttccgctgagctcaagttcttcctgtgctccatgtacgcgcccgtgtgcaccgtgctagagcaggcgctgccgccctgccgctccctgtgcgagcgcgcgcgccagggctgcgaggcgctcatgaacaagttcggcttccagtggccagacacgctcaagtgtgagaagttcccggtgcacggcgccggcgagctgtgcgtgggccagaacacgtccgacaagggcaccccgacgccctcgctgcttccagagttctggaccagcaaccctcagcacggcggcggagggcaccgtggcggcttcccggggggcgccggcgcgtcggagcgaggcaagttctcctgcccgcgcgccctcaaggtgccctcctacctcaactaccacttcctgggggagaaggactgcggcgcaccttgtgagccgaccaaggtgtatgggctcatgtacttcgggcccgaggagctgcgcttctcgcgcacctggattggcatttggtcagtgctgtgctgcgcctccacgctcttcacggtgcttacgtacctggtggacatgcggcgcttcagctacccggagcggcccatcatcttcttgtccggctgttacacggccgtggccgtggcctacatcgccggcttcctcctggaagaccgagtggtgtgtaatgacaagttcgccgaggacggggcacgcactgtggcgcagggcaccaagaaggagggctgcaccatcctcttcatgatgctctacttcttcagcatggccagctccatctggtgggtgatcctgtcgctcacctggttcctggcggctggcatgaagtggggccacgaggccatcgaagccaactcacagtattttcacctggccgcctgggctgtgccggccatcaagaccatcaccatcctggcgctgggccaggtggacggcgatgtgctgagcggagtgtgcttcgtggggcttaacaacgtggacgcgctgcgtggcttcgtgctggcgcccctcttcgtgtacctgtttatcggcacgtcctttctgctggccggctttgtgtcgctcttccgcatccgcaccatcatgaagcacgatggcaccaagaccgagaagctggagaagctcatggtgcgcattggcgtcttcagcgtgctgtacactgtgccagccaccatcgtcatcgcctgctacttctacgagcaggccttccgggaccagtgggaacgcagctgggtggcccagagctgcaagagctacgctatcccctgccctcacctccaggcgggcggaggcgccccgccgcacccgcccatgagcccggacttcacggtcttcatgattaagtaccttatgacgctgatcgtgggcatcacgtcgggcttctggatctggtccggcaagaccctcaactcctggaggaagttctacacgaggctcaccaacagcaaacaaggggagactacagtctgagacccggggctcagcccatgcccaggcctcggccggggcgcagcgatcccccaaagccagcgccgtggagttcgtgccaatcctgacatctcgaggtttcctcactagacaactctctttcgcaggctcctttgaacaactcagctcctgcaaaagcttccgtccctgaggcaaaaggacacgagggcccgactgccagagggaggatggacagacctcttgccctcacactctggtaccaggactgttcgcttttatgattgtaaatagcctgtgtaagatttttgtaagtatatttgtatttaaatgacgaccgatcacgcgtttttctttttcaaaagtttttaattatttagggcggtttaaccatttgaggcttttccttcttgcccttttcggagtattgcaaaggagctaaaactggtgtgcaaccgcacagcgctcctggtcgtcctcgcgcgcctctccctaccacgggtgctcgggacggctgggcgccagctccggggcgagttcagcactgcggggtgcgactagggctgcgctgccagggtcacttcccgcctcctccttttgccccctccccctccttctgtcccggcccccatacattacaattcctcccttgctcggcggtggattgcgaaggcccgtcccttcgacttcctgaagctggatttttaactgtccagaactttcctccaacttcatgggggcccacgggtgtgggcgctggcagtctcagcctccctccacggtcaccttcaacgcccagacactcccttctcccaccttagttggttacagggtgagtgagataaccaatgccaaactttttgaagtctaatttttgaggggtgagctcatttcattctctagtgtctaaaacctggtatgggtttggccagcgtcatggaaagatgtggttactgagatttgggaagaagcatgaagctttgtgtgggttggaagagactgaagatatgggttataaaatgttaattctaattgcatacggatgcctggcaaccttgcctttgagaatgagacagcctgcgcttagattttaccggtctgtaaaatggaaatgttgaggtcacctggaaagctttgttaaggagttgatgtttgctttccttaacaagacagcaaaacgtaaacagaaattgaaaacttgaaggatatttcagtgtcatggacttcctcaaaatgaagtgctattttcttatttttaatcaaataactagacatatatcagaaactttaaaatgtaaaagttgtacactttcaacattttattacgattattattcagcagcacattctgaggggggaacaattcacaccaccaataataacctggtaagatttcaggaggtaaagaaggtggaataattgacggggagatagcgcctgaaataaacaaaatatgggcatgcatgctaaagggaaaatgtgtgcaggtctactgcattaaatcctgtgtgctcctcttttggatttacagaaatgtgtcaaatgtaaatctttcaaagccatttaaaaatattcactttagttctctgtgaagaagaggagaaaagcaatcctcctgattgtattgttttaaactttaagaatttatcaaaatgccggtacttaggacctaaatttatctatgtctgtcatacgctaaaatgatattggtctttgaatttggtatacatttattctgttcactatcacaaaatcatctatatttatagaggaatagaagtttatatatatataataccatatttttaatttcacaaataaaaaattcaaagttttgtacaaaattatatggattttgtgcctgaaaataatagagcttgagctgtctgaactattttacattttatggtgtctcatagccaatcccacagtgtaaaaattcaggaattcaatgaaaaaagtctacccttaaaccctcagatcagtctttccaaagaattactctgtttgcattgttgtgattgacatttgtgaagtcccaagaaaagatctgttttcatgacagtagaaaatagaagtttgcaaattatttctttactcaaagaggattaaaagagaactctaattttaatattaaagctttcttttctttcagggaataaatttacatgactttttatattatggaggtttatttttaaatcatcacctttctcatattttttagaggtattgtcttatctcttccataatcttggatattacaaaaccctaaataggcaatcaataaatggttaactg

SEQ ID NO: 428043 - DNA, 4671 bp, Homo sapiens
ggtccctgagcctccagttctgcgtcggtttcaaggctcctccctcctggtgaaagacagactacggggcgcctggaaaccggtccgagggcgcgcgaggcagaggagagggagcgagttgagggattgacacaaatggtcaggcggcggcggcggagaaggaggcggaggcgcaggggggagccgagcccgctgggctgcggagagttgcgctctctacggggccgcggccactagcgcggcgccgccagccgggagccagcgagccgagggccaggaaggcgggacacgaccccggcgcgccctagccacccgggttctccccgccgcccgcgcttcatgaatcgcaagtttccgcggcggcggcggctgcggtacgcagaacaggagccgggggagcgggccgaaagcggcttgggctcgacggagggcacccgcgcagaggtctccctggccgcagggggagccgccgccggccgtgcccctggcagccccagcggagcggcgccaagagaggagccgagaaagtatggctgaggaggaggcgcctaagaagtcccgggccgccggcggtggcgcgagctgggaactttgtgccggggcgctctcggcccggctggcggaggagggcagcggggacgccggtggccgccgccgcccgccagttgacccccggcgattggcgcgccagctgctgctgctgctttggctgctggaggctccgctgctgctgggggtccgggcccaggcggcgggccaggggccaggccaggggcccgggccggggcagcaaccgccgccgccgcctcagcagcaacagagcgggcagcagtacaacggcgagcggggcatctccgtcccggaccacggctattgccagcccatctccatcccgctgtgcacggacatcgcgtacaaccagaccatcatgcccaacctgctgggccacacgaaccaggaggacgcgggcctggaggtgcaccagttctaccctctagtgaaagtgcagtgttccgctgagctcaagttcttcctgtgctccatgtacgcgcccgtgtgcaccgtgctagagcaggcgctgccgccctgccgctccctgtgcgagcgcgcgcgccagggctgcgaggcgctcatgaacaagttcggcttccagtggccagacacgctcaagtgtgagaagttcccggtgcacggcgccggcgagctgtgcgtgggccagaacacgtccgacaagggcaccccgacgccctcgctgcttccagagttctggaccagcaaccctcagcacggcggcggagggcaccgtggcggcttcccggggggcgccggcgcgtcggagcgaggcaagttctcctgcccgcgcgccctcaaggtgccctcctacctcaactaccacttcctgggggagaaggactgcggcgcaccttgtgagccgaccaaggtgtatgggctcatgtacttcgggcccgaggagctgcgcttctcgcgcacctggattggcatttggtcagtgctgtgctgcgcctccacgctcttcacggtgcttacgtacctggtggacatgcggcgcttcagctacccggagcggcccatcatcttcttgtccggctgttacacggccgtggccgtggcctacatcgccggcttcctcctggaagaccgagtggtgtgtaatgacaagttcgccgaggacggggcacgcactgtggcgcagggcaccaagaaggagggctgcaccatcctcttcatgatgctctacttcttcagcatggccagctccatctggtgggtgatcctgtcgctcacctggttcctggcggctggcatgaagtggggccacgaggccatcgaagccaactcacagtattttcacctggccgcctgggctgtgccggccatcaagaccatcaccatcctggcgctgggccaggtggacggcgatgtgctgagcggagtgtgcttcgtggggcttaacaacgtggacgcgctgcgtggcttcgtgctggcgcccctcttcgtgtacctgtttatcggcacgtcctttctgctggccggctttgtgtcgctcttccgcatccgcaccatcatgaagcacgatggcaccaagaccgagaagctggagaagctcatggtgcgcattggcgtcttcagcgtgctgtacactgtgccagccaccatcgtcatcgcctgctacttctacgagcaggccttccgggaccagtgggaacgcagctgggtggcccagagctgcaagagctacgctatcccctgccctcacctccaggcgggcggaggcgccccgccgcacccgcccatgagcccggacttcacggtcttcatgattaagtaccttatgacgctgatcgtgggcatcacgtcgggcttctggatctggtccggcaagaccctcaactcctggaggaagttctacacgaggctcaccaacagcaaacaaggggagactacagtctgagacccggggctcagcccatgcccaggcctcggccggggcgcagcgatcccccaaagccagcgccgtggagttcgtgccaatcctgacatctcgaggtttcctcactagacaactctctttcgcaggctcctttgaacaactcagctcctgcaaaagcttccgtccctgaggcaaaaggacacgagggcccgactgccagagggaggatggacagacctcttgccctcacactctggtaccaggactgttcgcttttatgattgtaaatagcctgtgtaagatttttgtaagtatatttgtatttaaatgacgaccgatcacgcgtttttctttttcaaaagtttttaattatttagggcggtttaaccatttgaggcttttccttcttgcccttttcggagtattgcaaaggagctaaaactggtgtgcaaccgcacagcgctcctggtcgtcctcgcgcgcctctccctaccacgggtgctcgggacggctgggcgccagctccggggcgagttcagcactgcggggtgcgactagggctgcgctgccagggtcacttcccgcctcctccttttgccccctccccctccttctgtcccctccctttctttcctggcttgaggtaggggctcttaaggtacagaactccacaaaccttccaaatctggaggagggcccccatacattacaattcctccactcccttctcccaccttagttggttacagggtgagtgagataaccaatgccaaactttttgaagtctaatttttgaggggtgagctcatttcattctctagtgtctaaaacctggtatgggtttggccagcgtcatggaaagatgtggttactgagatttgggaagaagcatgaagctttgtgtgggttggaagagactgaagatatgggttataaaatgttaattctaattgcatacggatgcctggcaaccttgcctttgagaatgagacagcctgcgcttagattttaccggtctgtaaaatggaaatgttgaggtcacctggaaagctttgttaaggagttgatgtttgctttccttaacaagacagcaaaacgtaaacagaaattgaaaacttgaaggatatttcagtgtcatggacttcctcaaaatgaagtgctattttcttatttttaatcaaataactagacatatatcagaaactttaaaatgtaaaagttgtacactttcaacattttattacgattattattcagcagcacattctgaggggggaacaattcacaccaccaataataacctggtaagatttcaggaggtaaagaaggtggaataattgacggggagatagcgcctgaaataaacaaaatatgggcatgcatgctaaagggaaaatgtgtgcaggtctactgcattaaatcctgtgtgctcctcttttggatttacagaaatgtgtcaaatgtaaatctttcaaagccatttaaaaatattcactttagttctctgtgaagaagaggagaaaagcaatcctcctgattgtattgttttaaactttaagaatttatcaaaatgccggtacttaggacctaaatttatctatgtctgtcatacgctaaaatgatattggtctttgaatttggtatacatttattctgttcactatcacaaaatcatctatatttatagaggaatagaagtttatatatatataataccatatttttaatttcacaaataaaaaattcaaagttttgtacaaaattatatggattttgtgcctgaaaataatagagcttgagctgtctgaactattttacattttatggtgtctcatagccaatcccacagtgtaaaaattcaggaattcaatgaaaaaagtctacccttaaaccctcagatcagtctttccaaagaattactctgtttgcattgttgtgattgacatttgtgaagtcccaagaaaagatctgttttcatgacagtagaaaatagaagtttgcaaattatttctttactcaaagaggattaaaagagaactctaattttaatattaaagctttcttttctttcagggaataaatttacatgactttttatattatggaggtttatttttaaatcatcacctttctcatattttttagaggtattgtcttatctcttccataatcttggatattacaaaaccctaaataggcaatcaataaatggttaactg

SEQ ID NO: 428044 - DNA, 4552 bp, Homo sapiens
ggtccctgagcctccagttctgcgtcggtttcaaggctcctccctcctggtgaaagacagactacggggcgcctggaaaccggtccgagggcgcgcgaggcagaggagagggagcgagttgagggattgacacaaatggtcaggcggcggcggcggagaaggaggcggaggcgcaggggggagccgagcccgctgggctgcggagagttgcgctctctacggggccgcggccactagcgcggcgccgccagccgggagccagcgagccgagggccaggaaggcgggacacgaccccggcgcgccctagccacccgggttctccccgccgcccgcgcttcatgaatcgcaagtttccgcggcggcggcggctgcggtacgcagaacaggagccgggggagcgggccgaaagcggcttgggctcgacggagggcacccgcgcagaggtctccctggccgcagggggagccgccgccggccgtgcccctggcagccccagcggagcggcgccaagagaggagccgagaaagtatggctgaggaggaggcgcctaagaagtcccgggccgccggcggtggcgcgagctgggaactttgtgccggggcgctctcggcccggctggcggaggagggcagcggggacgccggtggccgccgccgcccgccagttgacccccggcgattggcgcgccagctgctgctgctgctttggctgctggaggctccgctgctgctgggggtccgggcccaggcggcgggccaggggccaggccaggggcccgggccggggcagcaaccgccgccgccgcctcagcagcaacagagcgggcagcagtacaacggcgagcggggcatctccgtcccggaccacggctattgccagcccatctccatcccgctgtgcacggacatcgcgtacaaccagaccatcatgcccaacctgctgggccacacgaaccaggaggacgcgggcctggaggtgcaccagttctaccctctagtgaaagtgcagtgttccgctgagctcaagttcttcctgtgctccatgtacgcgcccgtgtgcaccgtgctagagcaggcgctgccgccctgccgctccctgtgcgagcgcgcgcgccagggctgcgaggcgctcatgaacaagttcggcttccagtggccagacacgctcaagtgtgagaagttcccggtgcacggcgccggcgagctgtgcgtgggccagaacacgtccgacaagggcaccccgacgccctcgctgcttccagagttctggaccagcaaccctcagcacggcggcggagggcaccgtggcggcttcccggggggcgccggcgcgtcggagcgaggcaagttctcctgcccgcgcgccctcaaggtgccctcctacctcaactaccacttcctgggggagaaggactgcggcgcaccttgtgagccgaccaaggtgtatgggctcatgtacttcgggcccgaggagctgcgcttctcgcgcacctggattggcatttggtcagtgctgtgctgcgcctccacgctcttcacggtgcttacgtacctggtggacatgcggcgcttcagctacccggagcggcccatcatcttcttgtccggctgttacacggccgtggccgtggcctacatcgccggcttcctcctggaagaccgagtggtgtgtaatgacaagttcgccgaggacggggcacgcactgtggcgcagggcaccaagaaggagggctgcaccatcctcttcatgatgctctacttcttcagcatggccagctccatctggtgggtgatcctgtcgctcacctggttcctggcggctggcatgaagtggggccacgaggccatcgaagccaactcacagtattttcacctggccgcctgggctgtgccggccatcaagaccatcaccatcctggcgctgggccaggtggacggcgatgtgctgagcggagtgtgcttcgtggggcttaacaacgtggacgcgctgcgtggcttcgtgctggcgcccctcttcgtgtacctgtttatcggcacgtcctttctgctggccggctttgtgtcgctcttccgcatccgcaccatcatgaagcacgatggcaccaagaccgagaagctggagaagctcatggtgcgcattggcgtcttcagcgtgctgtacactgtgccagccaccatcgtcatcgcctgctacttctacgagcaggccttccgggaccagtgggaacgcagctgggtggcccagagctgcaagagctacgctatcccctgccctcacctccaggcgggcggaggcgccccgccgcacccgcccatgagcccggacttcacggtcttcatgattaagtaccttatgacgctgatcgtgggcatcacgtcgggcttctggatctggtccggcaagaccctcaactcctggaggaagttctacacgaggctcaccaacagcaaacaaggggagactacagtctgagacccggggctcagcccatgcccaggcctcggccggggcgcagcgatcccccaaagccagcgccgtggagttcgtgccaatcctgacatctcgaggtttcctcactagacaactctctttcgcaggctcctttgaacaactcagctcctgcaaaagcttccgtccctgaggcaaaaggacacgagggcccgactgccagagggaggatggacagacctcttgccctcacactctggtaccaggactgttcgcttttatgattgtaaatagcctgtgtaagatttttgtaagtatatttgtatttaaatgacgaccgatcacgcgtttttctttttcaaaagtttttaattatttagggcggtttaaccatttgaggcttttccttcttgcccttttcggagtattgcaaaggagctaaaactggtgtgcaaccgcacagcgctcctggtcgtcctcgcgcgcctctccctaccacgggtgctcgggacggctgggcgccagctccggggcgagttcagcactgcggggtgcgactagggctgcgctgccagggtcacttcccgcctcctccttttgccccctccccctccttctgtcccctccctttctttcctggcttgaggtaggggctcttaaggtacagaactccacaaaccttccaaatctggaggagggcccccatacattacaattcctcccttgctcggcggtggattgcgaaggcccgtcccttcgacttcctgaagctggatttttaactgtccagaactttcctccaacttcatgggggcccacgggtgtgggcgctggcagtctcagcctccctccacggtcaccttcaacgcccagacactcccttctcccaccttagttggttacagggtgagtgagataaccaatgccaaactttttgaagtctaatttttgaggggtgagctcatttcattctctagtgtctaaaacctggtatgggtttggccagcgtcatggaaagatgtggttactgagatttgggaagaagcatgaagctttgtgtgggttggaagagactgaagatatgggttataaaatgttaattctaattgcatacggatgcctggcaaccttgcctttgagaatgagacagcctgcgcttagattttaccggtctgtaaaatggaaatgttgaggtcacctggaaagctttgttaaggagttgatgtttgctttccttaacaagacagcaaaacgtaaacagaaattgaaaacttgaaggatatttcagtgtcatggacttcctcaaaatgaagtgctattttcttatttttaatcaaataactagacatatatcagaaactttaaaatgtaaaagttgtacactttcaacattttattacgattattattcagcagcacattctgaggggggaacaattcacaccaccaataataacctggtaagatttcaggaggtaaagaaggtggaataattgacggggagatagcgcctgaaataaacaaaatatgggcatgcatgctaaagggaaaatgtgtgcaggtctactgcattaaatcctgtgtgctcctcttttggatttacagaaatgtgtcaaatgtaaatctttcaaagccatttaaaaatattcactttagttctctgtgaagaagaggagaaaagcaatcctcctgattgtattgttttaaactttaagaatttatcaaaatgccggtacttaggacctaaatttatctatgtctgtcatacgctaaaatgatattggtctttgaatttggtatacatttattctgttcactatcacaaaatcatctatatttatagaggaatagaagtttatatatatataataccatatttttaatttcacaaataaaaaattcaaagttttgtagaacacaccaacaacccaaaacaacaaatgtggggggggccggggcccagaaaaaggtttttaaaccctcttgtttgggcgccggcccagtgggttagtgcacctgggcccaggcgtggtcccaagggaacctggccggcatggggctggtttccccaaataaaaacgcgggggcaccggcgtttggcaa

SEQ ID NO: 428045 - DNA, 3215 bp, Homo sapiens
ggtccctgagcctccagttctgcgtcggtttcaaggctcctccctcctggtgaaagacagactacggggcgcctggaaaccggtccgagggcgcgcgaggcagaggagagggagcgagttgagggattgacacaaatggtcaggcggcggcggcggagaaggaggcggaggcgcaggggggagccgagcccgctgggctgcggagagttgcgctctctacggggccgcggccactagcgcggcgccgccagccgggagccagcgagccgagggccaggaaggcgggacacgaccccggcgcgccctagccacccgggttctccccgccgcccgcgcttcatgaatcgcaagtttccgcggcggcggcggctgcggtacgcagaacaggagccgggggagcgggccgaaagcggcttgggctcgacggagggcacccgcgcagaggtctccctggccgcagggggagccgccgccggccgtgcccctggcagccccagcggagcggcgccaagagaggagccgagaaagtatggctgaggaggaggcgcctaagaagtcccggccaccatcgtcatcgcctgctacttctacgagcaggccttccgggaccagtgggaacgcagctgggtggcccagagctgcaagagctacgctatcccctgccctcacctccaggcgggcggaggcgccccgccgcacccgcccatgagcccggacttcacggtcttcatgattaagtaccttatgacgctgatcgtgggcatcacgtcgggcttctggatctggtccggcaagaccctcaactcctggaggaagttctacacgaggctcaccaacagcaaacaaggggagactacagtctgagacccggggctcagcccatgcccaggcctcggccggggcgcagcgatcccccaaagccagcgccgtggagttcgtgccaatcctgacatctcgaggtttcctcactagacaactctctttcgcaggctcctttgaacaactcagctcctgcaaaagcttccgtccctgaggcaaaaggacacgagggcccgactgccagagggaggatggacagacctcttgccctcacactctggtaccaggactgttcgcttttatgattgtaaatagcctgtgtaagatttttgtaagtatatttgtatttaaatgacgaccgatcacgcgtttttctttttcaaaagtttttaattatttagggcggtttaaccatttgaggcttttccttcttgcccttttcggagtattgcaaaggagctaaaactggtgtgcaaccgcacagcgctcctggtcgtcctcgcgcgcctctccctaccacgggtgctcgggacggctgggcgccagctccggggcgagttcagcactgcggggtgcgactagggctgcgctgccagggtcacttcccgcctcctccttttgccccctccccctccttctgtcccctccctttctttcctggcttgaggtaggggctcttaaggtacagaactccacaaaccttccaaatctggaggagggcccccatacattacaattcctcccttgctcggcggtggattgcgaaggcccgtcccttcgacttcctgaagctggatttttaactgtccagaactttcctccaacttcatgggggcccacgggtgtgggcgctggcagtctcagcctccctccacggtcaccttcaacgcccagacactcccttctcccaccttagttggttacagggtgagtgagataaccaatgccaaactttttgaagtctaatttttgaggggtgagctcatttcattctctagtgtctaaaacctggtatgggtttggccagcgtcatggaaagatgtggttactgagatttgggaagaagcatgaagctttgtgtgggttggaagagactgaagatatgggttataaaatgttaattctaattgcatacggatgcctggcaaccttgcctttgagaatgagacagcctgcgcttagattttaccggtctgtaaaatggaaatgttgaggtcacctggaaagctttgttaaggagttgatgtttgctttccttaacaagacagcaaaacgtaaacagaaattgaaaacttgaaggatatttcagtgtcatggacttcctcaaaatgaagtgctattttcttatttttaatcaaataactagacatatatcagaaactttaaaatgtaaaagttgtacactttcaacattttattacgattattattcagcagcacattctgaggggggaacaattcacaccaccaataataacctggtaagatttcaggaggtaaagaaggtggaataattgacggggagatagcgcctgaaataaacaaaatatgggcatgcatgctaaagggaaaatgtgtgcaggtctactgcattaaatcctgtgtgctcctcttttggatttacagaaatgtgtcaaatgtaaatctttcaaagccatttaaaaatattcactttagttctctgtgaagaagaggagaaaagcaatcctcctgattgtattgttttaaactttaagaatttatcaaaatgccggtacttaggacctaaatttatctatgtctgtcatacgctaaaatgatattggtctttgaatttggtatacatttattctgttcactatcacaaaatcatctatatttatagaggaatagaagtttatatatatataataccatatttttaatttcacaaataaaaaattcaaagttttgtacaaaattatatggattttgtgcctgaaaataatagagcttgagctgtctgaactattttacattttatggtgtctcatagccaatcccacagtgtaaaaattcaggaattcaatgaaaaaagtctacccttaaaccctcagatcagtctttccaaagaattactctgtttgcattgttgtgattgacatttgtgaagtcccaagaaaagatctgttttcatgacagtagaaaatagaagtttgcaaattatttctttactcaaagaggattaaaagagaactctaattttaatattaaagctttcttttctttcagggaataaatttacatgactttttatattatggaggtttatttttaaatcatcacctttctcatattttttagaggtattgtcttatctcttccataatcttggatattacaaaaccctaaataggcaatcaataaatggttaactg

SEQ ID NO: 428046 - DNA, 2607 bp, Homo sapiens
  misc_feature (1)..(1): n is a, c, g, or t
  misc_feature (37)..(37): n is a, c, g, or t
ncttaaggtacagaactccacaaaccttccaaatctnggaggagggcccccatacattacaattcctcccttgctcggcggtggattgcgaaggcccatgagcccggacttcacggtcttcatgattaagtaccttatgacgctgatcgtgggcatcacgtcgggcttctggatctggtccggcaagaccctcaactcctggaggaagttctacacgaggctcaccaacagcaaacaaggggagactacagtctgagacccggggctcagcccatgcccaggcctcggccggggcgcagcgatcccccaaagccagcgccgtggagttcgtgccaatcctgacatctcgaggtttcctcactagacaactctctttcgcaggctcctttgaacaactcagctcctgcaaaagcttccgtccctgaggcaaaaggacacgagggcccgactgccagagggaggatggacagacctcttgccctcacactctggtaccaggactgttcgcttttatgattgtaaatagcctgtgtaagatttttgtaagtatatttgtatttaaatgacgaccgatcacgcgtttttctttttcaaaagtttttaattatttagggcggtttaaccatttgaggcttttccttcttgcccttttcggagtattgcaaaggagctaaaactggtgtgcaaccgcacagcgctcctggtcgtcctcgcgcgcctctccctaccacgggtgctcgggacggctgggcgccagctccggggcgagttcagcactgcggggtgcgactagggctgcgctgccagggtcacttcccgcctcctccttttgccccctccccctccttctgtcccctccctttctttcctggcttgaggtaggggctcttaaggtacagaactccacaaaccttccaaatctggaggagggcccccatacattacaattcctcccttgctcggcggtggattgcgaaggcccgtcccttcgacttcctgaagctggatttttaactgtccagaactttcctccaacttcatgggggcccacgggtgtgggcgctggcagtctcagcctccctccacggtcaccttcaacgcccagacactcccttctcccaccttagttggttacagggtgagtgagataaccaatgccaaactttttgaagtctaatttttgaggggtgagctcatttcattctctagtgtctaaaacctggtatgggtttggccagcgtcatggaaagatgtggttactgagatttgggaagaagcatgaagctttgtgtgggttggaagagactgaagatatgggttataaaatgttaattctaattgcatacggatgcctggcaaccttgcctttgagaatgagacagcctgcgcttagattttaccggtctgtaaaatggaaatgttgaggtcacctggaaagctttgttaaggagttgatgtttgctttccttaacaagacagcaaaacgtaaacagaaattgaaaacttgaaggatatttcagtgtcatggacttcctcaaaatgaagtgctattttcttatttttaatcaaataactagacatatatcagaaactttaaaatgtaaaagttgtacactttcaacattttattacgattattattcagcagcacattctgaggggggaacaattcacaccaccaataataacctggtaagatttcaggaggtaaagaaggtggaataattgacggggagatagcgcctgaaataaacaaaatatgggcatgcatgctaaagggaaaatgtgtgcaggtctactgcattaaatcctgtgtgctcctcttttggatttacagaaatgtgtcaaatgtaaatctttcaaagccatttaaaaatattcactttagttctctgtgaagaagaggagaaaagcaatcctcctgattgtattgttttaaactttaagaatttatcaaaatgccggtacttaggacctaaatttatctatgtctgtcatacgctaaaatgatattggtctttgaatttggtatacatttattctgttcactatcacaaaatcatctatatttatagaggaatagaagtttatatatatataataccatatttttaatttcacaaataaaaaattcaaagttttgtacaaaattatatggattttgtgcctgaaaataatagagcttgagctgtctgaactattttacattttatggtgtctcatagccaatcccacagtgtaaaaattcaggaattcaatgaaaaaagtctacccttaaaccctcagatcagtctttccaaagaattactctgtttgcattgttgtgattgacatttgtgaagtcccaagaaaagatctgttttcatgacagtagaaaatagaagtttgcaaattatttctttactcaaagaggattaaaagagaactctaattttaatattaaagctttcttttctttcagggaataaatttacatgactttttatattatggaggtttatttttaaatcatcacctttctcatattttttagaggtattgtcttatctcttccataatcttggatattacaaaaccctaaataggcaatcaataaatggttaactg

SEQ ID NO: 428047 - DNA, 3543 bp, Homo sapiens
ggtccctgagcctccagttctgcgtcggtttcaaggctcctccctcctggtgaaagacagactacggggcgcctggaaaccggtccgagggcgcgcgaggcagaggagagggagcgagttgagggattgacacaaatggtcaggcggcggcggcggagaaggaggcggaggcgcaggggggagccgagcccgctgggctgcggagagttgcgctctctacggggccgcggccactagcgcggcgccgccagccgggagccagcgagccgagggccaggaaggcgggacacgaccccggcgcgccctagccacccgggttctccccgccgcccgcgcttcatgaatcgcaagtttccgcggcggcggcggctgcggtacgcagaacaggagccgggggagcgggccgaaagcggcttgggctcgacggagggcacccgcgcagaggtctccctggccgcagggggagccgccgccggccgtgcccctggcagccccagcggagcggcgccaagagaggagccgagaaagtatggctgaggaggaggcgcctaagaagtcccgggccgccggcggtggcgcgagctgggaactttgtgccggggcgctctcggcccggctggcggaggagggcagcggggacgccggtggccgccgccgcccgccagttgacccccggcgattggcgcgccagctgctgctgctgctttggctgctggaggctccgctgctgctgggggtccgggcccaggcggcgggccaggggccaggccaggggcccgggccggggcagcaaccgccgccgccgcctcagcagcaacagagcgggcagcagtacaacggcgagcggggcatctccgtcccggaccacggctattgccagcccatctccatcccgctgtgcacggacatcgcgtacaaccagaccatcatgcccaacctgctgggccacacgaaccaggaggacgcgggcctggaggtgcaccagttctaccctctagtgaaagtgcagtgttccgctgagctcaagttcttcctgtgctccatgtacgcgcccgtgtgcaccgtgctagagcaggcgctgccgccctgccgctccctgtgcgagcgcgcgcgccagggctgcgaggcgctcatgaacaagttcggcttccagtggccagacacgctcaagtgtgagaagttcccggtgcacggcgccggcgagctgtgcgtgggccagaacacgtccgacaagggcaccccgacgccctcgctgcttccagagttctggaccagcaaccctcagcacggcggcggagggcaccgtggcggcttcccggggggcgccggcgcgtcggagcgaggcaagttctcctgcccgcgcgccctcaaggtgccctcctacctcaactaccacttcctgggggagaaggactgcggcgcaccttgtgagccgaccaaggtgtatgggctcatgtacttcgggcccgaggagctgcgcttctcgcgcacctggattggcatttggtcagtgctgtgctgcgcctccacgctcttcacggtgcttacgtacctggtggacatgcggcgcttcagctacccggagcggcccatcatcttcttgtccggctgttacacggccgtggccgtggcctacatcgccggcttcctcctggaagaccgagtggtgtgtaatgacaagttcgccgaggacggggcacgcactgtggcgcagggcaccaagaaggagggctgcaccatcctcttcatgatgctctacttcttcagcatggccagctccatctggtgggtgatcctgtcgctcacctggttcctggcggctggcatgaagtggggccacgaggccatcgaagccaactcacagtattttcacctggccgcctgggctgtgccggccatcaagaccatcaccatcctggcgctgggccaggtggacggcgatgtgctgagcggagtgtgcttcgtggggcttaacaacgtggacgcgctgcgtggcttcgtgctggcgcccctcttcgtgtacctgtttatcggcacgtcctttctgctggccggctttgtgtcgctcttccgcatccgcaccatcatgaagcacgatggcaccaagaccgagaagctggagaagctcatggtgcgcattggcgtcttcagcgtgctgtacactgtgccagccaccatcgtcatcgcctgctacttctacgagcaggccttccgggaccagtgggaacgcagctgggtggcccagagctgcaagagctacgctatcccctgccctcacctccaggcgggcggaggcgccccgccgcacccgcccatgagcccggacttcacggtcttcatgattaagtaccttatgacgctgatcgtgggcatcacgtcgggcttctggatctggtccggcaagaccctcaactcctggaggaagttctacacgaggctcaccaacagcaaacaaggggagactacagtctgagacccggggctcagcccatgcccaggcctcggccggggcgcagcgatcccccaaagccagcgccgtggagttcgtgccaatcctgacatctcgaggtttcctcactagacaactctctttcgcaggctcctttgaacaactcagctcctgcaaaagcttccgtccctgaggcaaaaggacacgagggcccgactgccagagggaggatggacagacctcttgccctcacactctggtaccaggactgttcgcttttatgattgtaaatagcctgtgtaagatttttgtaagtatatttgtatttaaatgacgaccgatcacgcgtttttctttttcaaaagtttttaattatttagggcggtttaaccatttgaggcttttccttcttgcccttttcggagtattgcaaaggagctaaaactggtgtgcaaccgcacagcgctcctggtcgtcctcgcgcgcctctccctaccacgggtgctcgggacggctgggcgccagctccggggcgagttcagcactgcggggtgcgactagggctgcgctgccagggtcacttcccgcctcctccttttgccccctccccctccttctgtcccctccctttctttcctggcttgaggtaggggctcttaaggtacagaactccacaaaccttccaaatctggaggagggcccccatacattacaattcctcccttgctcggcggtggattgcgaaggcccgtcccttcgacttcctgaagctggatttttaactgtccagaactttcctccaacttcatgggggcccacgggtgtgggcgctggcagtctcagcctccctccacggtcaccttcaacgcccagacagcttccactttgcaggtagtcaacctcccctatctcctaccccgcacccagtagttaccagtctgacctgggttctcatcccgttgtgctaccagttgcacactacagctaccctcttgcatgccggccctaacaatatcctctctgcccgcgcgtaaacccatctccttcatgcaccggtcctaaaaaacagatgcacgttccccgagggaaccggg

SEQ ID NO: 428048 - DNA, 578 bp, Homo sapiens
atcatctatatttatagaggaatagaagtttatatatatataataccatatttttaatttcacaaataaaaaattcaaagttttgtacaaaattatatggattttgtgcctgaaaataatagagcttgagctgtctgaactattttacattttatggtgtctcatagccaatcccacagtgtaaaaattcaggaattcaatgaaaaaagtctacccttaaaccctcagatcagtctttccaaagaattactctgtttgcattgttgtgattgacatttgtgaagtcccaagaaaagatctgttttcatgacagtagaaaatagaagtttgcaaattatttctttactcaaagaggattaaaagagaactctaattttaatattaaagctttcttttctttcagggaataaatttacatgactttttatattatggaggtttatttttaaatcatcacctttctcatattttttagaggtattgtcttatctcttccataatcttggatattacaaaaccctaaataggcaatcaataaatggttaactggctatgtgttcataaacattttaaacagc

SEQ ID NO: 428049 - DNA, 3684 bp, Homo sapiens
ggtccccggctgcccgcagcccgctcgcggcgcttctccggcccggctccttctccgctcgttaacgtcgccaaccccccccacccctcatatctctctccacccacccaaccgccccccgctccttctcgccgcctcgagtccgcttgggggaaaacttcaaagagccggatcgcaggctccctgcctactcccccaccggggatttcagactagacgcttgaagcaaagctgccatcccagaagacgacatgctctcagcaacccccctgtatgggaacgttcacagctggatgaacagcgagagggtccgcatgtgtggggcgagcgaagacaggaaaatccttgtaaatgatggtgacgcttcaaaagccagactggaactgagggaagagaatcccttgaaccacaacgtggtggatgcgagcacggcccataggatcgatggcctggcagcactgagcatggaccgcactggcctgatccgggaagggctgcgggtcccgggaaacatcgtctattctagcttgtgtggactgggctcagagaaaggtcgggaggctgccacaagcactctaggtggccttgggttttcttcggaaagaaatccagagatgcagttcaaaccgaatacacccgagacagtggaggcttctgccgtctctggaaaacccccaaatggcttcagtgctatatacaaaacaccgcctggaatacaaaaaagtgctgtagccacagcagaagcgctgggcttggacaggcctgccagcgacaaacagagccctctcaacatcaatggtgctagttatctgcggctgccctgggtcaatccttacatggagggtgccacgccagccatctaccctttcctcgactcgccaaataagtattcactgaacatgtacaaggccttgctacctcagcagtcctacagcttggcccagccgctgtattctccagtctgcaccaatggggagcgctttctctacctgccgccacctcactacgtcggtccccacatcccatcgtccttggcatcacccatgaggctctcgacaccttcggcctccccagccatcccgcctctcgtccattgcgcagacaaaagcctcccgtggaagatgggcgtcagccctgggaatcctgttgattcccacgcctatcctcacatccagaacagtaagcagcccagggttccctctgccaaggcggtcaccagtggcctgccgggggacacagctctcctgttgcccccctcgcctcggccgtcaccccgagtccaccttcccacccagcctgctgcagacacctactcggagttccacaagcactatgccaggatctccacctctccttcagttgccctgtcaaagccatacatgacagttagcagcgagttccccgcggccaggctctccaatggcaagtatcccaaggctccggaagggggcgaaggtgcccagccagtgcccgggcatgcccggaagacagcggttcaagacagaaaagacggcagctcacctcctctgttggagaagcagaccgttaccaaagacgtcacagataagccactagacttgtcttctaaagtggtggatgtagatgcttccaaagctgaccacatgaaaaagatggctcccacggtcctggttcacagcagggctggaagtggcttagtgctctccggaagtgagattccgaaagaaacactatctcctccaggaaatggttgtgctatctatagatctgaaatcatcagcactgctccctcatcctgggtggtgcccgggccaagtcctaacgaagagaacaatggcaaaagcatgtcgctgaaaaacaaggcattggactgggcgataccacagcagcggagttcatcatgcccgcgcatgggcggcaccgatgctgtcatcactaacgtttcagggtcagtgtcgagtgcaggccgcccagcctccgcatcacccgcccccaatgccaatgcagatggcaccaaaaccagcaggagctctgtagaaaccacaccatccgttattcagcacgtgggccagcccccggccactcctgccaagcacagtagcagcaccagcagcaagggcgccaaagccagcaacccagaaccgagtttcaaagcaaacgagaacggccttccaccaagctctatatttctgtctccaaatgaggcattcaggtccccaccaattccctaccccaggagttacctcccttacccagcccctgagggcattgctgtaagtcccctctccttacatggcaaaggacctgtctaccctcacccagttttgttacccaatggcagtctgtttcctgggcaccttgccccaaagcctgggctgccctatgggcttcccaccggccgtccagagtttgtgacctaccaagatgccctggggttgggcatggtgcatcccatgttgataccacacacgcccatagagattactaaagaggagaaaccagagaggagatcccggtcccatgagagagcccgttacgaggacccaaccctccggaatcggttttccgagattttggaaactagcagcaccaagttacatccagatgtccccaccgacaagaacctaaagccgaaccccaactggaatcaagggaagactgttgtcaaaagcgacaagcttgtctacgtagaccttctccgagaagaaccagatgctaaaactgacacaaacgtgtccaaacccagctttgcagcagagagtgttggccagagcgctgagccccccaagccctcagttgagccggccctgcagcagcaccgtgatttcatcgccctgagagaggagttggggcgcatcagtgacttccacgaaacttatactttcaaacagccagtcttcaccgtaagcaaggacagtgttctggcaggtaccaacaaagagaacctagggttgccagtctcgactccattcctggagccacctctggggagcgatggccctgctgtaacttttggtaaaacccaagaggatcccaaaccattttgtgtgggcagtgccccaccaagtgtggatgtgacccccacctataccaaagatggagctgatgaggctgaatcaaatgatggcaaagttctgaaaccgaagccatctaagctggcaaagagaatcgccaactcagcgggttacgtgggtgaccgattcaaatgtgtcactaccgaactgtatgcagattccagtcagctcagccgggagcaacgggcattgcaggtgagcccccccacctgaatttcagttactttaccagttgtcagttttttaatgtgtaaacaggattgggggagtatggtagggcagggcaccaggcagatttggtgaatgaagcttgtggtaatttgaatatatgcaatgtggccagtaagagaacgtgagtggtagcactgaggcgtgtctggatgctttaagttattctgtagattataagggaactccactcaattgctgataaccgatgttttaattattgtgaagggtatctaaagactgcatgacgtttacctatcaattgctttgatttctctgcctgtaagatagcaaatatacctagaagtgctgcttagaatgccttacttgatacctggtagagatgtgtagcagccgcatgtctgtgggattcatgcaaatttttcaccaaaaagaaaggaaa

SEQ ID NO: 428050 - DNA, 462 bp, Homo sapiens
ctccttccctgctcataacatttcctttccttggaaacattgccttctgcagctgtagtatcagtttttgaaccacagtaatgggaagaaagacaaatggattcccttagaagtaagatttctatttgcaggatgagttgggcagggaaaagggtcagggttcatcaggtgaactcaacacaggtaaggagctgttagatctggtggaattcacgaacgaaattcagactctgctgggctcctctgtagagtggctccaccccagtgatctggcctcagacaactactggtgagcaagctggacccaccatgtacagtgtgttatagtgttaatccttgtgcatatgtgtcataatacaactatttctgtaaagaaaggacactattacatatgaaaatatctcttctttatataagagaaattactccagggaaggaggctcagggaaggaggcattgcca

SEQ ID NO: 428051 - DNA, 6297 bp, Homo sapiens
  misc_feature (6285)..(6285): n is a, c, g, or t
ggtccccggctgcccgcagcccgctcgcggcgcttctccggcccggctccttctccgctcgttaacgtcgccaaccccccccacccctcatatctctctccacccacccaaccgccccccgctccttctcgccgcctcgagtccgcttgggggaaaacttcaaagagccggatcgcaggctccctgcctactcccccaccggggatttcagactagacgcttgaagcaaagctgccatcccagaagacgacatgctctcagcaacccccctgtatgggaacgttcacagctggatgaacagcgagagggtccgcatgtgtggggcgagcgaagacaggaaaatccttgtaaatgatggtgacgcttcaaaagccagactggaactgagggaagagaatcccttgaaccacaacgtggtggatgcgagcacggcccataggatcgatggcctggcagcactgagcatggaccgcactggcctgatccgggaagggctgcgggtcccgggaaacatcgtctattctagcttgtgtggactgggctcagagaaaggtcgggaggctgccacaagcactctaggtggccttgggttttcttcggaaagaaatccagagatgcagttcaaaccgaatacacccgagacagtggaggcttctgccgtctctggaaaacccccaaatggcttcagtgctatatacaaaacaccgcctggaatacaaaaaagtgctgtagccacagcagaagcgctgggcttggacaggcctgccagcgacaaacagagccctctcaacatcaatggtgctagttatctgcggctgccctgggtcaatccttacatggagggtgccacgccagccatctaccctttcctcgactcgccaaataagtattcactgaacatgtacaaggccttgctacctcagcagtcctacagcttggcccagccgctgtattctccagtctgcaccaatggggagcgctttctctacctgccgccacctcactacgtcggtccccacatcccatcgtccttggcatcacccatgaggctctcgacaccttcggcctccccagccatcccgcctctcgtccattgcgcagacaaaagcctcccgtggaagatgggcgtcagccctgggaatcctgttgattcccacgcctatcctcacatccagaacagtaagcagcccagggttccctctgccaaggcggtcaccagtggcctgccgggggacacagctctcctgttgcccccctcgcctcggccgtcaccccgagtccaccttcccacccagcctgctgcagacacctactcggagttccacaagcactatgccaggatctccacctctccttcagttgccctgtcaaagccatacatgacagttagcagcgagttccccgcggccaggctctccaatggcaagtatcccaaggctccggaagggggcgaaggtgcccagccagtgcccgggcatgcccggaagacagcggttcaagacagaaaagacggcagctcacctcctctgttggagaagcagaccgttaccaaagacgtcacagataagccactagacttgtcttctaaagtggtggatgtagatgcttccaaagctgaccacatgaaaaagatggctcccacggtcctggttcacagcagggctggaagtggcttagtgctctccggaagtgagattccgaaagaaacactatctcctccaggaaatggttgtgctatctatagatctgaaatcatcagcactgctccctcatcctgggtggtgcccgggccaagtcctaacgaagagaacaatggcaaaagcatgtcgctgaaaaacaaggcattggactgggcgataccacagcagcggagttcatcatgcccgcgcatgggcggcaccgatgctgtcatcactaacgtttcagggtcagtgtcgagtgcaggccgcccagcctccgcatcacccgcccccaatgccaatgcagatggcaccaaaaccagcaggagctctgtagaaaccacaccatccgttattcagcacgtgggccagcccccggccactcctgccaagcacagtagcagcaccagcagcaagggcgccaaagccagcaacccagaaccgagtttcaaagcaaacgagaacggccttccaccaagctctatatttctgtctccaaatgaggcattcaggtccccaccaattccctaccccaggagttacctcccttacccagcccctgagggcattgctgtaagtcccctctccttacatggcaaaggacctgtctaccctcacccagttttgttacccaatggcagtctgtttcctgggcaccttgccccaaagcctgggctgccctatgggcttcccaccggccgtccagagtttgtgacctaccaagatgccctggggttgggcatggtgcatcccatgttgataccacacacgcccatagagattactaaagaggagaaaccagagaggagatcccggtcccatgagagagcccgttacgaggacccaaccctccggaatcggttttccgagattttggaaactagcagcaccaagttacatccagatgtccccaccgacaagaacctaaagccgaaccccaactggaatcaagggaagactgttgtcaaaagcgacaagcttgtctacgtagaccttctccgagaagaaccagatgctaaaactgacacaaacgtgtccaaacccagctttgcagcagagagtgttggccagagcgctgagccccccaagccctcagttgagccggccctgcagcagcaccgtgatttcatcgccctgagagaggagttggggcgcatcagtgacttccacgaaacttatactttcaaacagccagtcttcaccgtaagcaaggacagtgttctggcaggtaccaacaaagagaacctagggttgccagtctcgactccattcctggagccacctctggggagcgatggccctgctgtaacttttggtaaaacccaagaggatcccaaaccattttgtgtgggcagtgccccaccaagtgtggatgtgacccccacctataccaaagatggagctgatgaggctgaatcaaatgatggcaaagttctgaaaccgaagccatctaagctggcaaagagaatcgccaactcagcgggttacgtgggtgaccgattcaaatgtgtcactaccgaactgtatgcagattccagtcagctcagccgggagcaacgggcattgcagatggaaggattacaagaggacagtattttatgtctacccgctgcttactgtgagcgtgcaatgatgcgcttctcagagttggagatgaaagaaagagaaggtggccacccagcaaccaaagactccgagatgtgcaaattcagcccagccgactgggaaaggttgaaaggaaatcaggacaaaaagccaaagtcggtcaccctggaggaggccattgcagaacagaacgaaagtgagagatgcgagtatagtgttggaaacaagcaccgtgatccctttgaagccccagaggacaaagatcttcctgtggagaagtactttgtggagaggcagcctgtgagcgagcctcccgcagaccaggtggcctcggacatgcctcacagccccaccctccgggtggacaggaaacgcaaagtctcaggtgacagcagccacactgagaccactgcggaggaggtgccagaggaccctctgctgaaagccaaacgccgacgagtctctaaagggctccatcctaaaaaacaacgccacttgctgcaccttagagaacgatgggagcagcaggtgtcggcagcagatggcaaacctggccggcaaagcaggaaggaagtgacccaggccactcagcctgaggccattcctcaggggactaacatcactgaagagaaacctggcaggaaaagggcagaggccaaaggcaacagaagctggtcggaagagtctcttaaacccagtgacaatgaacaaggcttgcctgtgttctccggctctccgcccatgaagagtctttcatccaccagtgcaggcggcaaaaagcaggctcagccaagctgcgcaccagcctccaggccgcctgccaaacagcagaaaattaaagaaaaccagaagacagatgtgctgtgtgcagacgaagaagaggattgccaggctgcctccctgctgcagaaatacaccgacaacagcgagaagccatccgggaagagactgtgcaaaaccaaacacttgatccctcaggagtccaggcggggattgccactgacaggggaatactacgtggagaatgccgatggcaaggtgactgtccggagattcagaaagcggccggagcccagttcggactatgatctgtcaccagccaagcaggagccaaagcccttcgaccgcttgcagcaactgctaccagcctcccagtccacacagctgccatgctcaagttcccctcaggagaccacccagtctcgccctatgccgccggaagcacggagacttattgtcaataagaacgctggcgagacccttctgcagcgggcagccaggcttggctatgaggaagtggtcctgtactgcttagagaacaagatttgtgatgtaaatcatcgggacaacgcaggttactgcgccctgcatgaagcttgtgctaggggctggctcaacattgtgcgacacctccttgaatatggcgctgatgtcaactgtagtgcccaggatggaaccaggcctctgcacgatgctgttgagaacgatcacttggaaattgtccgactacttctctcttatggtgctgaccccaccttggctacgtactcaggtagaaccatcatgaaaatgacccacagtgaacttatggaaaagttcttaacagattatttaaatgacctccagggtcgcaatgatgatgacgccagtggcacttgggacttctatggcagctctgtttgtgaaccagatgatgaaagtggctatgatgttttagccaaccccccaggaccagaagaccaggatgatgatgacgatgcctatagcgatgtgtttgaatttgaattttcagagacccccctcttaccgtgttataacatccaagtatctgtggctcaggggccacgaaactggctactgctttcggatgtccttaagaaattgaaaatgtcctcccgcatatttcgctgcaattttccaaacgtggaaattgtcaccattgcagaggcagaattttatcggcaggtttctgcaagtctcttgttctcttgctccaaagacctggaagccttcaaccctgaaagtaaggagctgttagatctggtggaattcacgaacgaaattcagactctgctgggctcctctgtagagtggctccaccccagtgatctggcctcagacaactactggtgagcaagctggacccaccatgtacagtgtgttatagtgttaatccttgtgcatatgtgtcataatacaactatttctgtaaagaaaggacactattacatatgaaaatatctcttctttatataagagaaattactccagtcagaaggacttagaaacatgtttttttccttttaaacttttaagtcagtttttatgaagttgttataatgtttctttacttttcaatgcacacatgctttgggatacgtttgtttttacttggaacatttgtttcttttcttttttaaggagaaaaaaaaatgagtaaaaggagctccacactttgacttaatttcatacaaagctctgatgacaggccatgactgtagagtggtcagaactgtgtggttggtttgagggagcgaattcggggaaggcacttggtgatataactttgttttgtttacagagtacctgctcgggccaggtaaatgctattggatgtaatccagtagtgtgtaatataaattcaaaccatatccacacacaacaactaattgtatgaaacttttatatcctaatttaaaagctgtgaaattagttttcacgcatcaaaccggattgtttatatgtttaaacattttatgctcttatttaaagaagactttgagctatttttttctgtaccctgtaaaatattgaaaactaacataatatgttgaggttgcttggaaatgtacataaaactaaaattttctgaatcgtgtgtttatgtttgaaatctgtgttttaactttgtaagtaaattctctgcctttgtatttatattttacaaaaattttcttaaaaggcaataaaactgttgaggaaaggagaaaaaaaaactatnaaaaaaaaagaa

SEQ ID NO: 428052 - DNA, 6434 bp, Homo sapiens
gtatttccgaagctggccaggccctctgctgctgaccctggaaatcgggtcacactagacaaggctgcatgtgcggggagaaggcgggggggctcctttgcacgcggctgctcgcgtttccccaaggcctccaaatagtctaaaaactcacctcggaggaggagaaagagcgtgaagtggctctttcgatctgagacaccccctcccggagaactcgccccctcccccccagcccagagcggagtgaaatcttagaagccgtggctgctgggtttgaacggaatgctggagtcagtggaagacggagctggtcggcccgaagactagacgcttgaagcaaagctgccatcccagaagacgacatgctctcagcaacccccctgtatgggaacgttcacagctggatgaacagcgagagggtccgcatgtgtggggcgagcgaagacaggaaaatccttgtaaatgatggtgacgcttcaaaagccagactggaactgagggaagagaatcccttgaaccacaacgtggtggatgcgagcacggcccataggatcgatggcctggcagcactgagcatggaccgcactggcctgatccgggaagggctgcgggtcccgggaaacatcgtctattctagcttgtgtggactgggctcagagaaaggtcgggaggctgccacaagcactctaggtggccttgggttttcttcggaaagaaatccagagatgcagttcaaaccgaatacacccgagacagtggaggcttctgccgtctctggaaaacccccaaatggcttcagtgctatatacaaaacaccgcctggaatacaaaaaagtgctgtagccacagcagaagcgctgggcttggacaggcctgccagcgacaaacagagccctctcaacatcaatggtgctagttatctgcggctgccctgggtcaatccttacatggagggtgccacgccagccatctaccctttcctcgactcgccaaataagtattcactgaacatgtacaaggccttgctacctcagcagtcctacagcttggcccagccgctgtattctccagtctgcaccaatggggagcgctttctctacctgccgccacctcactacgtcggtccccacatcccatcgtccttggcatcacccatgaggctctcgacaccttcggcctccccagccatcccgcctctcgtccattgcgcagacaaaagcctcccgtggaagatgggcgtcagccctgggaatcctgttgattcccacgcctatcctcacatccagaacagtaagcagcccagggttccctctgccaaggcggtcaccagtggcctgccgggggacacagctctcctgttgcccccctcgcctcggccgtcaccccgagtccaccttcccacccagcctgctgcagacacctactcggagttccacaagcactatgccaggatctccacctctccttcagttgccctgtcaaagccatacatgacagttagcagcgagttccccgcggccaggctctccaatggcaagtatcccaaggctccggaagggggcgaaggtgcccagccagtgcccgggcatgcccggaagacagcggttcaagacagaaaagacggcagctcacctcctctgttggagaagcagaccgttaccaaagacgtcacagataagccactagacttgtcttctaaagtggtggatgtagatgcttccaaagctgaccacatgaaaaagatggctcccacggtcctggttcacagcagggctggaagtggcttagtgctctccggaagtgagattccgaaagaaacactatctcctccaggaaatggttgtgctatctatagatctgaaatcatcagcactgctccctcatcctgggtggtgcccgggccaagtcctaacgaagagaacaatggcaaaagcatgtcgctgaaaaacaaggcattggactgggcgataccacagcagcggagttcatcatgcccgcgcatgggcggcaccgatgctgtcatcactaacgtttcagggtcagtgtcgagtgcaggccgcccagcctccgcatcacccgcccccaatgccaatgcagatggcaccaaaaccagcaggagctctgtagaaaccacaccatccgttattcagcacgtgggccagcccccggccactcctgccaagcacagtagcagcaccagcagcaagggcgccaaagccagcaacccagaaccgagtttcaaagcaaacgagaacggccttccaccaagctctatatttctgtctccaaatgaggcattcaggtccccaccaattccctaccccaggagttacctcccttacccagcccctgagggcattgctgtaagtcccctctccttacatggcaaaggacctgtctaccctcacccagttttgttacccaatggcagtctgtttcctgggcaccttgccccaaagcctgggctgccctatgggcttcccaccggccgtccagagtttgtgacctaccaagatgccctggggttgggcatggtgcatcccatgttgataccacacacgcccatagagattactaaagaggagaaaccagagaggagatcccggtcccatgagagagcccgttacgaggacccaaccctccggaatcggttttccgagattttggaaactagcagcaccaagttacatccagatgtccccaccgacaagaacctaaagccgaaccccaactggaatcaagggaagactgttgtcaaaagcgacaagcttgtctacgtagaccttctccgagaagaaccagatgctaaaactgacacaaacgtgtccaaacccagctttgcagcagagagtgttggccagagcgctgagccccccaagccctcagttgagccggccctgcagcagcaccgtgatttcatcgccctgagagaggagttggggcgcatcagtgacttccacgaaacttatactttcaaacagccagtcttcaccgtaagcaaggacagtgttctggcaggtaccaacaaagagaacctagggttgccagtctcgactccattcctggagccacctctggggagcgatggccctgctgtaacttttggtaaaacccaagaggatcccaaaccattttgtgtgggcagtgccccaccaagtgtggatgtgacccccacctataccaaagatggagctgatgaggctgaatcaaatgatggcaaagttctgaaaccgaagccatctaagctggcaaagagaatcgccaactcagcgggttacgtgggtgaccgattcaaatgtgtcactaccgaactgtatgcagattccagtcagctcagccgggagcaacgggcattgcagatggaaggattacaagaggacagtattttatgtctacccgctgcttactgtgagcgtgcaatgatgcgcttctcagagttggagatgaaagaaagagaaggtggccacccagcaaccaaagactccgagatgtgcaaattcagcccagccgactgggaaaggttgaaaggaaatcaggacaaaaagccaaagtcggtcaccctggaggaggccattgcagaacagaacgaaagtgagagatgcgagtatagtgttggaaacaagcaccgtgatccctttgaagccccagaggacaaagatcttcctgtggagaagtactttgtggagaggcagcctgtgagcgagcctcccgcagaccaggtggcctcggacatgcctcacagccccaccctccgggtggacaggaaacgcaaagtctcaggtgacagcagccacactgagaccactgcggaggaggtgccagaggaccctctgctgaaagccaaacgccgacgagtctctaaagggctccatcctaaaaaacaacgccacttgctgcaccttagagaacgatgggagcagcaggtgtcggcagcagatggcaaacctggccggcaaagcaggaaggaagtgacccaggccactcagcctgaggccattcctcaggggactaacatcactgaagagaaacctggcaggaaaagggcagaggccaaaggcaacagaagctggtcggaagagtctcttaaacccagtgacaatgaacaaggcttgcctgtgttctccggctctccgcccatgaagagtctttcatccaccagtgcaggcggcaaaaagcaggctcagccaagctgcgcaccagcctccaggccgcctgccaaacagcagaaaattaaagaaaaccagaagacagatgtgctgtgtgcagacgaagaagaggattgccaggctgcctccctgctgcagaaatacaccgacaacagcgagaagccatccgggaagagactgtgcaaaaccaaacacttgatccctcaggagtccaggcggggattgccactgacaggggaatactacgtggagaatgccgatggcaaggtgactgtccggagattcagaaagcggccggagcccagttcggactatgatctgtcaccagccaagcaggagccaaagcccttcgaccgcttgcagcaactgctaccagcctcccagtccacacagctgccatgctcaagttcccctcaggagaccacccagtctcgccctatgccgccggaagcacggagacttattgtcaataagaacgctggcgagacccttctgcagcgggcagccaggcttggctatgaggaagtggtcctgtactgcttagagaacaagatttgtgatgtaaatcatcgggacaacgcaggttactgcgccctgcatgaagcttgtgctaggggctggctcaacattgtgcgacacctccttgaatatggcgctgatgtcaactgtagtgcccaggatggaaccaggcctctgcacgatgctgttgagaacgatcacttggaaattgtccgactacttctctcttatggtgctgaccccaccttggctacgtactcaggtagaaccatcatgaaaatgacccacagtgaacttatggaaaagttcttaacagattatttaaatgacctccagggtcgcaatgatgatgacgccagtggcacttgggacttctatggcagctctgtttgtgaaccagatgatgaaagtggctatgatgttttagccaaccccccaggaccagaagaccaggatgatgatgacgatgcctatagcgatgtgtttgaatttgaattttcagagacccccctcttaccgtgttataacatccaagtatctgtggctcaggggtgagcatggctgtcatgtgattgaaaactagctgagctgctcttgaggccacgaaactggctactgctttcggatgtccttaagaaattgaaaatgtcctcccgcatatttcgctgcaattttccaaacgtggaaattgtcaccattgcagaggcagaattttatcggcaggtttctgcaagtctcttgttctcttgctccaaagacctggaagccttcaaccctgaaagtaaggagctgttagatctggtggaattcacgaacgaaattcagactctgctgggctcctctgtagagtggctccaccccagtgatctggcctcagacaactactggtgagcaagctggacccaccatgtacagtgtgttatagtgttaatccttgtgcatatgtgtcataatacaactatttctgtaaagaaaggacactattacatatgaaaatatctcttctttatataagagaaattactccagtcagaaggacttagaaacatgtttttttccttttaaacttttaagtcagtttttatgaagttgttataatgtttctttacttttcaatgcacacatgctttgggatacgtttgtttttacttggaacatttgtttcttttcttttttaaggagaaaaaaaaatgagtaaaaggagctccacactttgacttaatttcatacaaagctctgatgacaggccatgactgtagagtggtcagaactgtgtggttggtttgagggagcgaattcggggaaggcacttggtgatataactttgttttgtttacagagtacctgctcgggccaggtaaatgctattggatgtaatccagtagtgtgtaatataaattcaaaccatatccacacacaacaactaattgtatgaaacttttatatcctaatttaaaagctgtgaaattagttttcacgcatcaaaccggattgtttatatgtttaaacattttatgctcttatttaaagaagactttgagctatttttttctgtaccctgtaaaatattgaaaactaacataatatgttgaggttgcttggaaatgtacataaaactaaaattttctgaatcgtgtgtttatgtttgaaatctgtgttttaactttgtaagtaaattctctgcctttgtatttatattttacaaaaattttcttaaaaggcaataaaactgttgaggaaaggagaaaa

SEQ ID NO: 428053 - DNA, 6380 bp, Homo sapiens
gtatttccgaagctggccaggccctctgctgctgaccctggaaatcgggtcacactagacaaggctgcatgtgcggggagaaggcgggggggctcctttgcacgcggctgctcgcgtttccccaaggcctccaaatagtctaaaaactcacctcggaggaggagaaagagcgtgaagtggctctttcgatctgagacaccccctcccggagaactcgccccctcccccccagcccagagcggagtgaaatcttagaagccgtggctgctgggtttgaacggaatgctggagtcagtggaagacggagctggtcggcccgaagactagacgcttgaagcaaagctgccatcccagaagacgacatgctctcagcaacccccctgtatgggaacgttcacagctggatgaacagcgagagggtccgcatgtgtggggcgagcgaagacaggaaaatccttgtaaatgatggtgacgcttcaaaagccagactggaactgagggaagagaatcccttgaaccacaacgtggtggatgcgagcacggcccataggatcgatggcctggcagcactgagcatggaccgcactggcctgatccgggaagggctgcgggtcccgggaaacatcgtctattctagcttgtgtggactgggctcagagaaaggtcgggaggctgccacaagcactctaggtggccttgggttttcttcggaaagaaatccagagatgcagttcaaaccgaatacacccgagacagtggaggcttctgccgtctctggaaaacccccaaatggcttcagtgctatatacaaaacaccgcctggaatacaaaaaagtgctgtagccacagcagaagcgctgggcttggacaggcctgccagcgacaaacagagccctctcaacatcaatggtgctagttatctgcggctgccctgggtcaatccttacatggagggtgccacgccagccatctaccctttcctcgactcgccaaataagtattcactgaacatgtacaaggccttgctacctcagcagtcctacagcttggcccagccgctgtattctccagtctgcaccaatggggagcgctttctctacctgccgccacctcactacgtcggtccccacatcccatcgtccttggcatcacccatgaggctctcgacaccttcggcctccccagccatcccgcctctcgtccattgcgcagacaaaagcctcccgtggaagatgggcgtcagccctgggaatcctgttgattcccacgcctatcctcacatccagaacagtaagcagcccagggttccctctgccaaggcggtcaccagtggcctgccgggggacacagctctcctgttgcccccctcgcctcggccgtcaccccgagtccaccttcccacccagcctgctgcagacacctactcggagttccacaagcactatgccaggatctccacctctccttcagttgccctgtcaaagccatacatgacagttagcagcgagttccccgcggccaggctctccaatggcaagtatcccaaggctccggaagggggcgaaggtgcccagccagtgcccgggcatgcccggaagacagcggttcaagacagaaaagacggcagctcacctcctctgttggagaagcagaccgttaccaaagacgtcacagataagccactagacttgtcttctaaagtggtggatgtagatgcttccaaagctgaccacatgaaaaagatggctcccacggtcctggttcacagcagggctggaagtggcttagtgctctccggaagtgagattccgaaagaaacactatctcctccaggaaatggttgtgctatctatagatctgaaatcatcagcactgctccctcatcctgggtggtgcccgggccaagtcctaacgaagagaacaatggcaaaagcatgtcgctgaaaaacaaggcattggactgggcgataccacagcagcggagttcatcatgcccgcgcatgggcggcaccgatgctgtcatcactaacgtttcagggtcagtgtcgagtgcaggccgcccagcctccgcatcacccgcccccaatgccaatgcagatggcaccaaaaccagcaggagctctgtagaaaccacaccatccgttattcagcacgtgggccagcccccggccactcctgccaagcacagtagcagcaccagcagcaagggcgccaaagccagcaacccagaaccgagtttcaaagcaaacgagaacggccttccaccaagctctatatttctgtctccaaatgaggcattcaggtccccaccaattccctaccccaggagttacctcccttacccagcccctgagggcattgctgtaagtcccctctccttacatggcaaaggacctgtctaccctcacccagttttgttacccaatggcagtctgtttcctgggcaccttgccccaaagcctgggctgccctatgggcttcccaccggccgtccagagtttgtgacctaccaagatgccctggggttgggcatggtgcatcccatgttgataccacacacgcccatagagattactaaagaggagaaaccagagaggagatcccggtcccatgagagagcccgttacgaggacccaaccctccggaatcggttttccgagattttggaaactagcagcaccaagttacatccagatgtccccaccgacaagaacctaaagccgaaccccaactggaatcaagggaagactgttgtcaaaagcgacaagcttgtctacgtagaccttctccgagaagaaccagatgctaaaactgacacaaacgtgtccaaacccagctttgcagcagagagtgttggccagagcgctgagccccccaagccctcagttgagccggccctgcagcagcaccgtgatttcatcgccctgagagaggagttggggcgcatcagtgacttccacgaaacttatactttcaaacagccagtcttcaccgtaagcaaggacagtgttctggcaggtaccaacaaagagaacctagggttgccagtctcgactccattcctggagccacctctggggagcgatggccctgctgtaacttttggtaaaacccaagaggatcccaaaccattttgtgtgggcagtgccccaccaagtgtggatgtgacccccacctataccaaagatggagctgatgaggctgaatcaaatgatggcaaagttctgaaaccgaagccatctaagctggcaaagagaatcgccaactcagcgggttacgtgggtgaccgattcaaatgtgtcactaccgaactgtatgcagattccagtcagctcagccgggagcaacgggcattgcagcgtgcaatgatgcgcttctcagagttggagatgaaagaaagagaaggtggccacccagcaaccaaagactccgagatgtgcaaattcagcccagccgactgggaaaggttgaaaggaaatcaggacaaaaagccaaagtcggtcaccctggaggaggccattgcagaacagaacgaaagtgagagatgcgagtatagtgttggaaacaagcaccgtgatccctttgaagccccagaggacaaagatcttcctgtggagaagtactttgtggagaggcagcctgtgagcgagcctcccgcagaccaggtggcctcggacatgcctcacagccccaccctccgggtggacaggaaacgcaaagtctcaggtgacagcagccacactgagaccactgcggaggaggtgccagaggaccctctgctgaaagccaaacgccgacgagtctctaaagggctccatcctaaaaaacaacgccacttgctgcaccttagagaacgatgggagcagcaggtgtcggcagcagatggcaaacctggccggcaaagcaggaaggaagtgacccaggccactcagcctgaggccattcctcaggggactaacatcactgaagagaaacctggcaggaaaagggcagaggccaaaggcaacagaagctggtcggaagagtctcttaaacccagtgacaatgaacaaggcttgcctgtgttctccggctctccgcccatgaagagtctttcatccaccagtgcaggcggcaaaaagcaggctcagccaagctgcgcaccagcctccaggccgcctgccaaacagcagaaaattaaagaaaaccagaagacagatgtgctgtgtgcagacgaagaagaggattgccaggctgcctccctgctgcagaaatacaccgacaacagcgagaagccatccgggaagagactgtgcaaaaccaaacacttgatccctcaggagtccaggcggggattgccactgacaggggaatactacgtggagaatgccgatggcaaggtgactgtccggagattcagaaagcggccggagcccagttcggactatgatctgtcaccagccaagcaggagccaaagcccttcgaccgcttgcagcaactgctaccagcctcccagtccacacagctgccatgctcaagttcccctcaggagaccacccagtctcgccctatgccgccggaagcacggagacttattgtcaataagaacgctggcgagacccttctgcagcgggcagccaggcttggctatgaggaagtggtcctgtactgcttagagaacaagatttgtgatgtaaatcatcgggacaacgcaggttactgcgccctgcatgaagcttgtgctaggggctggctcaacattgtgcgacacctccttgaatatggcgctgatgtcaactgtagtgcccaggatggaaccaggcctctgcacgatgctgttgagaacgatcacttggaaattgtccgactacttctctcttatggtgctgaccccaccttggctacgtactcaggtagaaccatcatgaaaatgacccacagtgaacttatggaaaagttcttaacagattatttaaatgacctccagggtcgcaatgatgatgacgccagtggcacttgggacttctatggcagctctgtttgtgaaccagatgatgaaagtggctatgatgttttagccaaccccccaggaccagaagaccaggatgatgatgacgatgcctatagcgatgtgtttgaatttgaattttcagagacccccctcttaccgtgttataacatccaagtatctgtggctcaggggtgagcatggctgtcatgtgattgaaaactagctgagctgctcttgaggccacgaaactggctactgctttcggatgtccttaagaaattgaaaatgtcctcccgcatatttcgctgcaattttccaaacgtggaaattgtcaccattgcagaggcagaattttatcggcaggtttctgcaagtctcttgttctcttgctccaaagacctggaagccttcaaccctgaaagtaaggagctgttagatctggtggaattcacgaacgaaattcagactctgctgggctcctctgtagagtggctccaccccagtgatctggcctcagacaactactggtgagcaagctggacccaccatgtacagtgtgttatagtgttaatccttgtgcatatgtgtcataatacaactatttctgtaaagaaaggacactattacatatgaaaatatctcttctttatataagagaaattactccagtcagaaggacttagaaacatgtttttttccttttaaacttttaagtcagtttttatgaagttgttataatgtttctttacttttcaatgcacacatgctttgggatacgtttgtttttacttggaacatttgtttcttttcttttttaaggagaaaaaaaaatgagtaaaaggagctccacactttgacttaatttcatacaaagctctgatgacaggccatgactgtagagtggtcagaactgtgtggttggtttgagggagcgaattcggggaaggcacttggtgatataactttgttttgtttacagagtacctgctcgggccaggtaaatgctattggatgtaatccagtagtgtgtaatataaattcaaaccatatccacacacaacaactaattgtatgaaacttttatatcctaatttaaaagctgtgaaattagttttcacgcatcaaaccggattgtttatatgtttaaacattttatgctcttatttaaagaagactttgagctatttttttctgtaccctgtaaaatattgaaaactaacataatatgttgaggttgcttggaaatgtacataaaactaaaattttctgaatcgtgtgtttatgtttgaaatctgtgttttaactttgtaagtaaattctctgcctttgtatttatattttacaaaaattttcttaaaaggcaataaaactgttgaggaaaggagaaaa

SEQ ID NO: 428054 - DNA, 1505 bp, Homo sapiens
taagagagaagtagtcggacaatttccaagtgatcgttctcaacagcatcgtgcagaggcctggttctagaaccatcatgaaaatgacccacagtgaacttatggaaaagttcttaacagattatttaaatgacctccagggtcgcaatgatgatgacgccagtggcacttgggacttctatggcagctctgtttgtgaaccagatgatgaaagtggctatgatgttttagccaaccccccaggaccagaagaccaggatgatgatgacgatgcctatagcgatgtgtttgaatttgaattttcagagacccccctcttaccgtgttataacatccaagtatctgtggctcaggggccacgaaactggctactgctttcggatgtccttaagaaattgaaaatgtcctcccgcatatttcgctgcaattttccaaacgtggaaattgtcaccattgcagaggcagaattttatcggcaggtttctgcaagtctcttgttctcttgctccaaagacctggaagccttcaaccctgaaagtaaggagctgttagatctggtggaattcacgaacgaaattcagactctgctgggctcctctgtagagtggctccaccccagtgatctggcctcagacaactactggtgagcaagctggacccaccatgtacagtgtgttatagtgttaatccttgtgcatatgtgtcataatacaactatttctgtaaagaaaggacactattacatatgaaaatatctcttctttatataagagaaattactccagtcagaaggacttagaaacatgtttttttccttttaaacttttaagtcagtttttatgaagttgttataatgtttctttacttttcaatgcacacatgctttgggatacgtttgtttttacttggaacatttgtttcttttcttttttaaggagaaaaaaaaatgagtaaaaggagctccacactttgacttaatttcatacaaagctctgatgacaggccatgactgtagagtggtcagaactgtgtggttggtttgagggagcgaattcggggaaggcacttggtgatataactttgttttgtttacagagtacctgctcgggccaggtaaatgctattggatgtaatccagtagtgtgtaatataaattcaaaccatatccacacacaacaactaattgtatgaaacttttatatcctaatttaaaagctgtgaaattagttttcacgcatcaaaccggattgtttatatgtttaaacattttatgctcttatttaaagaagactttgagctatttttttctgtaccctgtaaaatattgaaaactaacataatatgttgaggttgcttggaaatgtacataaaactaaaattttctgaatcgtgtgtttatgtttgaaatctgtgttttaactttgtaagtaaattctctgcctttgtatttatattttacaaaaattttcttaaaaggcaataaaactgttgaggaaaggagaaaa

SEQ ID NO: 428055 - DNA, 5596 bp, Homo sapiens
gtatttccgaagctggccaggccctctgctgctgaccctggaaatcgggtcacactagacaaggctgcatgtgcggggagaaggcgggggggctcctttgcacgcggctgctcgcgtttccccaaggcctccaaatagtctaaaaactcacctcggaggaggagaaagagcgtgaagtggctctttcgatctgagacaccccctcccggagaactcgccccctcccccccagcccagagcggagtgaaatcttagaagccgtggctgctgggtttgaacggaatgctggagtcagtggaagacggagctggtcggcccgaagactagacgcttgaagcaaagctgccatcccagaagacgacatgctctcagcaacccccctgtatgggaacgttcacagctggatgaacagcgagagggtccgcatgtgtggggcgagcgaagacaggaaaatccttgtaaatgatggtgacgcttcaaaagccagactggaactgagggaagagaatcccttgaaccacaacgtggtggatgcgagcacggcccataggatcgatggcctggcagcactgagcatggaccgcactggcctgatccgggaagggctgcgggtcccgggaaacatcgtctattctagcttgtgtggactgggctcagagaaaggtcgggaggctgccacaagcactctaggtggccttgggttttcttcggaaagaaatccagagatgcagttcaaaccgaatacacccgagacagtggaggcttctgccgtctctggaaaacccccaaatggcttcagtgctatatacaaaacaccgcctggaatacaaaaaagtgctgtagccacagcagaagcgctgggcttggacaggcctgccagcgacaaacagagccctctcaacatcaatggtgctagttatctgcggctgccctgggtcaatccttacatggagggtgccacgccagccatctaccctttcctcgactcgccaaataagtattcactgaacatgtacaaggccttgctacctcagcagtcctacagcttggcccagccgctgtattctccagtctgcaccaatggggagcgctttctctacctgccgccacctcactacgtcggtccccacatcccatcgtccttggcatcacccatgaggctctcgacaccttcggcctccccagccatcccgcctctcgtccattgcgcagacaaaagcctcccgtggaagatgggcgtcagccctgggaatcctgttgattcccacgcctatcctcacatccagaacagtaagcagcccagggttccctctgccaaggcggtcaccagtggcctgccgggggacacagctctcctgttgcccccctcgcctcggccgtcaccccgagtccaccttcccacccagcctgctgcagacacctactcggagttccacaagcactatgccaggatctccacctctccttcagttgccctgtcaaagccatacatgacagttagcagcgagttccccgcggccaggctctccaatggcaagtatcccaaggctccggaagggggcgaaggtgcccagccagtgcccgggcatgcccggaagacagcggttcaagacagaaaagacggcagctcacctcctctgttggagaagcagaccgttaccaaagacgtcacagataagccactagacttgtcttctaaagtggtggatgtagatgcttccaaagctgaccacatgaaaaagatggctcccacggtcctggttcacagcagggctggaagtggcttagtgctctccggaagtgagattccgaaagaaacactatctcctccaggaaatggttgtgctatctatagatctgaaatcatcagcactgctccctcatcctgggtggtgcccgggccaagtcctaacgaagagaacaatggcaaaagcatgtcgctgaaaaacaaggcattggactgggcgataccacagcagcggagttcatcatgcccgcgcatgggcggcaccgatgctgtcatcactaacgtttcagggtcagtgtcgagtgcaggccgcccagcctccgcatcacccgcccccaatgccaatgcagatggcaccaaaaccagcaggagctctgtagaaaccacaccatccgttattcagcacgtgggccagcccccggccactcctgccaagcacagtagcagcaccagcagcaagggcgccaaagccagcaacccagaaccgagtttcaaagcaaacgagaacggccttccaccaagctctatatttctgtctccaaatgaggcattcaggtccccaccaattccctaccccaggagttacctcccttacccagcccctgagggcattgctgtaagtcccctctccttacatggcaaaggacctgtctaccctcacccagttttgttacccaatggcagtctgtttcctgggcaccttgccccaaagcctgggctgccctatgggcttcccaccggccgtccagagtttgtgacctaccaagatgccctggggttgggcatggtgcatcccatgttgataccacacacgcccatagagattactaaagaggagaaaccagagaggagatcccggtcccatgagagagcccgttacgaggacccaaccctccggaatcggttttccgagattttggaaactagcagcaccaagttacatccagatgtccccaccgacaagaacctaaagccgaaccccaactggaatcaagggaagactgttgtcaaaagcgacaagcttgtctacgtagaccttctccgagaagaaccagatgctaaaactgacacaaacgtgtccaaacccagctttgcagcagagagtgttggccagagcgctgagccccccaagccctcagttgagccggccctgcagcagcaccgtgatttcatcgccctgagagaggagttggggcgcatcagtgacttccacgaaacttatactttcaaacagccagtcttcaccgtaagcaaggacagtgttctggcaggtaccaacaaagagaacctagggttgccagtctcgactccattcctggagccacctctggggagcgatggccctgctgtaacttttggtaaaacccaagaggatcccaaaccattttgtgtgggcagtgccccaccaagtgtggatgtgacccccacctataccaaagatggagctgatgaggctgaatcaaatgatggcaaagttctgaaaccgaagccatctaagctggcaaagagaatcgccaactcagcgggttacgtgggtgaccgattcaaatgtgtcactaccgaactgtatgcagattccagtcagctcagccgggagcaacgggcattgcagatggaaggattacaagaggacagtattttatgtctacccgctgcttactgtgagcgtgcaatgatgcgcttctcagagttggagatgaaagaaagagaaggtggccacccagcaaccaaagactccgagatgtgcaaattcagcccagccgactgggaaaggttgaaaggaaatcaggacaaaaagccaaagtcggtcaccctggaggaggccattgcagaacagaacgaaagtgagagatgcgagtatagtgttggaaacaagcaccgtgatccctttgaagccccagaggacaaagatcttcctgtggagaagtactttgtggagaggcagcctgtgagcgagcctcccgcagaccaggtggcctcggacatgcctcacagccccaccctccgggtggacaggaaacgcaaagtctcaggtgacagcagccacactgagaccactgcggaggaggtgccagaggaccctctgctgaaagccaaacgccgacgagtctctaaagggctccatcctaaaaaacaacgccacttgctgcaccttagagaacgatgggagcagcaggtgtcggcagcagatggcaaacctggccggcaaagcaggaaggaagtgacccaggccactcagcctgaggccattcctcaggggactaacatcactgaagagaaacctggcaggaaaagggcagaggccaaaggcaacagaagctggtcggaagagtctcttaaacccagtgacaatgaacaaggcttgcctgtgttctccggctctccgcccatgaagagtctttcatccaccagtgcaggcggcaaaaagcaggctcagccaagctgcgcaccagcctccaggccgcctgccaaacagcagaaaattaaagaaaaccagaagacagatgtgctgtgtgcagacgaagaagaggattgccaggctgcctccctgctgcagaaatacaccgacaacagcgagaagccatccgggaagagactgtgcaaaaccaaacacttgatccctcaggagtccaggcggggattgccactgacaggggaatactacgtggagaatgccgatggcaaggtgactgtccggagattcagaaagcggccggagcccagttcggactatgatctgtcaccagccaagcaggagccaaagcccttcgaccgcttgcagcaactgctaccagcctcccagtccacacagctgccatgctcaagttcccctcaggagaccacccagtctcgccctatgccgccggaagcacggagacttattgtcaataagaacgctggcgagacccttctgcagcgggcagccaggcttggctatgaggaagtggtcctgtactgcttagagaacaagatttgtgatgtaaatcatcgggacaacgcaggttactgcgccctgcatgaagcttgtgctaggggctggctcaacattgtgcgacacctccttgaatatggcgctgatgtcaactgtagtgcccaggatggaaccaggcctctgcacgatgctgttgagaacgatcacttggaaattgtccgactacttctctcttatggtgctgaccccaccttggctacgtactcaggtagaaccatcatgaaaatgacccacagtgaacttatggaaaagttcttaacagattatttaaatgacctccagggtcgcaatgatgatgacgccagtggcacttgggacttctatggcagctctgtttgtgaaccagatgatgaaagtggctatgatgttttagccaaccccccaggaccagaagaccaggatgatgatgacgatgcctatagcgatgtgtttgaatttgaattttcagagacccccctcttaccgtgttataacatccaagtatctgtggctcaggggccacgaaactggctactgctttcggatgtccttaagaaattgaaaatgtcctcccgcatatttcgctgcaattttccaaacgtggaaattgtcaccattgcagaggcagaattttatcggctctggatgcaaaagtgtcagaagatgaagaggaggaggatgtgaaactcttaagtatatctggaaaggcggtctgcccctggaggtggtagcaaggttccacagaaaaaagtaaaacttgctgctgatgacgatgatgacgatgatgataaaggggatgatgatcaagatgatgatgatgatgattttgatgctgaggaagctgaagaacaagcgccagtaaagaaatctatacgaga

SEQ ID NO: 428056 - DNA, 6275 bp, Homo sapiens
ggtccccggctgcccgcagcccgctcgcggcgcttctccggcccggctccttctccgctcgttaacgtcgccaaccccccccacccctcatatctctctccacccacccaaccgccccccgctccttctcgccgcctcgagtccgcttgggggaaaacttcaaagagccggatcgcaggctccctgcctactcccccaccggggatttcagactagacgcttgaagcaaagctgccatcccagaagacgacatgctctcagcaacccccctgtatgggaacgttcacagctggatgaacagcgagagggtccgcatgtgtggggcgagcgaagacaggaaaatccttgtaaatgatggtgacgcttcaaaagccagactggaactgagggaagagaatcccttgaaccacaacgtggtggatgcgagcacggcccataggatcgatggcctggcagcactgagcatggaccgcactggcctgatccgggaagggctgcgggtcccgggaaacatcgtctattctagcttgtgtggactgggctcagagaaaggtcgggaggctgccacaagcactctaggtggccttgggttttcttcggaaagaaatccagagatgcagttcaaaccgaatacacccgagacagtggaggcttctgccgtctctggaaaacccccaaatggcttcagtgctatatacaaaacaccgcctggaatacaaaaaagtgctgtagccacagcagaagcgctgggcttggacaggcctgccagcgacaaacagagccctctcaacatcaatggtgctagttatctgcggctgccctgggtcaatccttacatggagggtgccacgccagccatctaccctttcctcgactcgccaaataagtattcactgaacatgtacaaggccttgctacctcagcagtcctacagcttggcccagccgctgtattctccagtctgcaccaatggggagcgctttctctacctgccgccacctcactacgtcggtccccacatcccatcgtccttggcatcacccatgaggctctcgacaccttcggcctccccagccatcccgcctctcgtccattgcgcagacaaaagcctcccgtggaagatgggcgtcagccctgggaatcctgttgattcccacgcctatcctcacatccagaacagtaagcagcccagggttccctctgccaaggcggtcaccagtggcctgccgggggacacagctctcctgttgcccccctcgcctcggccgtcaccccgagtccaccttcccacccagcctgctgcagacacctactcggagttccacaagcactatgccaggatctccacctctccttcagttgccctgtcaaagccatacatgacagttagcagcgagttccccgcggccaggctctccaatggcaagtatcccaaggctccggaagggggcgaaggtgcccagccagtgcccgggcatgcccggaagacagcggttcaagacagaaaagacggcagctcacctcctctgttggagaagcagaccgttaccaaagacgtcacagataagccactagacttgtcttctaaagtggtggatgtagatgcttccaaagctgaccacatgaaaaagatggctcccacggtcctggttcacagcagggctggaagtggcttagtgctctccggaagtgagattccgaaagaaacactatctcctccaggaaatggttgtgctatctatagatctgaaatcatcagcactgctccctcatcctgggtggtgcccgggccaagtcctaacgaagagaacaatggcaaaagcatgtcgctgaaaaacaaggcattggactgggcgataccacagcagcggagttcatcatgcccgcgcatgggcggcaccgatgctgtcatcactaacgtttcagggtcagtgtcgagtgcaggccgcccagcctccgcatcacccgcccccaatgccaatgcagatggcaccaaaaccagcaggagctctgtagaaaccacaccatccgttattcagcacgtgggccagcccccggccactcctgccaagcacagtagcagcaccagcagcaagggcgccaaagccagcaacccagaaccgagtttcaaagcaaacgagaacggccttccaccaagctctatatttctgtctccaaatgaggcattcaggtccccaccaattccctaccccaggagttacctcccttacccagcccctgagggcattgctgtaagtcccctctccttacatggcaaaggacctgtctaccctcacccagttttgttacccaatggcagtctgtttcctgggcaccttgccccaaagcctgggctgccctatgggcttcccaccggccgtccagagtttgtgacctaccaagatgccctggggttgggcatggtgcatcccatgttgataccacacacgcccatagagattactaaagaggagaaaccagagaggagatcccggtcccatgagagagcccgttacgaggacccaaccctccggaatcggttttccgagattttggaaactagcagcaccaagttacatccagatgtccccaccgacaagaacctaaagccgaaccccaactggaatcaagggaagactgttgtcaaaagcgacaagcttgtctacgtagaccttctccgagaagaaccagatgctaaaactgacacaaacgtgtccaaacccagctttgcagcagagagtgttggccagagcgctgagccccccaagccctcagttgagccggccctgcagcagcaccgtgatttcatcgccctgagagaggagttggggcgcatcagtgacttccacgaaacttatactttcaaacagccagtcttcaccgtaagcaaggacagtgttctggcaggtaccaacaaagagaacctagggttgccagtctcgactccattcctggagccacctctggggagcgatggccctgctgtaacttttggtaaaacccaagaggatcccaaaccattttgtgtgggcagtgccccaccaagtgtggatgtgacccccacctataccaaagatggagctgatgaggctgaatcaaatgatggcaaagttctgaaaccgaagccatctaagctggcaaagagaatcgccaactcagcgggttacgtgggtgaccgattcaaatgtgtcactaccgaactgtatgcagattccagtcagctcagccgggagcaacgggcattgcagatggaaggattacaagaggacagtattttatgtctacccgctgcttactgtgagcgtgcaatgatgcgcttctcagagttggagatgaaagaaagagaaggtggccacccagcaaccaaagactccgagatgtgcaaattcagcccagccgactgggaaaggttgaaaggaaatcaggacaaaaagccaaagtcggtcaccctggaggaggccattgcagaacagaacgaaagtgagagatgcgagtatagtgttggaaacaagcaccgtgatccctttgaagccccagaggacaaagatcttcctgtggagaagtactttgtggagaggcagcctgtgagcgagcctcccgcagaccaggtggcctcggacatgcctcacagccccaccctccgggtggacaggaaacgcaaagtctcaggtgacagcagccacactgagaccactgcggaggaggtgccagaggaccctctgctgaaagccaaacgccgacgagtctctaaagggctccatcctaaaaaacaacgccacttgctgcaccttagagaacgatgggagcagcaggtgtcggcagcagatggcaaacctggccggcaaagcaggaaggaagtgacccaggccactcagcctgaggccattcctcaggggactaacatcactgaagagaaacctggcaggaaaagggcagaggccaaaggcaacagaagctggtcggaagagtctcttaaacccagtgacaatgaacaaggcttgcctgtgttctccggctctccgcccatgaagagtctttcatccaccagtgcaggcggcaaaaagcaggctcagccaagctgcgcaccagcctccaggccgcctgccaaacagcagaaaattaaagaaaaccagaagacagatgtgctgtgtgcagacgaagaagaggattgccaggctgcctccctgctgcagaaatacaccgacaacagcgagaagccatccgggaagagactgtgcaaaaccaaacacttgatccctcaggagtccaggcggggattgccactgacaggggaatactacgtggagaatgccgatggcaaggtgactgtccggagattcagaaagcggccggagcccagttcggactatgatctgtcaccagccaagcaggagccaaagcccttcgaccgcttgcagcaactgctaccagcctcccagtccacacagctgccatgctcaagttcccctcaggagaccacccagtctcgccctatgccgccggaagcacggagacttattgtcaataagaacgctggcgagacccttctgcagcgggcagccaggcttggctatgaggaagtggtcctgtactgcttagagaacaagatttgtgatgtaaatcatcgggacaacgcaggttactgcgccctgcatgaagcttgtgctaggggctggctcaacattgtgcgacacctccttgaatatggcgctgatgtcaactgtagtgcccaggatggaaccaggcctctgcacgatgctgttgagaacgatcacttggaaattgtccgactacttctctcttatggtgctgaccccaccttggctacgtactcaggtagaaccatcatgaaaatgacccacagtgaacttatggaaaagttcttaacagattatttaaatgacctccagggtcgcaatgatgatgacgccagtggcacttgggacttctatggcagctctgtttgtgaaccagatgatgaaagtggctatgatgttttagccaaccccccaggaccagaagaccaggatgatgatgacgatgcctatagcgatgtgtttgaatttgaattttcagagacccccctcttaccgtgttataacatccaagtatctgtggctcaggggccacgaaactggctactgctttcggatgtccttaagaaattgaaaatgtcctcccgcatatttcgctgcaattttccaaacgtggaaattgtcaccattgcagaggcagaattttatcggcaggtttctgcaagtctcttgttctcttgctccaaagacctggaagccttcaaccctgaaagtaaggagctgttagatctggtggaattcacgaacgaaattcagactctgctgggctcctctgtagagtggctccaccccagtgatctggcctcagacaactactggtgagcaagctggacccaccatgtacagtgtgttatagtgttaatccttgtgcatatgtgtcataatacaactatttctgtaaagaaaggacactattacatatgaaaatatctcttctttatataagagaaattactccagtcagaaggacttagaaacatgtttttttccttttaaacttttaagtcagtttttatgaagttgttataatgtttctttacttttcaatgcacacatgctttgggatacgtttgtttttacttggaacatttgtttcttttcttttttaaggagaaaaaaaaatgagtaaaaggagctccacactttgacttaatttcatacaaagctctgatgacaggccatgactgtagagtggtcagaactgtgtggttggtttgagggagcgaattcggggaaggcacttggtgatataactttgttttgtttacagagtacctgctcgggccaggtaaatgctattggatgtaatccagtagtgtgtaatataaattcaaaccatatccacacacaacaactaattgtatgaaacttttatatcctaatttaaaagctgtgaaattagttttcacgcatcaaaccggattgtttatatgtttaaacattttatgctcttatttaaagaagactttgagctatttttttctgtaccctgtaaaatattgaaaactaacataatatgttgaggttgcttggaaatgtacataaaactaaaattttctgaatcgtgtgtttatgtttgaaatctgtgttttaactttgtaagtaaattctctgcctttgtatttatattttacaaaaattttcttaaaaggcaataaaactgttgaggaaaggagaaaa

SEQ ID NO: 428057 - DNA, 6200 bp, Homo sapiens
ggtccccggctgcccgcagcccgctcgcggcgcttctccggcccggctccttctccgctcgttaacgtcgccaaccccccccacccctcatatctctctccacccacccaaccgccccccgctccttctcgccgcctcgagtccgcttgggggaaaacttcaaagagccggatcgcaggctccctgcctactcccccaccggggatttcagactagacgcttgaagcaaagctgccatcccagaagacgacatgctctcagcaacccccctgtatgggaacgttcacagctggatgaacagcgagagggtccgcatgtgtggggcgagcgaagacaggaaaatccttgtaaatgatggtgacgcttcaaaagccagactggaactgagggaagagaatcccttgaaccacaacgtggtggatgcgagcacggcccataggatcgatggcctggcagcactgagcatggaccgcactggcctgatccgggaagggctgcgggtcccgggaaacatcgtctattctagcttgtgtggactgggctcagagaaaggtcgggaggctgccacaagcactctaggtggccttgggttttcttcggaaagaaatccagagatgcagttcaaaccgaatacacccgagacagtggaggcttctgccgtctctggaaaacccccaaatggcttcagtgctatatacaaaacaccgcctggaatacaaaaaagtgctgtagccacagcagaagcgctgggcttggacaggcctgccagcgacaaacagagccctctcaacatcaatggtgctagttatctgcggctgccctgggtcaatccttacatggagggtgccacgccagccatctaccctttcctcgactcgccaaataagtattcactgaacatgtacaaggccttgctacctcagcagtcctacagcttggcccagccgctgtattctccagtctgcaccaatggggagcgctttctctacctgccgccacctcactacgtcggtccccacatcccatcgtccttggcatcacccatgaggctctcgacaccttcggcctccccagccatcccgcctctcgtccattgcgcagacaaaagcctcccgtggaagatgggcgtcagccctgggaatcctgttgattcccacgcctatcctcacatccagaacagtaagcagcccagggttccctctgccaaggcggtcaccagtggcctgccgggggacacagctctcctgttgcccccctcgcctcggccgtcaccccgagtccaccttcccacccagcctgctgcagacacctactcggagttccacaagcactatgccaggatctccacctctccttcagttgccctgtcaaagccatacatgacagttagcagcgagttccccgcggccaggctctccaatggcaagtatcccaaggctccggaagggggcgaaggtgcccagccagtgcccgggcatgcccggaagacagcggttcaagacagaaaagacggcagctcacctcctctgttggagaagcagaccgttaccaaagacgtcacagataagccactagacttgtcttctaaagtggtggatgtagatgcttccaaagctgaccacatgaaaaagatggctcccacggtcctggttcacagcagggctggaagtggcttagtgctctccggaagtgagattccgaaagaaacactatctcctccaggaaatggttgtgctatctatagatctgaaatcatcagcactgctccctcatcctgggtggtgcccgggccaagtcctaacgaagagaacaatggcaaaagcatgtcgctgaaaaacaaggcattggactgggcgataccacagcagcggagttcatcatgcccgcgcatgggcggcaccgatgctgtcatcactaacgtttcagggtcagtgtcgagtgcaggccgcccagcctccgcatcacccgcccccaatgccaatgcagatggcaccaaaaccagcaggagctctgtagaaaccacaccatccgttattcagcacgtgggccagcccccggccactcctgccaagcacagtagcagcaccagcagcaagggcgccaaagccagcaacccagaaccgagtttcaaagcaaacgagaacggccttccaccaagctctatatttctgtctccaaatgaggcattcaggtccccaccaattccctaccccaggagttacctcccttacccagcccctgagggcattgctgtaagtcccctctccttacatggcaaaggacctgtctaccctcacccagttttgttacccaatggcagtctgtttcctgggcaccttgccccaaagcctgggctgccctatgggcttcccaccggccgtccagagtttgtgacctaccaagatgccctggggttgggcatggtgcatcccatgttgataccacacacgcccatagagattactaaagaggagaaaccagagaggagatcccggtcccatgagagagcccgttacgaggacccaaccctccggaatcggttttccgagattttggaaactagcagcaccaagttacatccagatgtccccaccgacaagaacctaaagccgaaccccaactggaatcaagggaagactgttgtcaaaagcgacaagcttgtctacgtagaccttctccgagaagaaccagatgctaaaactgacacaaacgtgtccaaacccagctttgcagcagagagtgttggccagagcgctgagccccccaagccctcagttgagccggccctgcagcagcaccgtgatttcatcgccctgagagaggagttggggcgcatcagtgacttccacgaaacttatactttcaaacagccagtcttcaccgtaagcaaggacagtgttctggcaggtaccaacaaagagaacctagggttgccagtctcgactccattcctggagccacctctggggagcgatggccctgctgtaacttttggtaaaacccaagaggatcccaaaccattttgtgtgggcagtgccccaccaagtgtggatgtgacccccacctataccaaagatggagctgatgaggctgaatcaaatgatggcaaagttctgaaaccgaagccatctaagctggcaaagagaatcgccaactcagcgggttacgtgggtgaccgattcaaatgtgtcactaccgaactgtatgcagattccagtcagctcagccgggagcaacgggcattgcagatggaaggattacaagaggacagtattttatgtctacccgctgcttactgtgagcgtgcaatgatgcgcttctcagagttggagatgaaagaaagagaaggtggccacccagcaaccaaagactccgagatgtgcaaattcagcccagccgactgggaaaggttgaaaggaaatcaggacaaaaagccaaagtcggtcaccctggaggaggccattgcagaacagaacgaaagtgagagatgcgagtatagtgttggaaacaagcaccgtgatccctttgaagccccagaggacaaagatcttcctgtggagaagtactttgtggagaggcagcctgtgagcgagcctcccgcagaccaggtggcctcggacatgcctcacagccccaccctccgggtggacaggaaacgcaaagtctcaggtgacagcagccacactgagaccactgcggaggaggtgccagaggaccctctgctgaaagccaaacgccgacgagtctctaaagggctccatcctaaaaaacaacgccacttgctgcaccttagagaacgatgggagcagcaggtgtcggcagcagatggcaaacctggccggcaaagcaggaaggaagtgacccaggccactcagcctgaggccattcctcaggggactaacatcactgaagagaaacctggcaggaaaagggcagaggccaaaggcaacagaagctggtcggaagagtctcttaaacccagtgacaatgaacaaggcttgcctgtgttctccggctctccgcccatgaagagtctttcatccaccagtgcaggcggcaaaaagcaggctcagccaagctgcgcaccagcctccaggccgcctgccaaacagcagaaaattaaagaaaaccagaagacagatgtgctgtgtgcagacgaagaagaggattgccaggctgcctccctgctgcagaaatacaccgacaacagcgagaagccatccgggaagagactgtgcaaaaccaaacacttgatccctcaggagtccaggcggggattgccactgacaggggaatactacgtggagaatgccgatggcaaggtgactgtccggagattcagaaagcggccggagcccagttcggactatgatctgtcaccagccaagcaggagccaaagcccttcgaccgcttgcagcaactgctaccagcctcccagtccacacagctgccatgctcaagttcccctcaggagaccacccagtctcgccctatgccgccggaagcacggagacttattgtcaataagaacgctggcgagacccttctgcagcgggcagccaggcttggctatgaggaagtggtcctgtactgcttagagaacaagatttgtgatgtaaatcatcgggacaacgcaggttactgcgccctgcatgaagcttgtgctaggggctggctcaacattgtgcgacacctccttgaatatggcgctgatgtcaactgtagtgcccaggatggaaccaggcctctgcacgatgctgttgagaacgatcacttggaaattgtccgactacttctctcttatggtgctgaccccaccttggctacgtactcaggtagaaccatcatgaaaatgacccacagtgaacttatggaaaagttcttaacagattatttaaatgacctccagggtcgcaatgatgatgacgccagtggcacttgggacttctatggcagctctgtttgtgaaccagatgatgaaagtggctatgatgttttagccaaccccccaggaccagaagaccaggatgatgatgacgatgcctatagcgatgtgtttgaatttgaattttcagagacccccctcttaccgtgttataacatccaagtatctgtggctcaggggccacgaaactggctactgctttcggatgtccttaagaaattgaaaatgtcctcccgcatatttcgctgcaattttccaaacgtggaaattgtcaccattgcagaggcagaattttatcggcaggtttctgcaagtctcttgttctcttgctccaaagacctggaagccttcaaccctgaaagtaaggagctgttagatctggtggaattcacgaacgaaattcagactctgctgggctcctctgtagagtggctccaccccagtgatctggcctcagacaactactggtgagcaagctggacccaccatgtacagtgtgttatagtgttaatccttgtgcatatgtgtcataatacaactatttctgtaaagaaaggacactattacatatgaaaatatctcttctttatataagagaaattactccagtcagaaggacttagaaacatgtttttttccttttaaacttttaagtcagtttttatgaagttgttataatgtttctttacttttcaatgcacacatgctttgggatacgtttgtttttacttggaacatttgtttcttttcttttttaaggagaaaaaaaaatgagtaaaaggagctccacactttgacttaatttcatacaaagctctgatgacaggccatgactgtagagtggtcagaactgtgtggttggtttgagggagcgaattcggggaaggcacttggtgatataactttgttttgtttacagagtacctgctcgggccaggtaaatgctattggatgtaatccagtagtgtgtaatataaattcaaaccatatccacacacaacaactaattgtatgaaacttttatatcctaatttaaaagctgtgaaattagttttcacgcatcaaaccggattgtttatatgtttaaacattttatgctcttatttaaagaagactttgagctatttttttctgtaccctgtaaaatattgaaaactaacataatatgttgaggttgcttggaaatgtacataaaactaaaattttctgaatcgtgtgtttatgtctggttcttcggcgtgtgcagggtaccga

SEQ ID NO: 428058 - DNA, 2604 bp, Homo sapiens
ctgaccaacctgaaggtgtgcattgaattaacagggctccatcctaaaaaacaacgccacttgctgcaccttagagaacgatgggagcagcaggtgtcggcagcagatggcaaacctggccggcaaagcaggaaggaagtgacccaggccactcagcctgaggccattcctcaggggactaacatcactgaagagaaacctggcaggaaaagggcagaggccaaaggcaacagaagctggtcggaagagtctcttaaacccagtgacaatgaacaaggcttgcctgtgttctccggctctccgcccatgaagagtctttcatccaccagtgcaggcggcaaaaagcaggctcagccaagctgcgcaccagcctccaggccgcctgccaaacagcagaaaattaaagaaaaccagaagacagatgtgctgtgtgcagacgaagaagaggattgccaggctgcctccctgctgcagaaatacaccgacaacagcgagaagccatccgggaagagactgtgcaaaaccaaacacttgatccctcaggagtccaggcggggattgccactgacaggggaatactacgtggagaatgccgatggcaaggtgactgtccggagattcagaaagcggccggagcccagttcggactatgatctgtcaccagccaagcaggagccaaagcccttcgaccgcttgcagcaactgctaccagcctcccagtccacacagctgccatgctcaagttcccctcaggagaccacccagtctcgccctatgccgccggaagcacggagacttattgtcaataagaacgctggcgagacccttctgcagcgggcagccaggcttggctatgaggaagtggtcctgtactgcttagagaacaagatttgtgatgtaaatcatcgggacaacgcaggttactgcgccctgcatgaagcttgtgctaggggctggctcaacattgtgcgacacctccttgaatatggcgctgatgtcaactgtagtgcccaggatggaaccaggcctctgcacgatgctgttgagaacgatcacttggaaattgtccgactacttctctcttatggtgctgaccccaccttggctacgtactcaggtagaaccatcatgaaaatgacccacagtgaacttatggaaaagttcttaacagattatttaaatgacctccagggtcgcaatgatgatgacgccagtggcacttgggacttctatggcagctctgtttgtgaaccagatgatgaaagtggctatgatgttttagccaaccccccaggaccagaagaccaggatgatgatgacgatgcctatagcgatgtgtttgaatttgaattttcagagacccccctcttaccgtgttataacatccaagtatctgtggctcaggggtgagcatggctgtcatgtgattgaaaactagctgagctgctcttgaggccacgaaactggctactgctttcggatgtccttaagaaattgaaaatgtcctcccgcatatttcgctgcaattttccaaacgtggaaattgtcaccattgcagaggcagaattttatcggcaggtttctgcaagtctcttgttctcttgctccaaagacctggaagccttcaaccctgaaagtaaggagctgttagatctggtggaattcacgaacgaaattcagactctgctgggctcctctgtagagtggctccaccccagtgatctggcctcagacaactactggtgagcaagctggacccaccatgtacagtgtgttatagtgttaatccttgtgcatatgtgtcataatacaactatttctgtaaagaaaggacactattacatatgaaaatatctcttctttatataagagaaattactccagtcagaaggacttagaaacatgtttttttccttttaaacttttaagtcagtttttatgaagttgttataatgtttctttacttttcaatgcacacatgctttgggatacgtttgtttttacttggaacatttgtttcttttcttttttaaggagaaaaaaaaatgagtaaaaggagctccacactttgacttaatttcatacaaagctctgatgacaggccatgactgtagagtggtcagaactgtgtggttggtttgagggagcgaattcggggaaggcacttggtgatataactttgttttgtttacagagtacctgctcgggccaggtaaatgctattggatgtaatccagtagtgtgtaatataaattcaaaccatatccacacacaacaactaattgtatgaaacttttatatcctaatttaaaagctgtgaaattagttttcacgcatcaaaccggattgtttatatgtttaaacattttatgctcttatttaaagaagactttgagctatttttttctgtaccctgtaaaatattgaaaactaacataatatgttgaggttgcttggaaatgtacataaaactaaaattttctgaatcgtgtgtttatgtttgaaatctgtgttttaactttgtaagtaaattctctgcctttgtatttatattttacaaaaattttcttaaaaggcaataaaactgttgaggaaaggagaaaa

SEQ ID NO: 428059 - DNA, 5970 bp, Homo sapiens
gtatttccgaagctggccaggccctctgctgctgaccctggaaatcgggtcacactagacaaggctgcatgtgcggggagaaggcgggggggctcctttgcacgcggctgctcgcgtttccccaaggcctccaaatagtctaaaaactcacctcggaggaggagaaagagcgtgaagtggctctttcgatctgagacaccccctcccggagaactcgccccctcccccccagcccagagcggagtgaaatcttagaagccgtggctgctgggtttgaacggaatgctggagtcagtggaagacggagctggtcggcccgaagactagacgcttgaagcaaagctgccatcccagaagacgacatgctctcagcaacccccctgtatgggaacgttcacagctggatgaacagcgagagggtccgcatgtgtggggcgagcgaagacaggaaaatccttgtaaatgatggtgacgcttcaaaagccagactggaactgagggaagagaatcccttgaaccacaacgtggtggatgcgagcacggcccataggatcgatggcctggcagcactgagcatggaccgcactggcctgatccgggaagggctgcgggtcccgggaaacatcgtctattctagcttgtgtggactgggctcagagaaaggtcgggaggctgccacaagcactctaggtggccttgggttttcttcggaaagaaatccagagatgcagttcaaaccgaatacacccgagacagtggaggcttctgccgtctctggaaaacccccaaatggcttcagtgctatatacaaaacaccgcctggaatacaaaaaagtgctgtagccacagcagaagcgctgggcttggacaggcctgccagcgacaaacagagccctctcaacatcaatggtgctagttatctgcggctgccctgggtcaatccttacatggagggtgccacgccagccatctaccctttcctcgactcgccaaataagtattcactgaacatgtacaaggccttgctacctcagcagtcctacagcttggcccagccgctgtattctccagtctgcaccaatggggagcgctttctctacctgccgccacctcactacgtcggtccccacatcccatcgtccttggcatcacccatgaggctctcgacaccttcggcctccccagccatcccgcctctcgtccattgcgcagacaaaagcctcccgtggaagatgggcgtcagccctgggaatcctgttgattcccacgcctatcctcacatccagaacagtaagcagcccagggttccctctgccaaggcggtcaccagtggcctgccgggggacacagctctcctgttgcccccctcgcctcggccgtcaccccgagtccaccttcccacccagcctgctgcagacacctactcggagttccacaagcactatgccaggatctccacctctccttcagttgccctgtcaaagccatacatgacagttagcagcgagttccccgcggccaggctctccaatggcaagtatcccaaggctccggaagggggcgaaggtgcccagccagtgcccgggcatgcccggaagacagcggttcaagacagaaaagacggcagctcacctcctctgttggagaagcagaccgttaccaaagacgtcacagataagccactagacttgtcttctaaagtggtggatgtagatgcttccaaagctgaccacatgaaaaagatggctcccacggtcctggttcacagcagggctggaagtggcttagtgctctccggaagtgagattccgaaagaaacactatctcctccaggaaatggttgtgctatctatagatctgaaatcatcagcactgctccctcatcctgggtggtgcccgggccaagtcctaacgaagagaacaatggcaaaagcatgtcgctgaaaaacaaggcattggactgggcgataccacagcagcggagttcatcatgcccgcgcatgggcggcaccgatgctgtcatcactaacgtttcagggtcagtgtcgagtgcaggccgcccagcctccgcatcacccgcccccaatgccaatgcagatggcaccaaaaccagcaggagctctgtagaaaccacaccatccgttattcagcacgtgggccagcccccggccactcctgccaagcacagtagcagcaccagcagcaagggcgccaaagccagcaacccagaaccgagtttcaaagcaaacgagaacggccttccaccaagctctatatttctgtctccaaatgaggcattcaggtccccaccaattccctaccccaggagttacctcccttacccagcccctgagggcattgctgtaagtcccctctccttacatggcaaaggacctgtctaccctcacccagttttgttacccaatggcagtctgtttcctgggcaccttgccccaaagcctgggctgccctatgggcttcccaccggccgtccagagtttgtgacctaccaagatgccctggggttgggcatggtgcatcccatgttgataccacacacgcccatagagattactaaagaggagaaaccagagaggagatcccggtcccatgagagagcccgttacgaggacccaaccctccggaatcggttttccgagattttggaaactagcagcaccaagttacatccagatgtccccaccgacaagaacctaaagccgaaccccaactggaatcaagggaagactgttgtcaaaagcgacaagcttgtctacgtagaccttctccgagaagaaccagatgctaaaactgacacaaacgtgtccaaacccagctttgcagcagagagtgttggccagagcgctgagccccccaagccctcagttgagccggccctgcagcagcaccgtgatttcatcgccctgagagaggagttggggcgcatcagtgacttccacgaaacttatactttcaaacagccagtcttcaccgtaagcaaggacagtgttctggcaggtaccaacaaagagaacctagggttgccagtctcgactccattcctggagccacctctggggagcgatggccctgctgtaacttttggtaaaacccaagaggatcccaaaccattttgtgtgggcagtgccccaccaagtgtggatgtgacccccacctataccaaagatggagctgatgaggctgaatcaaatgatggcaaagttctgaaaccgaagccatctaagctggcaaagagaatcgccaactcagcgggttacgtgggtgaccgattcaaatgtgtcactaccgaactgtatgcagattccagtcagctcagccgggagcaacgggcattgcagatggaaggattacaagaggacagtattttatgtctacccgctgcttactgtgagcgtgcaatgatgcgcttctcagagttggagatgaaagaaagagaaggtggccacccagcaaccaaagactccgagatgtgcaaattcagcccagccgactgggaaaggttgaaaggaaatcaggacaaaaagccaaagtcggtcaccctggaggaggccattgcagaacagaacgaaagtgagagatgcgagtatagtgttggaaacaagcaccgtgatccctttgaagccccagaggacaaagatcttcctgtggagaagtactttgtggagaggcagcctgtgagcgagcctcccgcagaccaggtggcctcggacatgcctcacagccccaccctccgggtggacaggaaacgcaaagtctcaggtgacagcagccacactgagaccactgcggaggaggtgccagaggaccctctgctgaaagccaaacgccgacgagtctctaaagggctccatcctaaaaaacaacgccacttgctgcaccttagagaacgatgggagcagcaggtgtcggcagcagatggcaaacctggccggcaaagcaggaaggaagtgacccaggccactcagcctgaggccattcctcaggggactaacatcactgaagagaaacctggcaggaaaagggcagaggccaaaggcaacagaagctggtcggaagagtctcttaaacccagtgacaatgaacaaggcttgcctgtgttctccggctctccgcccatgaagagtctttcatccaccagtgcaggcggcaaaaagcaggctcagccaagctgcgcaccagcctccaggccgcctgccaaacagcagaaaattaaagaaaaccagaagacagatgtgctgtgtgcagacgaagaagaggattgccaggctgcctccctgctgcagaaatacaccgacaacagcgagaagccatccgggaagagactgtgcaaaaccaaacacttgatccctcaggagtccaggcggggattgccactgacaggggaatactacgtggagaatgccgatggcaaggtgactgtccggagattcagaaagcggccggagcccagttcggactatgatctgtcaccagccaagcaggagccaaagcccttcgaccgcttgcagcaactgctaccagcctcccagtccacacagctgccatgctcaagttcccctcaggagaccacccagtctcgccctatgccgccggaagcacggagacttattgtcaataagaacgctggcgagacccttctgcagcgggcagccaggcttggctatgaggaagtggtcctgtactgcttagagaacaagatttgtgatgtaaatcatcgggacaacgcaggttactgcgccctgcatgaagcttgtgctaggggctggctcaacattgtgcgacacctccttgaatatggcgctgatgtcaactgtagtgcccaggatggaaccaggcctctgcacgatgctgttgagaacgatcacttggaaattgtccgactacttctctcttatggtgctgaccccaccttggctacgtactcaggtagaaccatcatgaaaatgacccacagtgaacttatggaaaagttcttaacagattatttaaatgacctccagggtcgcaatgatgatgacgccagtggcacttgggacttctatggcagctctgtttgtgaaccagatgatgaaagtggctatgatgttttagccaaccccccaggaccagaagaccaggatgatgatgacgatgcctatagcgatgtgtttgaatttgaattttcagagacccccctcttaccgtgttataacatccaagtatctgtggctcaggggtgagcatggctgtcatgtgattgaaaactagctgagctgctcttgaggtgacaggagttagaaatgcgctttgagcagatgagggtgggtgggtgagtgacctccttaactgtccacgaacctcacacaatgcagtagatattttccagaaagggtacacatcagcttccttacacccagtgtggtggggggtggggcacagcatggtataaacctgccctcatcactaacaccaaggcttaagtcactccccagagaagtgggtgactggaactttatggaagggtcagcaccttggatacttaaatccttaaacactttgagaaggtgtcctccctaggactgcctgcaacagaccactgtaggatgttttgagatgtacggactacactgataaaccaccttgtgtaaggttaggacaatcattgtacatgacacttaggatattggtgtgtcatcagatttagttaatcccctctgccccctatggttgagcccctattcgccagtgaccaatcatcttgggtgtacttgtcaagagactgctctgctgtgtgttgacagagctgcttgatgagtaacatcctcctcagccctgaagctataaacatatatgccattacaaacagtgatggaaatcataaagtatggtaggttgtatgcaaggaatgtaacaccttccttctcaaaagtgtcactcccaaaagaatggaaggatgggagtggacatgcc

SEQ ID NO: 428060 - DNA, 2754 bp, Homo sapiens
ggcgcgtcggcgcaggtttccgcagctgagggggcagctccgcggcggcgtccggggtctccagtagggctgacgctccggtgctcgcacaatcccccgcctcggctggcaacgggcgtccctccactccccgagtccccggcagccgccgccaccccagcgcgccccgatctggccccctgccccgcgaagatggctgccgtacgccgggcccgcagttattgccgctgcctggtgcgcttctccgaccgagaactctgctaagctccgctgcagagacaggcaggagtagacacccggacacccagcacccctcctccggggggcggtgcagagggggcacggagagcccctcgagcgcagcaggccgccccgccagcatggcagaagctgaggaagattgtcattctgatactgtcagagcagatgatgatgaagaaaatgaaagtcctgctgaaacagatctgcaggcacaactccagatgttccgagctcagtggatgtttgaacttgctccaggtgtaagctctagcaatttagaaaatcgaccttgcagagcagcaagaggctctctccagaaaacatcggcagataccaaaggaaaacaagaacaggcaaaagaagaaaaggctcgagaactcttcctaaaagcagtagaagaagaacaaaatggagctctctatgaagccatcaagttttatcgtagggctatgcaacttgtacctgatatagagttcaagattacttatacccggtctccagatggtgatggcgttggaaacagctacattgaagataatgatgatgacagcaaaatggcagatctcttgtcctacttccagcagcaactcacatttcaggagtctgtgcttaaactgtgtcagcctgagcttgagagcagtcagattcacatatcagtgctgccaatggaggtcctgatgtacatcttccgatgggtggtgtctagtgacttggacctcagatcattggagcagttgtcgctggtgtgcagaggattctacatctgtgccagagaccctgaaatatggcgtctggcctgcttgaaagtttggggcagaagctgtattaaacttgttccgtacacgtcctggagagagatgtttttagaacggcctcgtgttcggtttgatggcgtgtatatcagtaaaaccacatatattcgtcaaggggaacagtctcttgatggtttctatagagcctggcaccaagtggaatattacaggtacataagattctttcctgatggccatgtgatgatgttgacaacccctgaagagcctcagtccattgttccacgtttaagaactaggaataccaggactgatgcaattctactgggtcactatcgcttgtcacaagacacagacaatcagaccaaagtatttgctgtaataactaagaaaaaagaagaaaaaccacttgactataaatacagatattttcgtcgtgtccctgtacaagaagcagatcagagttttcatgtggggctacagctatgttccagtggtcaccagaggttcaacaaactcatctggatacatcattcttgtcacattacttacaaatcaactggtgagactgcagtcagtgcttttgagattgacaagatgtacacccccttgttcttcgccagagtaaggagctacacagctttctcagaaaggcctctgtagagcctcaagtccagtcctctatcacttttgcatgaattaaagtatatagcgcaaaagaaaaaaaaaaaaaactctctcctcgtgccgaattcggcacgagggactacaacctctcccaggtatgcgacgggaaagtatccgtccacgtcatcgagggtgaccaccgcacgctgctggagggcagcggcctggagtccatcatcagcatcatccacagctccctggctgagccacgcgtgagcgtgcgggagggctaggcccgtgcccccgcctgcaccggaggtcactcaccatccccaccccaccccacccccgccatgcaacgggattgaagggtcctgccggtgggaccctgtccggcccagtgccactgccccccgaggctgctagacgtaggtgttaggcatgtcccacccacccgccgcctcccacggcacctcggggacaccagagctgccgacttggagactcctggtctgtgaagagccggtggtgcccgtgcccgcaggaactgggctgggcctcgtgcgcccgtggggtctgcgcttggtctttctgtgcttggatttgcatatttattgcattgctggtagagacccccaggcctgtccaccctgccaagactcctcaggcagcgtgtgggtcccgcactctgcccccatttccccgatgtcccctgcgggcgcgggcagccacccaagcctgctggctgcggccccctctcggccaggcattggctcagcccgctgagtggggggtcgtgggccagtccccgaggagctgggcccctgcacaggcacacagggcccggccacacccagcggccccccgcacagccacccgtggggtgctgcccttatgcccggcgccgggcaccaactccatgtttggtgtttgtctgtgtttgtttttcaagaaatgattcaaattgctgcttggattttgaaatttactgtaactgtcagtgtacacgtctggaccccgtttcatttttacaccaatttggtaaaaatgctgctctcagcctcccacaattaaaccgcatgtgatctccaaaaaa

SEQ ID NO: 428061 - DNA, 2933 bp, Homo sapiens
ggcgcgtcggcgcaggtttccgcagctgagggggcagctccgcggcggcgtccggggtctccagtagggctgacgctccggtgctcgcacaatcccccgcctcggctggcaacgggcgtccctccactccccgagtccccggcagccgccgccaccccagcgcgccccgatctggccccctgccccgcgaagatggctgccgtacgccgggcccgcagttattgccgctgcctggtgcgcttctccgaccgagaactctgctaagctccgctgcagagacaggcaggagtagacacccggacacccagcacccctcctccggggggcggtgcagagggggcacggagagcccctcgagcgcagcaggccgccccgccagcatggcagaagctgaggaagattgtcattctgatactgtcagagcagatgatgatgaagaaaatgaaagtcctgctgaaacagatctgcaggcacaactccagatgttccgagctcagtggatgtttgaacttgctccaggtgtaagctctagcaatttagaaaatcgaccttgcagagcagcaagaggctctctccagaaaacatcggcagataccaaaggaaaacaagaacaggcaaaagaagaaaaggctcgagaactcttcctaaaagcagtagaagaagaacaaaatggagctctctatgaagccatcaagttttatcgtagggctatgcaacttgtacctgatatagagttcaagattacttatacccggtctccagatggtgatggcgttggaaacagctacattgaagataatgatgatgacagcaaaatggcagatctcttgtcctacttccagcagcaactcacatttcaggagtctgtgcttaaactgtgtcagcctgagcttgagagcagtcagattcacatatcagtgctgccaatggaggtcctgatgtacatcttccgatgggtggtgtctagtgacttggacctcagatcattggagcagttgtcgctggtgtgcagaggattctacatctgtgccagagaccctgaaatatggcgtctggcctgcttgaaagtttggggcagaagctgtattaaacttgttccgtacacgtcctggagagagatgtttttagaacggcctcgtgttcggtttgatggcgtgtatatcagtaaaaccacatatattcgtcaaggggaacagtctcttgatggtttctatagagcctggcaccaagtggaatattacaggtacataagattctttcctgatggccatgtgatgatgttgacaacccctgaagagcctcagtccattgttccacgtttaagaactaggaataccaggactgatgcaattctactgggtcactatcgcttgtcacaagacacagacaatcagaccaaagtatttgctgtaataactaagaaaaaagaagaaaaaaaaaaactcgagactagttctcaaagaaatatgaacctcctgtaccaactagagtggggaaaaagaagaagaaaacaaagggaccagatgctgccagcaaactgccactggtgacacctcacactcagtgccggttaaaattactgaagttagagagaattaaagactatcttctcatggaggaagaattcattagaaatcaggaacaaatgaaaccattagaagaaaagcaagaggaggaaagatcaaaagtggatgatctgagggggaccccgatgtcagtaggaaccttggaagagattattgatgacaatcatgccatcgtgtctacatctgtgggctcagaacactacgtcagcattctttcatttgtagacaaggatctgctggaacctggctgctcggtcctgctcaaccacaaggtgcatgccgtgataggggtgctgatggatgacacggatcccctggtcacagtgatgaaggtagaaaaggccccccaggagacctatgcagatattggggggttggacaaccaaattcaggaaattaaggaatctgtggagcttcctctcacccatcctgaatattatgaagagatgggtataaagcctcctaagggggtcattctctatggtccacctggcacaggtaaaaccttgttagccaaagcagtagcaaaccaaacctcagccactttcttgagagtggttggctctgaacttattcagaagtacctaggtgatgggcccaaactcgtacgggaattgttccgagttgctgaagaacatgcaccgtccatcgtgtttattgatgaaattgacgccattgggacaaaaagatatgactccaattctggtggtgagagagaaattcagcgaacaatgttggaactgctgaaccagttggatggatttgattctaggggagatgtgaaagttatcatggccacaaaccgaatagaaactttggatccagcacttatcagaccaggccgcattgacaggaagattgagttccccctgcctgatgaaaagacgaagaagcgcatctttcagattcacacaagcaggatgacgctggctgatgatgtaaccctggacgacctgatcatggctaaagatgacctctctggtgctgacatcaaggcaatctgtacagaagctggtctgatggccttaagagaacgtagaatgaaagtaacaaatgaagacttcaaaaaatctaaagaaaatgttctttataagaaacaggaaggcacccctgaggggctgtatctctaatgaaccatggctgtcatcaggaaaatggttgggagatttctcaatccctgaaagggatgaggttgggggagttgcccagaggaatccctgttcccactgatttttattagcaaaacatcctgtgtcttttggagtacgatgtgtaagtgcccattgggtggcctgttggtcactgtgcagcagtctgcttcccaataaagcgtgctctttcacaaac

SEQ ID NO: 428062 - DNA, 1588 bp, Homo sapiens
  misc_feature (1)..(2): n is a, c, g, or t
  misc_feature (4)..(4): n is a, c, g, or t
  misc_feature (7)..(8): n is a, c, g, or t
nncncannctccagtctgtctgtgctctcaaaaactttagtcgttataacaactgtgactgttgagaaatttcactgttttcctgcattcctggcgcgggactctagccagaggctccgaggactttgtagcgactgtcccaagcgtccagttcgatgcttctcagggcggcttgctttaagggcccacccctaaatttgggttgtaaaaatttttgaggcagaagctgaggaagattgtcattctgatactgtcagagcagatgatgatgaagaaaatgaaagtcctgctgaaacagatctgcaggcacaactccagatgttccgagctcagtggatgtttgaacttgctccaggtgtaagctctagcaatttagaaaatcgaccttgcagagcagcaagaggctctctccagaaaacatcggcagataccaaaggaaaacaagaacaggcaaaagaagaaaaggctcgagaactcttcctaaaagcagtagaagaagaacaaaatggagctctctatgaagccatcaagttttatcgtagggctatgcaacttgtacctgatatagagttcaagattacttatacccggtctccagatggtgatggcgttggaaacagctacattgaagataatgatgatgacagcaaaatggcagatctcttgtcctacttccagcagcaactcacatttcaggagtctgtgcttaaactgtgtcagcctgagcttgagagcagtcagattcacatatcagtgctgccaatggaggtcctgatgtacatcttccgatgggtggtgtctagtgacttggacctcagatcattggagcagttgtcgctggtgtgcagaggattctacatctgtgccagagaccctgaaatatggcgtctggcctgcttgaaagtttggggcagaagctgtattaaacttgttccgtacacgtcctggagagagatgtttttagaacggcctcgtgttcggtttgatggcgtgtatatcagtaaaaccacatatattcgtcaaggggaacagtctcttgatggtttctatagagcctggcaccaagtggaatattacaggtacataagattctttcctgatggccatgtgatgatgttgacaacccctgaagagcctcagtccattgttccacgtttaagaactaggaataccaggactgatgcaattctactgggtcactatcgcttgtcacaagacacagacaatcagaccaaagtatttgctgtaataactaagaaaaaagaagaaaaaccacttgactataaatacagatattttcgtcgtgtccctgtacaagaagcagatcagagttttcatgtggggctacagctatgttccagtggtcaccagaggttcaacaaactcatctggatacatcattcttgtcacattacttacaaatcaactggtgagactgcagtcagtgcttttgagattgacaagatgtacacccccttgttcttcgccagagtaaggagctacacagctttctcagaaaggcctctgtagagcctcaagtccagtcctctatcacttttgcatgaattaaagtatatagcgcaaaaga

SEQ ID NO: 428063 - DNA, 921 bp, Homo sapiens
tcctatcaccttgttggccacgaaaaaactggcgtctccacttccctctgatgggctcctggagcctgggcagcagcagcctgagagacagagagagttgctttgactgtgactgcaggtttcctgagaaaccacttgactataaatacagatattttcgtcgtgtccctgtacaagaagcagatcagagttttcatgtggggctacagctatgttccagtggtcaccagaggttcaacaaactcatctggatacatcattcttgtcacattacttacaaatcaactggtgagactgcagtcagtgcttttgagattgacaagatgtacacccccttgttcttcgccagagtaaggagctacacagctttctcagaaaggcctctgtagagcctcaagtccagtcctctatcacttttgcatgaattaaagtatatagcgcaaaagagcacctaagttataaatgtgtgtgtgtgtgtgtgtgtgtatatatatatatatatatatatatatatatatatatatatggaattggaacttattttaaattgttggagttcttttaagaagaatataaattgattattttttttatttaaagggatagttgattcctggggtgttttgaaattaagttggaattaagttgcttaagcatatttatgttgtgagaaaccttaatatgaggtttatcatgccctttttcaagcagatttatgagcagatttctgtcacataagtcgtcttctgcttgagtatcctaatatttcaatgcatcaggggagcgctccactggataagcattttatttcccgcatggcatagtgtttttgcactaaaggctcaaagtgtgagaacctgttctggatttgtttgaaattatttcaccaataaagatcataaataaatgtttctttcaaga

SEQ ID NO: 428064 - DNA, 772 bp, Homo sapiens
agagaatatgcttttcagactcattttcctttggaaattaatagtaaggtctcaagtgccccctacagccttgctactcaaagtgggttccacaaagtgttgacagtatggtactaaatagaaagtggctgaatgagaaatgtagattgcagagggcaactggtgtgtttatatgcctgacattatttgggttttcccccctcaggcagaagctgaggaagattgtcattctgatactgtcagagcagatgatgatgaagaaaatgaaagtcctgctgaaacagatctgcaggcacaactccagatgttccgagctcagtggatgtttgaacttgctccaggtgtaagctctagcaatttagaaaatcgaccttgcagagcagcaagaggctctctccagaaaacatcggcagataccaaaggaaaacaagaacaggcaaaagaagaaaagttaagtattatagatattgtaacaaattacattttttttttttggcacatggaaattttcactgacacagtaagtaggcattataaccagactttcgggacataaacacatatcttgtaaaataaaaattttgactagtatactagtttatatatttctcacaatttcttctaggtactttggatggtaccactactcctgcatggcttttttctctgtgggtacactgtcttcattgagctgtcttttgttaatttatagacctctgggattcatgtggttcctaaaagattggtgtctctgaatttattaacagaacca

SEQ ID NO: 428065 - DNA, 3772 bp, Homo sapiens
ggcgcgtcggcgcaggtttccgcagctgagggggcagctccgcggcggcgtccggggtctccagtagggctgacgctccggtgctcgcacaatcccccgcctcggctggcaacgggcgtccctccactccccgagtccccggcagccgccgccaccccagcgcgccccgatctggccccctgccccgcgaagatggctgccgtacgccgggcccgcagttattgccgctgcctggtgcgcttctccgaccgagaactctgctaagctccgctgcagagacaggcaggagtagacacccggacacccagcacccctcctccggggggcggtgcagagggggcacggagagcccctcgagcgcagcaggccgccccgccagcatggcagaagctgaggaagattgtcattctgatactgtcagagcagatgatgatgaagaaaatgaaagtcctgctgaaacagatctgcaggcacaactccagatgttccgagctcagtggatgtttgaacttgctccaggtgtaagctctagcaatttagaaaatcgaccttgcagagcagcaagaggctctctccagaaaacatcggcagataccaaaggaaaacaagaacaggcaaaagaagaaaaggctcgagaactcttcctaaaagcagtagaagaagaacaaaatggagctctctatgaagccatcaagttttatcgtagggctatgcaacttgtacctgatatagagttcaagattacttatacccggtctccagatggtgatggcgttggaaacagctacattgaagataatgatgatgacagcaaaatggcagatctcttgtcctacttccagcagcaactcacatttcaggagtctgtgcttaaactgtgtcagcctgagcttgagagcagtcagattcacatatcagtgctgccaatggaggtcctgatgtacatcttccgatgggtggtgtctagtgacttggacctcagatcattggagcagttgtcgctggtgtgcagaggattctacatctgtgccagagaccctgaaatatggcgtctggcctgcttgaaagtttggggcagaagctgtattaaacttgttccgtacacgtcctggagagagatgtttttagaacggcctcgtgttcggtttgatggcgtgtatatcagtaaaaccacatatattcgtcaaggggaacagtctcttgatggtttctatagagcctggcaccaagtggaatattacaggtacataagattctttcctgatggccatgtgatgatgttgacaacccctgaagagcctcagtccattgttccacgtttaagaactaggaataccaggactgatgcaattctactgggtcactatcgcttgtcacaagacacagacaatcagaccaaagtatttgctgtaataactaagaaaaaagaagaaaaaccacttgactataaatacagatattttcgtcgtgtccctgtacaagaagcagatcagagttttcatgtggggctacagctatgttccagtggtcaccagaggttcaacaaactcatctggatacatcattcttgtcacattacttacaaatcaactggtgagactgcagtcagtgcttttgagattgacaagatgtacacccccttgttcttcgccagagtaaggagctacacagctttctcagaaaggcctctgtagagcctcaagtccagtcctctatcacttttgcatgaattaaagtatatagcgcaaaagagcacctaagttataaatgtgtgtgtgtgtgtgtgtgtgtatatatatatatatatatatatatatatatatatatatatggaattggaacttattttaaattgttggagttcttttaagaagaatataaattgattattttttttatttaaagggatagttgattcctggggtgttttgaaattaagttggaattaagttgcttaagcatatttatgttgtgagaaaccttaatatgaggtttatcatgccctttttcaagcagatttatgagcagatttctgtcacataagtcgtcttctgcttgagtatcctaatatttcaatgcatcaggggagcgctccactggataagcattttatttcccgcatggcatagtgtttttgcactaaaggctcaaagtgtgagaacctgttctggatttgtttgaaattatttcaccaataaagatcataaataaatgtttctttcaagaaaatatatttggatggcctttttaaagtaacaggatatttaataagagtcctagatagccagcggagactttaagaatcattgcctctagctgggtgtggtggcatgcacctgtagtcccagctatttgggaggctgatgcaggagaatagcttaagcccaggaatttgagtctgggagtttgagtccagcatgggcaacataacaagaccccatcccttattaaaagaaaaaaaaataattcctcatttcatcattggtctttatatgtagccacaaacactgacctcatgtaggcaccttaccaatatatgacattaagtgagagtgaatcccttaggactggaacacttcaagctcaaccaactgactcagttgtcattcttcacaaaagaatagtagaggatcatgtaaacctgagcctaactcttgttccagtatgaaagttgggggagagcaccagccacctaggaaaactgtatgttacctttttactcaaaggagtcccccctgcccagtaacagtcctattagtgtttaatttcagagtttgtgtctggtagacctctacctgattcagatttggttttgttgtttcaaccatagttagagacaaattctcatgtactttcagaaatcaatatctgcagccactgttacttttaattgacattaagagacacttcataggttcccacaattcagtatgggataggctttttaaaaagcacatacagaccaggcgtggtggctcatgcctataatcccagcactttgggaggctaagacaggcagatcacctgagctcaggagtccaagaccagcctgggcaacatggcaaaacaccgtctctacaaaaaaaaaaaaaaaaaaaattagccaagtacagtggggcacacctatagtcgcagctacttgggaggctggggcaggagaattgcctgagcctgggaagtggaagttgcagtgagccaagatcgtgccattccactccagcctgagcaacacagtgagaccctatctcaaaaaaataatgatgatagtacacgttatgttaaaggtgaaatgtgcatacagaaggaagagagttggccaggtgtggtgactcacacctataatcccaatactttgggaggccaaggcaggaggattgcttgaggtcaggagttttagaccagcctggacaacatagcaagacctcatctcttctaaaaattaaaaaaaaaaaaaataggcatggtggtacacacctgtggtcccagctagttgggaggctaaggcaggaggatcacttagccaggaggctgaggctacagtgagccaagattgcaccactgtgctccagcctgggtgagaaagcgagaccctgtctcaaaaaagaaaaaaaagagaggttggccttttgtagcaatctgagaagtgtgtttttcaagttggaaaggaaggagaaaagcaacttgcctaagataaggtagctcttcatgatatgactgttatttctgatatacaaataaatagaacatgattaggacatagtcaaatatagct

SEQ ID NO: 428066 - DNA, 2226 bp, Homo sapiens
ggcgcgtcggcgcaggtttccgcagctgagggggcagctccgcggcggcgtccggggtctccagtagggctgacgctccggtgctcgcacaatcccccgcctcggctggcaacgggcgtccctccactccccgagtccccggcagccgccgccaccccagcgcgccccgatctggccccctgccccgcgaagatggctgccgtacgccgggcccgcagttattgccgctgcctggtgcgcttctccgaccgagaactctgctaagctccgctgcagagacaggcaggagtagacacccggacacccagcacccctcctccggggggcggtgcagagggggcacggagagcccctcgagcgcagcaggccgccccgccagcatggcagaagctgaggaagattgtcattctgatactgtcagagcagatgatgatgaagaaaatgaaagtcctgctgaaacagatctgcaggcacaactccagatgttccgagctcagtggatgtttgaacttgctccaggtgtaagctctagcaatttagaaaatcgaccttgcagagcagcaagaggctctctccagaaaacatcggcagataccaaaggaaaacaagaacaggcaaaagaagaaaaggctcgagaactcttcctaaaagcagtagaagaagaacaaaatggagctctctatgaagccatcaagttttatcgtagggctatgcaacttgtacctgatatagagttcaagattacttatacccggtctccagatggtgatggcgttggaaacagctacattgaagataatgatgatgacagcaaaatggcagatctcttgtcctacttccagcagcaactcacatttcaggagtctgtgcttaaactgtgtcagcctgagcttgagagcagtcagattcacatatcagtgctgccaatggaggtcctgatgtacatcttccgatgggtggtgtctagtgacttggacctcagatcattggagcagttgtcgctggtgtgcagaggattctacatctgtgccagagaccctgaaatatggcgtctggcctgcttgaaagtttggggcagaagctgtattaaacttgttccgtacacgtcctggagagagatgtttttagaacggcctcgtgttcggtttgatggcgtgtatatcagtaaaaccacatatattcgtcaaggggaacagtctcttgatggtttctatagagcctggcaccaagtggaatattacaggtacataagattctttcctgatggccatgtgatgatgttgacaacccctgaagagcctcagtccattgttccacgtttaagaactaggaataccaggactgatgcaattctactgggtcactatcgcttgtcacaagacacagacaatcagaccaaagtatttgctgtaataactaagaaaaaagaagaaaaaccacttgactataaatacagatattttcgtcgtgtccctgtacaagaagcagatcagagttttcatgtggggctacagctatgttccagtggtcaccagaggttcaacaaactcatctggatacatcattcttgtcacattacttacaaatcaactggtgagactgcagtcagtgcttttgagattgacaagatgtacacccccttgttcttcgccagagtaaggagctacacagctttctcagaaaggcctctgtagagcctcaagtccagtcctctatcacttttgcatgaattaaagtatatagcgcaaaagagcacctaagttataaatgtgtgtgtgtgtgtgtgtgtgtatatatatatatatatatatatatatatatatatatatatggaattggaacttattttaaattgttggagttcttttaagaagaatataaattgattattttttttatttaaagggatagttgattcctggggtgttttgaaattaagttggaattaagttgcttaagcatatttatgttgtgagaaaccttaatatgaggtttatcatgccctttttcaagcagatttatgagcagatttctgtcacataagtcgtcttctgcttgagtatcctaatatttcaatgcatcaggggagcgctccactggataagcattttatttcccgcatggcatagtgtttttgcactaaaggctcaaagtgtgagaacctgttctggatttgtttgaaattatttcaccaataaagatcataaataaatgtttctttcaaga

SEQ ID NO: 428067 - DNA, 3719 bp, Homo sapiens
ggcgcgtcggcgcaggtttccgcagctgagggggcagctccgcggcggcgtccggggtctccagtagggctgacgctccggtgctcgcacaatcccccgcctcggctggcaacgggcgtccctccactccccgagtccccggcagccgccgccaccccagcgcgccccgatctggccccctgccccgcgaagatggctgccgtacgccgggcccgcagttattgccgctgcctggtgcgcttctccgaccgagaactctgctaagctccgctgcagagacaggcaggagtagacacccggacacccagcacccctcctccggggggcggtgcagagggggcacggagagcccctcgagcgcagcaggccgccccgccagcatggcagaagctgaggaagattgtcattctgatactgtcagagcagatgatgatgaagaaaatgaaagtcctgctgaaacagatctgcaggcacaactccagatgttccgagctcagtggatgtttgaacttgctccaggtgtaagctctagcaatttagaaaatcgaccttgcagagcagcaagaggctctctccagaaaacatcggcagataccaaaggaaaacaagaacaggcaaaagaagaaaaggctcgagaactcttcctaaaagcagtagaagaagaacaaaatggagctctctatgaagccatcaagttttatcgtagggctatgcaacttgtacctgatatagagttcaagattacttatacccggtctccagatggtgatggcgttggaaacagctacattgaagataatgatgatgacagcaaaatggcagatctcttgtcctacttccagcagcaactcacatttcaggagtctgtgcttaaactgtgtcagcctgagcttgagagcagtcagattcacatatcagtgctgccaatggaggtcctgatgtacatcttccgatgggtggtgtctagtgacttggacctcagatcattggagcagttgtcgctggtgtgcagaggattctacatctgtgccagagaccctgaaatatggcgtctggcctgcttgaaagtttggggcagaagctgtattaaacttgttccgtacacgtcctggagagagatgtttttagaacggcctcgtgttcggtttgatggcgtgtatatcagtaaaaccacatatattcgtcaaggggaacagtctcttgatggtttctatagagcctggcaccaagtggaatattacaggtacataagattctttcctgatggccatgtgatgatgttgacaacccctgaagagcctcagtccattgttccacgtttaagaactaggaataccaggactgatgcaattctactgggtcactatcgcttgtcacaagacacagacaatcagaccaaagtatttgctgtaataactaagaaaaaagaagaaaaaccacttgactataaatacagatattttcgtcgtgtccctgtacaagaagcagatcagagttttcatgtggggctacagctatgttccagtggtcaccagaggttcaacaaactcatctggatacatcattcttgtcacattacttacaaatcaactggtgagactgcagtcagtgcttttgagattgacaagatgtacacccccttgttcttcgccagagtaaggagctacacagctttctcagaaaggcctctgtagagcctcaagtccagtcctctatcacttttgcatgaattaaagtatatagcgcaaaagagcacctaagttataaatgtgtgtgtgtgtgtgtgtgtgtatatatatatatatatatatatatatatatatatatatatggaattggaacttattttaaattgttggagttcttttaagaagaatataaattgattattttttttatttaaagggatagttgattcctggggtgttttgaaattaagttggaattaagttgcttaagcatatttatgttgtgagaaaccttaatatgaggtttatcatgccctttttcaagcagatttatgagcagatttctgtcacataagtcgtcttctgcttgagtatcctaatatttcaatgcatcaggggagcgctccactggataagcattttatttcccgcatggcatagtgtttttgcactaaaggctcaaagtgtgagaacctgttctggatttgtttgaaattatttcaccaataaagatcataaataaatgtttctttcaagaaaatatatttggatggcctttttaaagtaacaggatatttaataagagtcctagatagccagcggagactttaagaatcattgcctctagctgggtgtggtggcatgcacctgtagtcccagctatttgggaggctgatgcaggagaatagcttaagcccaggaatttgagtctgggagtttgagtccagcatgggcaacataacaagaccccatcccttattaaaagaaaaactcatgtaggcaccttaccaatatatgacattaagtgagagtgaatcccttaggactggaacacttcaagctcaaccaactgactcagttgtcattcttcacaaaagaatagtagaggatcatgtaaacctgagcctaactcttgttccagtatgaaagttgggggagagcaccagccacctaggaaaactgtatgttacctttttactcaaaggagtcccccctgcccagtaacagtcctattagtgtttaatttcagagtttgtgtctggtagacctctacctgattcagatttggttttgttgtttcaaccatagttagagacaaattctcatgtactttcagaaatcaatatctgcagccactgttacttttaattgacattaagagacacttcataggttcccacaattcagtatgggataggctttttaaaaagcacatacagaccaggcgtggtggctcatgcctataatcccagcactttgggaggctaagacaggcagatcacctgagctcaggagtccaagaccagcctgggcaacatggcaaaacaccgtctctacaaaaaaaaaaaaaaaaaaaattagccaagtacagtggggcacacctatagtcgcagctacttgggaggctggggcaggagaattgcctgagcctgggaagtggaagttgcagtgagccaagatcgtgccattccactccagcctgagcaacacagtgagaccctatctcaaaaaaataatgatgatagtacacgttatgttaaaggtgaaatgtgcatacagaaggaagagagttggccaggtgtggtgactcacacctataatcccaatactttgggaggccaaggcaggaggattgcttgaggtcaggagttttagaccagcctggacaacatagcaagacctcatctcttctaaaaattaaaaaaaaaaaaaataggcatggtggtacacacctgtggtcccagctagttgggaggctaaggcaggaggatcacttagccaggaggctgaggctacagtgagccaagattgcaccactgtgctccagcctgggtgagaaagcgagaccctgtctcaaaaaagaaaaaaaagagaggttggccttttgtagcaatctgagaagtgtgtttttcaagttggaaaggaaggagaaaagcaacttgcctaagataaggtagctcttcatgatatgactgttatttctgatatacaaataaatagaacatgattaggacatagtcaaatatagct

SEQ ID NO: 428068 - DNA, 2048 bp, Homo sapiens
agagaatatgcttttcagactcattttcctttggaaattaatagtaaggtctcaagtgccccctacagccttgctactcaaagtgggttccacaaagtgttgacagtatggtactaaatagaaagtggctgaatgagaaatgtagattgcagagggcaactggtgtgtttatatgcctgacattatttgggttttcccccctcaggcagaagctgaggaagattgtcattctgatactgtcagagcagatgatgatgaagaaaatgaaagtcctgctgaaacagatctgcaggcacaactccagatgttccgagctcagtggatgtttgaacttgctccaggtgtaagctctagcaatttagaaaatcgaccttgcagagcagcaagaggctctctccagaaaacatcggcagataccaaaggaaaacaagaacaggcaaaagaagaaaaggctcgagaactcttcctaaaagcagtagaagaagaacaaaatggagctctctatgaagccatcaagttttatcgtagggctatgcaacttgtacctgatatagagttcaagattacttatacccggtctccagatggtgatggcgttggaaacagctacattgaagataatgatgatgacagcaaaatggcagatctcttgtcctacttccagcagcaactcacatttcaggagtctgtgcttaaactgtgtcagcctgagcttgagagcagtcagattcacatatcagtgctgccaatggaggtcctgatgtacatcttccgatgggtggtgtctagtgacttggacctcagatcattggagcagttgtcgctggtgtgcagaggattctacatctgtgccagagaccctgaaatatggcgtctggcctgcttgaaagtttggggcagaagctgtattaaacttgttccgtacacgtcctggagagagatgtttttagaacggcctcgtgttcggtttgatggcgtgtatatcagtaaaaccacatatattcgtcaaggggaacagtctcttgatggtttctatagagcctggcaccaagtggaatattacaggtacataagattctttcctgatggccatgtgatgatgttgacaacccctgaagagcctcagtccattgttccacgtttaagaactaggaataccaggactgatgcaattctactgggtcactatcgcttgtcacaagacacagacaatcagaccaaagtatttgctgtaataactaagaaaaaagaagaaaaaccacttgactataaatacagatattttcgtcgtgtccctgtacaagaagcagatcagagttttcatgtggggctacagctatgttccagtggtcaccagaggttcaacaaactcatctggatacatcattcttgtcacattacttacaaatcaactggtgagactgcagtcagtgcttttgagattgacaagatgtacacccccttgttcttcgccagagtaaggagctacacagctttctcagaaaggcctctgtagagcctcaagtccagtcctctatcacttttgcatgaattaaagtatatagcgcaaaagagcacctaagttataaatgtgtgtgtgtgtgtgtgtgtgtatatatatatatatatatatatatatatatatatatatatggaattggaacttattttaaattgttggagttcttttaagaagaatataaattgattattttttttatttaaagggatagttgattcctggggtgttttgaaattaagttggaattaagttgcttaagcatatttatgttgtgagaaaccttaatatgaggtttatcatgccctttttcaagcagatttatgagcagatttctgtcacataagtcgtcttctgcttgagtatcctaatatttcaatgcatcaggggagcgctccactggataagcattttatttcccgcatggcatagtgtttttgcactaaaggctcaaagtgtgagaacctgttctggatttgtttgaaattatttcaccaataaagatcataaataaatgtttctttcaaga

SEQ ID NO: 428069 - DNA, 3740 bp, Homo sapiens
  misc_feature (1824)..(1824): n is a, c, g, or t
  misc_feature (1853)..(1854): n is a, c, g, or t
  misc_feature (1857)..(1857): n is a, c, g, or t
  misc_feature (1862)..(1863): n is a, c, g, or t
  misc_feature (1865)..(1865): n is a, c, g, or t
  misc_feature (1871)..(1871): n is a, c, g, or t
  misc_feature (1873)..(1873): n is a, c, g, or t
  misc_feature (1875)..(1875): n is a, c, g, or t
  misc_feature (1877)..(1877): n is a, c, g, or t
  misc_feature (1879)..(1879): n is a, c, g, or t
  misc_feature (1882)..(1882): n is a, c, g, or t
ggcgcgtcggcgcaggtttccgcagctgagggggcagctccgcggcggcgtccggggtctccagtagggctgacgctccggtgctcgcacaatcccccgcctcggctggcaacgggcgtccctccactccccgagtccccggcagccgccgccaccccagcgcgccccgatctggccccctgccccgcgaagatggctgccgtacgccgggcccgcagttattgccgctgcctggtgcgcttctccgaccgagaactctgctaagctccgctgcagagacaggcaggagtagacacccggacacccagcacccctcctccggggggcggtgcagagggggcacggagagcccctcgagcgcagcaggccgccccgccagcatggcagaagctgaggaagattgtcattctgatactgtcagagcagatgatgatgaagaaaatgaaagtcctgctgaaacagatctgcaggcacaactccagatgttccgagctcagtggatgtttgaacttgctccaggtgtaagctctagcaatttagaaaatcgaccttgcagagcagcaagaggctctctccagaaaacatcggcagataccaaaggaaaacaagaacaggcaaaagaagaaaaggctcgagaactcttcctaaaagcagtagaagaagaacaaaatggagctctctatgaagccatcaagttttatcgtagggctatgcaacttgtacctgatatagagttcaagattacttatacccggtctccagatggtgatggcgttggaaacagctacattgaagataatgatgatgacagcaaaatggcagatctcttgtcctacttccagcagcaactcacatttcaggagtctgtgcttaaactgtgtcagcctgagcttgagagcagtcagattcacatatcagtgctgccaatggaggtcctgatgtacatcttccgatgggtggtgtctagtgacttggacctcagatcattggagcagttgtcgctggtgtgcagaggattctacatctgtgccagagaccctgaaatatggcgtctggcctgcttgaaagtttggggcagaagctgtattaaacttgttccgtacacgtcctggagagagatgtttttagaacggcctcgtgttcggtttgatggcgtgtatatcagtaaaaccacatatattcgtcaaggggaacagtctcttgatggtttctatagagcctggcaccaagtggaatattacaggtacataagattctttcctgatggccatgtgatgatgttgacaacccctgaagagcctcagtccattgttccacgtttaagaactaggaataccaggactgatgcaattctactgggtcactatcgcttgtcacaagacacagacaatcagaccaaagtatttgctgtaataactaagaaaaaagaagaaaaaccacttgactataaatacagatattttcgtcgtgtccctgtacaagaagcagatcagagttttcatgtggggctacagctatgttccagtggtcaccagaggttcaacaaactcatctggatacatcattcttgtcacattacttacaaatcaactggtgagactgcagtcagtgcttttgagattgacaagatgtacacccccttgttcttcgccagagtaaggagctacacagctttctcagaaaggcctctgtagagcctcaagtccagtcctctatcacttttgcatgaattaaagtatatagcgcaaaagagcacctaagttataaatgtgtgtgtgtgtgtgtgtgtgtatatatatatatatatatatatatacacacacncacacacacacacacacacacacacacannccnctgcnncnattttncnangncncanttcttttaagaagaatataaattgattattttttttatttaaagggatagttgattcctggggtgttttgaaattaagttggaattaagttgcttaagcatatttatgttgtgagaaaccttaatatgaggtttatcatgccctttttcaagcagatttatgagcagatttctgtcacataagtcgtcttctgcttgagtatcctaatatttcaatgcatcaggggagcgctccactggataagcattttatttcccgcatggcatagtgtttttgcactaaaggctcaaagtgtgagaacctgttctggatttgtttgaaattatttcaccaataaagatcataaataaatgtttctttcaagaaaatatatttggatggcctttttaaagtaacaggatatttaataagagtcctagatagccagcggagactttaagaatcattgcctctagctgggtgtggtggcatgcacctgtagtcccagctatttgggaggctgatgcaggagaatagcttaagcccaggaatttgagtctgggagtttgagtccagcatgggcaacataacaagaccccatcccttattaaaagaaaaactcatgtaggcaccttaccaatatatgacattaagtgagagtgaatcccttaggactggaacacttcaagctcaaccaactgactcagttgtcattcttcacaaaagaatagtagaggatcatgtaaacctgagcctaactcttgttccagtatgaaagttgggggagagcaccagccacctaggaaaactgtatgttacctttttactcaaaggagtcccccctgcccagtaacagtcctattagtgtttaatttcagagtttgtgtctggtagacctctacctgattcagatttggttttgttgtttcaaccatagttagagacaaattctcatgtactttcagaaatcaatatctgcagccactgttacttttaattgacattaagagacacttcataggttcccacaattcagtatgggataggctttttaaaaagcacatacagaccaggcgtggtggctcatgcctataatcccagcactttgggaggctaagacaggcagatcacctgagctcaggagtccaagaccagcctgggcaacatggcaaaacaccgtctctacaaaaaaaaaaaaaaaaaaaattagccaagtacagtggggcacacctatagtcgcagctacttgggaggctggggcaggagaattgcctgagcctgggaagtggaagttgcagtgagccaagatcgtgccattccactccagcctgagcaacacagtgagaccctatctcaaaaaaataatgatgatagtacacgttatgttaaaggtgaaatgtgcatacagaaggaagagagttggccaggtgtggtgactcacacctataatcccaatactttgggaggccaaggcaggaggattgcttgaggtcaggagttttagaccagcctggacaacatagcaagacctcatctcttctaaaaattaaaaaaaaaaaaaataggcatggtggtacacacctgtggtcccagctagttgggaggctaaggcaggaggatcacttagccaggaggctgaggctacagtgagccaagattgcaccactgtgctccagcctgggtgagaaagcgagaccctgtctcaaaaaagaaaaaaaagagaggttggccttttgtagcaatctgagaagtgtgtttttcaagttggaaaggaaggagaaaagcaacttgcctaagataaggtagctcttcatgatatgactgttatttctgatatacaaataaatagaacatgattaggacatagtcaaatatagct

SEQ ID NO: 428070 - DNA, 2300 bp, Homo sapiens
  misc_feature (177)..(177): n is a, c, g, or t
aggcgtcgtgagacacgttcgcgcggctgacggggccggctccgtgaagggagctactggggatcatccatgtaggcgtaggacagcatccgtggtgtcatcgcaactaagtgcctctgggcacttccgtgcactggacaatacagagagacagcgtcccgcgcaggtcacaccggnagtcgctccgtggaagcacagatcgcacgaatgcgagttgctggcagcggtcattaggtggcatcttatcaggcagagagatcgcgaatgcgagctcgagatcaacagttactgcactccgccgctgcctggtgcgcttctccgaccgagaactctgctaagctccgctgcagagacaggcaggagtagacacccggacacccagcacccctcctccggggggcggtgcagagggggcacggagagcccctcgagcgcagcaggccgccccgccagcatggcagaagctgaggaagattgtcattctgatactgtcagagcagatgatgatgaagaaaatgaaagtcctgctgaaacagatctgcaggcacaactccagatgttccgagctcagtggatgtttgaacttgctccaggtgtaagctctagcaatttagaaaatcgaccttgcagagcagcaagaggctctctccagaaaacatcggcagataccaaaggaaaacaagaacaggcaaaagaagaaaaggctcgagaactcttcctaaaagcagtagaagaagaacaaaatggagctctctatgaagccatcaagttttatcgtagggctatgcaacttgtacctgatatagagttcaagattacttatacccggtctccagatggtgatggcgttggaaacagctacattgaagataatgatgatgacagcaaaatggcagatctcttgtcctacttccagcagcaactcacatttcaggagtctgtgcttaaactgtgtcagcctgagcttgagagcagtcagattcacatatcagtgctgccaatggaggtcctgatgtacatcttccgatgggtggtgtctagtgacttggacctcagatcattggagcagttgtcgctggtgtgcagaggattctacatctgtgccagagaccctgaaatatggcgtctggcctgcttgaaagtttggggcagaagctgtattaaacttgttccgtacacgtcctggagagagatgtttttagaacggcctcgtgttcggtttgatggcgtgtatatcagtaaaaccacatatattcgtcaaggggaacagtctcttgatggtttctatagagcctggcaccaagtggaatattacaggtacataagattctttcctgatggccatgtgatgatgttgacaacccctgaagagcctcagtccattgttccacgtttaagaactaggaataccaggactgatgcaattctactgggtcactatcgcttgtcacaagacacagacaatcagaccaaagtatttgctgtaataactaagaaaaaagaagaaaaaccacttgactataaatacagatattttcgtcgtgtccctgtacaagaagcagatcagagttttcatgtggggctacagctatgttccagtggtcaccagaggttcaacaaactcatctggatacatcattcttgtcacattacttacaaatcaactggtgagactgcagtcagtgcttttgagattgacaagatgtacacccccttgttcttcgccagagtaaggagctacacagctttctcagaaaggcctctgtagagcctcaagtccagtcctctatcacttttgcatgaattaaagtatatagcgcaaaagagcacctaagttataaatgtgtgtgtgtgtgtgtgtgtgtatatatatatatatatatatatatatatatatatatatatggaattggaacttattttaaattgttggagttcttttaagaagaatataaattgattattttttttatttaaagggatagttgattcctggggtgttttgaaattaagttggaattaagttgcttaagcatatttatgttgtgagaaaccttaatatgaggtttatcatgccctttttcaagcagatttatgagcagatttctgtcacataagtcgtcttctgcttgagtatcctaatatttcaatgcatcaggggagcgctccactggataagcattttatttcccgcatggcatagtgtttttgcactaaaggctcaaagtgtgagaacctgttctggatttgtttgaaattatttcaccaataaagatcataaataaatgtttctttcaaga

SEQ ID NO: 428071 - DNA, 2062 bp, Homo sapiens
  misc_feature (1)..(2): n is a, c, g, or t
  misc_feature (4)..(4): n is a, c, g, or t
  misc_feature (7)..(8): n is a, c, g, or t
nncncannctccagtctgtctgtgctctcaaaaactttagtcgttataacaactgtgactgttgagaaatttcactgttttcctgcattcctggcgcgggactctagccagaggctccgaggactttgtagcgactgtcccaagcgtccagttcgatgcttctcagggcggcttgctttaagggcccacccctaaatttgggttgtaaaaatttttgaggcagaagctgaggaagattgtcattctgatactgtcagagcagatgatgatgaagaaaatgaaagtcctgctgaaacagatctgcaggcacaactccagatgttccgagctcagtggatgtttgaacttgctccaggtgtaagctctagcaatttagaaaatcgaccttgcagagcagcaagaggctctctccagaaaacatcggcagataccaaaggaaaacaagaacaggcaaaagaagaaaaggctcgagaactcttcctaaaagcagtagaagaagaacaaaatggagctctctatgaagccatcaagttttatcgtagggctatgcaacttgtacctgatatagagttcaagattacttatacccggtctccagatggtgatggcgttggaaacagctacattgaagataatgatgatgacagcaaaatggcagatctcttgtcctacttccagcagcaactcacatttcaggagtctgtgcttaaactgtgtcagcctgagcttgagagcagtcagattcacatatcagtgctgccaatggaggtcctgatgtacatcttccgatgggtggtgtctagtgacttggacctcagatcattggagcagttgtcgctggtgtgcagaggattctacatctgtgccagagaccctgaaatatggcgtctggcctgcttgaaagtttggggcagaagctgtattaaacttgttccgtacacgtcctggagagagatgtttttagaacggcctcgtgttcggtttgatggcgtgtatatcagtaaaaccacatatattcgtcaaggggaacagtctcttgatggtttctatagagcctggcaccaagtggaatattacaggtacataagattctttcctgatggccatgtgatgatgttgacaacccctgaagagcctcagtccattgttccacgtttaagaactaggaataccaggactgatgcaattctactgggtcactatcgcttgtcacaagacacagacaatcagaccaaagtatttgctgtaataactaagaaaaaagaagaaaaaccacttgactataaatacagatattttcgtcgtgtccctgtacaagaagcagatcagagttttcatgtggggctacagctatgttccagtggtcaccagaggttcaacaaactcatctggatacatcattcttgtcacattacttacaaatcaactggtgagactgcagtcagtgcttttgagattgacaagatgtacacccccttgttcttcgccagagtaaggagctacacagctttctcagaaaggcctctgtagagcctcaagtccagtcctctatcacttttgcatgaattaaagtatatagcgcaaaagagcacctaagttataaatgtgtgtgtgtgtgtgtgtgtgtatatatatatatatatatatatatatatatatatatatatggaattggaacttattttaaattgttggagttcttttaagaagaatataaattgattattttttttatttaaagggatagttgattcctggggtgttttgaaattaagttggaattaagttgcttaagcatatttatgttgtgagaaaccttaatatgaggtttatcatgccctttttcaagcagatttatgagcagatttctgtcacataagtcgtcttctgcttgagtatcctaatatttcaatgcatcaggggagcgctccactggataagcattttatttcccgcatggcatagtgtttttgcactaaaggctcaaagtgtgagaacctgttctggatttgtttgaaattatttcaccaataaagatcataaataaatgtttctttcaaga

SEQ ID NO: 428072 - DNA, 1868 bp, Homo sapiens
acaaacttccagatgtgtttcagcaggactttcattttcttcatcatcatctgctctgacagtatcagatgatgatgaagaaaatgaaagtcctgctgaaacagatctgcaggcacaactccagatgttccgagctcagtggatgtttgaacttgctccaggtgtaagctctagcaatttagaaaatcgaccttgcagagcagcaagaggctctctccagaaaacatcggcagataccaaaggaaaacaagaacaggcaaaagaagaaaaggctcgagaactcttcctaaaagcagtagaagaagaacaaaatggagctctctatgaagccatcaagttttatcgtagggctatgcaacttgtacctgatatagagttcaagattacttatacccggtctccagatggtgatggcgttggaaacagctacattgaagataatgatgatgacagcaaaatggcagatctcttgtcctacttccagcagcaactcacatttcaggagtctgtgcttaaactgtgtcagcctgagcttgagagcagtcagattcacatatcagtgctgccaatggaggtcctgatgtacatcttccgatgggtggtgtctagtgacttggacctcagatcattggagcagttgtcgctggtgtgcagaggattctacatctgtgccagagaccctgaaatatggcgtctggcctgcttgaaagtttggggcagaagctgtattaaacttgttccgtacacgtcctggagagagatgtttttagaacggcctcgtgttcggtttgatggcgtgtatatcagtaaaaccacatatattcgtcaaggggaacagtctcttgatggtttctatagagcctggcaccaagtggaatattacaggtacataagattctttcctgatggccatgtgatgatgttgacaacccctgaagagcctcagtccattgttccacgtttaagaactaggaataccaggactgatgcaattctactgggtcactatcgcttgtcacaagacacagacaatcagaccaaagtatttgctgtaataactaagaaaaaagaagaaaaaccacttgactataaatacagatattttcgtcgtgtccctgtacaagaagcagatcagagttttcatgtggggctacagctatgttccagtggtcaccagaggttcaacaaactcatctggatacatcattcttgtcacattacttacaaatcaactggtgagactgcagtcagtgcttttgagattgacaagatgtacacccccttgttcttcgccagagtaaggagctacacagctttctcagaaaggcctctgtagagcctcaagtccagtcctctatcacttttgcatgaattaaagtatatagcgcaaaagagcacctaagttataaatgtgtgtgtgtgtgtgtgtgtgtatatatatatatatatatatatatatatatatatatatatggaattggaacttattttaaattgttggagttcttttaagaagaatataaattgattattttttttatttaaagggatagttgattcctggggtgttttgaaattaagttggaattaagttgcttaagcatatttatgttgtgagaaaccttaatatgaggtttatcatgccctttttcaagcagatttatgagcagatttctgtcacataagtcgtcttctgcttgagtatcctaatatttcaatgcatcaggggagcgctccactggataagcattttatttcccgcatggcatagtgtttttgcactaaaggctcaaagtgtgagaacctgttctggatttgtttgaaattatttcaccaataaagatcataaataaatgtttctttcaaga

SEQ ID NO: 428073 - DNA, 2867 bp, Homo sapiens
ggcgcgtcggcgcaggtttccgcagctgagggggcagctccgcggcggcgtccggggtctccagtagggctgacgctccggtgctcgcacaatcccccgcctcggctggcaacgggcgtccctccactccccgagtccccggcagccgccgccaccccagcgcgccccgatctggccccctgccccgcgaagatggctgccgtacgccgggcccgcagttattgccgctgcctggtgcgcttctccgaccgagaactctgctaagctccgctgcagagacaggcaggagtagacacccggacacccagcacccctcctccggggggcggtgcagagggggcacggagagcccctcgagcgcagcaggccgccccgccagcatggcagaagctgaggaagattgtcattctgatactgtcagagcagatgatgatgaagaaaatgaaagtcctgctgaaacagatctgcaggcacaactccagatgttccgagctcagtggatgtttgaacttgctccaggtgtaagctctagcaatttagaaaatcgaccttgcagagcagcaagaggctctctccagaaaacatcggcagataccaaaggaaaacaagaacaggcaaaagaagaaaaggctcgagaactcttcctaaaagcagtagaagaagaacaaaatggagctctctatgaagccatcaagttttatcgtagggctatgcaacttgtacctgatatagagttcaagattacttatacccggtctccagatggtgatggcgttggaaacagctacattgaagataatgatgatgacagcaaaatggcagatctcttgtcctacttccagcagcaactcacatttcaggagtctgtgcttaaactgtgtcagcctgagcttgagagcagtcagattcacatatcagtgctgccaatggaggtcctgatgtacatcttccgatgggtggtgtctagtgacttggacctcagatcattggagcagttgtcgctggtgtgcagaggattctacatctgtgccagagaccctgaaatatggcgtctggcctgcttgaaagtttggggcagaagctgtattaaacttgttccgtacacgtcctggagagagatgtttttagaacggcctcgtgttcggtttgatggcgtgtatatcagtaaaaccacatatattcgtcaaggggaacagtctcttgatggtttctatagagcctggcaccaagtggaatattacaggtacaactgtagtacactgagtgagtggaaaattctctctctccatgtattagttaaatggacatctgttctttgttgcttttgattgacccgcaaaatggccctcagtatttttatctagtactcaatgtaggaattgcactaaaaaaaaaaataggctaatataaattacagaatttcttctggcctcttttagatttcttcttgtcttttgccctgggtgtatttacttgccttttcaaatagcttgtgcttttattccaccttattgcttgccaaatattattgtcatttagaaaaaaatagacatgttaaccgttgtgtgtggctctcactttgtttgaaattgttgctttgggaaaaacacagaactttaataaaacaatatttgacttttattcagtgagtaaaacttaaaagttcaacagtttcccctgaggaagataaaatatctttggttctttgttgctggactaacaggtagtcagtaatatttgttttaatgttttagcagttctttagcccgtggtatttcagtgttggtttcatagctatgaataggcataggtactaatagataaggacatattttatactttgtgtggggggtgtgttttggtcttccttttcttattacataggtacataagattctttcctgatggccatgtgatgatgttgacaacccctgaagagcctcagtccattgttccacgtttaagaactaggaataccaggactgatgcaattctactgggtcactatcgcttgtcacaagacacagacaatcagaccaaagtatttgctgtaataactaagaaaaaagaagaaaaaccacttgactataaatacagatattttcgtcgtgtccctgtacaagaagcagatcagagttttcatgtggggctacagctatgttccagtggtcaccagaggttcaacaaactcatctggatacatcattcttgtcacattacttacaaatcaactggtgagactgcagtcagtgcttttgagattgacaagatgtacacccccttgttcttcgccagagtaaggagctacacagctttctcagaaaggcctctgtagagcctcaagtccagtcctctatcacttttgcatgaattaaagtatatagcgcaaaagagcacctaagttataaatgtgtgtgtgtgtgtgtgtgtgtatatatatatatatatatatatatatatatatatatatatggaattggaacttattttaaattgttggagttcttttaagaagaatataaattgattattttttttatttaaagggatagttgattcctggggtgttttgaaattaagttggaattaagttgcttaagcatatttatgttgtgagaaaccttaatatgaggtttatcatgccctttttcaagcagatttatgagcagatttctgtcacataagtcgtcttctgcttgagtatcctaatatttcaatgcatcaggggagcgctccactggataagcattttatttcccgcatggcatagtgtttttgcactaaaggctcaaagtgtgagaacctgttctggatttgtttgaaattatttcaccaataaagatcataaataaatgtttctttcaaga

SEQ ID NO: 428074 - DNA, 1752 bp, Homo sapiens
ggcgcgtcggcgcaggtttccgcagctgagggggcagctccgcggcggcgtccggggtctccagtagggctgacgctccggtgctcgcacaatcccccgcctcggctggcaacgggcgtccctccactccccgagtccccggcagccgccgccaccccagcgcgccccgatctggccccctgccccgcgaagatggctgccgtacgccgggcccgcagttattgccgctgcctggtgcgcttctccgaccgagaactctgctaagctccgctgcagagacaggcaggagtagacacccggacacccagcacccctcctccggggggcggtgcagagggggcacggagagcccctcgagcgcagcaggccgccccgccagcatggcagaagctgaggaagattgtcattctgatactgtcagagcagatgatgatgaagaaaatgaaagtcctgctgaaacagatctgcaggcacaactccagatgttccgagctcagtggatgtttgaacttgctccaggtgtaagctctagcaatttagaaaatcgaccttgcagagcagcaagaggctctctccagaaaacatcggcagataccaaaggaaaacaagaacaggcaaaagaagaaaaggctcgagaactcttcctaaaagcagtagaagaagaacaaaatggagctctctatgaagccatcaagttttatcgtagggctatgcaacttgtacctgatatagagttcaagattacttatacccggtctccagatggtgatggcgttggaaacagctacattgaagataatgatgatgacagcaaaatggcagatctcttgtcctacttccagcagcaactcacatttcaggagtctgtgcttaaactgtgtcagcctgagcttgagagcagtcagattcacatatcagtgctgccaatggaggtcctgatgtacatcttccgatgggtggtgtctagtgacttggacctcagatcattggagcagttgtcgctggtgtgcagaggattctacatctgtgccagagaccctgaaatatggcgtctggcctgcttgaaagtttggggcagaagctgtattaaacttgttccgtacacgtcctggagagagatgtttttagaacggcctcgtgttcggtttgatggcgtgtatatcagtaaaaccacatatattcgtcaaggggaacagtctcttgatggtttctatagagcctggcaccaagtggaatattacaggtacataagattctttcctgatggccatgtgatgatgttgacaacccctgaagagcctcagtccattgttccacgtttaagaactaggaataccaggactgatgcaattctactgggtcactatcgcttgtcacaagacacagacaatcagaccaaagtatttgctgtaataactaagaaaaaagaagaaaaaccacttgactataaatacagatattttcgtcgtgtccctgtacaagaagcagatcagagttttcatgtggggctacagctatgttccagtggtcaccagaggttcaacaaactcatctggatacatcattcttgtcacattacttacaaatcaactggtgagactgcagtcagtgcttttgagattgacaagatgtacacccccttgttcttcgccagagtaaggagctacacagctttctcagaaaggcctctgtagagcctcaagtccagtcctctatcacttttgcatgaattaaagtatatagcgcaaaaga

SEQ ID NO: 428075 - DNA, 1711 bp, Homo sapiens
agtgcaattcctacattgagtactagataaaaatactgagggccattttgcggctctctccagaaaacatcggcagataccaaaggaaaacaagaacaggcaaaagaagaaaaggctcgagaactcttcctaaaagcagtagaagaagaacaaaatggagctctctatgaagccatcaagttttatcgtagggctatgcaacttgtacctgatatagagttcaagattacttatacccggtctccagatggtgatggcgttggaaacagctacattgaagataatgatgatgacagcaaaatggcagatctcttgtcctacttccagcagcaactcacatttcaggagtctgtgcttaaactgtgtcagcctgagcttgagagcagtcagattcacatatcagtgctgccaatggaggtcctgatgtacatcttccgatgggtggtgtctagtgacttggacctcagatcattggagcagttgtcgctggtgtgcagaggattctacatctgtgccagagaccctgaaatatggcgtctggcctgcttgaaagtttggggcagaagctgtattaaacttgttccgtacacgtcctggagagagatgtttttagaacggcctcgtgttcggtttgatggcgtgtatatcagtaaaaccacatatattcgtcaaggggaacagtctcttgatggtttctatagagcctggcaccaagtggaatattacaggtacataagattctttcctgatggccatgtgatgatgttgacaacccctgaagagcctcagtccattgttccacgtttaagaactaggaataccaggactgatgcaattctactgggtcactatcgcttgtcacaagacacagacaatcagaccaaagtatttgctgtaataactaagaaaaaagaagaaaaaccacttgactataaatacagatattttcgtcgtgtccctgtacaagaagcagatcagagttttcatgtggggctacagctatgttccagtggtcaccagaggttcaacaaactcatctggatacatcattcttgtcacattacttacaaatcaactggtgagactgcagtcagtgcttttgagattgacaagatgtacacccccttgttcttcgccagagtaaggagctacacagctttctcagaaaggcctctgtagagcctcaagtccagtcctctatcacttttgcatgaattaaagtatatagcgcaaaagagcacctaagttataaatgtgtgtgtgtgtgtgtgtgtgtatatatatatatatatatatatatatatatatatatatatggaattggaacttattttaaattgttggagttcttttaagaagaatataaattgattattttttttatttaaagggatagttgattcctggggtgttttgaaattaagttggaattaagttgcttaagcatatttatgttgtgagaaaccttaatatgaggtttatcatgccctttttcaagcagatttatgagcagatttctgtcacataagtcgtcttctgcttgagtatcctaatatttcaatgcatcaggggagcgctccactggataagcattttatttcccgcatggcatagtgtttttgcactaaaggctcaaagtgtgagaacctgttctggatttgtttgaaattatttcaccaataaagatcataaataaatgtttctttcaaga

SEQ ID NO: 428076 - DNA, 2304 bp, Homo sapiens
ggcgcgtcggcgcaggtttccgcagctgagggggcagctccgcggcggcgtccggggtctccagtagggctgacgctccggtgctcgcacaatcccccgcctcggctggcaacgggcgtccctccactccccgagtccccggcagccgccgccaccccagcgcgccccgatctggccccctgccccgcgaagatggctgccgtacgccgggcccgcagttattgccgctgcctggtgcgcttctccgaccgagaactctgctaagctccgctgcagagacaggcaggagtagacacccggacacccagcacccctcctccggggggcggtgcagagggggcacggagagcccctcgagcgcagcaggccgccccgccagcatggcagaagctgaggaagattgtcattctgatactgtcagagcagatgatgatgaagaaaatgaaagtcctgctgaaacagatctgcaggcacaactccagatgttccgagctcagtggatgtttgaacttgctccaggtgtaagctctagcaatttagaaaatcgaccttgcagagcagcaagaggctctctccagaaaacatcggcagataccaaaggaaaacaagaacaggcaaaagaagaaaaggctcgagaactcttcctaaaagcagtagaagaagaacaaaatggagctctctatgaagccatcaagttttatcgtagggctatgcaacttgtacctgatatagagttcaagattacttatacccggtctccagatggtgatggcgttggaaacagctacattgaagataatgatgatgacagcaaaatggcagatctcttgtcctacttccagcagcaactcacatttcaggagtctgtgcttaaactgtgtcagcctgagcttgagagcagtcagattcacatatcagtgctgccaatggaggtcctgatgtacatcttccgatgggtggtgtctagtgacttggacctcagatcattggagcagttgtcgctggtgtgcagaggattctacatctgtgccagttggcgtgttgtagtccaatcctggaggaaactaggagaattcatcaaacagtccggtgtacgtgtggataacaacagagaccctgaaatatggcgtctggcctgcttgaaagtttggggcagaagctgtattaaacttgttccgtacacgtcctggagagagatgtttttagaacggcctcgtgttcggtttgatggcgtgtatatcagtaaaaccacatatattcgtcaaggggaacagtctcttgatggtttctatagagcctggcaccaagtggaatattacaggtacataagattctttcctgatggccatgtgatgatgttgacaacccctgaagagcctcagtccattgttccacgtttaagaactaggaataccaggactgatgcaattctactgggtcactatcgcttgtcacaagacacagacaatcagaccaaagtatttgctgtaataactaagaaaaaagaagaaaaaccacttgactataaatacagatattttcgtcgtgtccctgtacaagaagcagatcagagttttcatgtggggctacagctatgttccagtggtcaccagaggttcaacaaactcatctggatacatcattcttgtcacattacttacaaatcaactggtgagactgcagtcagtgcttttgagattgacaagatgtacacccccttgttcttcgccagagtaaggagctacacagctttctcagaaaggcctctgtagagcctcaagtccagtcctctatcacttttgcatgaattaaagtatatagcgcaaaagagcacctaagttataaatgtgtgtgtgtgtgtgtgtgtgtatatatatatatatatatatatatatatatatatatatatggaattggaacttattttaaattgttggagttcttttaagaagaatataaattgattattttttttatttaaagggatagttgattcctggggtgttttgaaattaagttggaattaagttgcttaagcatatttatgttgtgagaaaccttaatatgaggtttatcatgccctttttcaagcagatttatgagcagatttctgtcacataagtcgtcttctgcttgagtatcctaatatttcaatgcatcaggggagcgctccactggataagcattttatttcccgcatggcatagtgtttttgcactaaaggctcaaagtgtgagaacctgttctggatttgtttgaaattatttcaccaataaagatcataaataaatgtttctttcaaga

SEQ ID NO: 428077 - DNA, 2508 bp, Homo sapiens
ggcgcgtcggcgcaggtttccgcagctgagggggcagctccgcggcggcgtccggggtctccagtagggctgacgctccggtgctcgcacaatcccccgcctcggctggcaacgggcgtccctccactccccgagtccccggcagccgccgccaccccagcgcgccccgatctggccccctgccccgcgaagatggctgccgtacgccgggcccgcagttattgccgctgcctggtgcgcttctccgaccgagaactctgctaagctccgctgcagagacaggcaggagtagacacccggacacccagcacccctcctccggggggcggtgcagagggggcacggagagcccctcgagcgcagcaggccgccccgccagcatggcagaagctgaggaagattgtcattctgatactgtcagagcagatgatgatgaagaaaatgaaagtcctgctgaaacagatctgcaggcacaactccagatgttccgagctcagtggatgtttgaacttgctccaggtgtaagctctagcaatttagaaaatcgaccttgcagagcagcaagaggctctctccagaaaacatcggcagataccaaaggaaaacaagaacaggcaaaagaagaaaaggctcgagaactcttcctaaaagcagtagaagaagaacaaaatggagctctctatgaagccatcaagttttatcgtagggctatgcaacttgtacctgatatagagttcaagattacttatacccggtctccagatggtgatggcgttggaaacagctacattgaagataatgatgatgacagcaaaatggcagatctcttgtcctacttccagcagcaactcacatttcaggagtctgtgcttaaactgtgtcagcctgagcttgagagcagtcagattcacatatcagtgctgccaatggaggtcctgatgtacatcttccgatgggtggtgtctagtgacttggacctcagatcattggagcagttgtcgctggtgtgcagaggattctacatctgtgccagagaccctgaaatatggcgtctggcctgcttgaaagtttggggcagaagctgtattaaacttgttccgtacacgtcctggagagagatgtttttagaacggcctcgtgttcggtttgatggcgtgtatatcagtaaaaccacatatattcgtcaaggggaacagtctcttgatggtttctatagagcctggcaccaagtggaatattacaggtacataagattctttcctgatggccatgtgatgatgttgacaacccctgaagagcctcagtccattgttccacgtttaagaactaggaataccaggactgatgcaattctactgggtcactatcgcttgtcacaagacacagacaatcagaccaaagtatttgctgtaataactaagaaaaaagaagaaaaaccacttgactataaatacagatattttcgtcgtgtccctgtacaagaagcagatcagagttttcatgtggggctacagctatgttccagtggtcaccagaggttcaacaaactcatctggatacatcattcttgtcacattacttacaaatcaactggtgagactgcagtcagtgcttttgagattgacaagatgtacacccccttgttcttcgccagagtaaggagctacacagctttctcagaaaggcctctgtagagcctcaagtccagtcctctatcacttttgcatgaattaaagtatatagcgcaaaagaaaaaaaaaaaaaaaaaaaaaaaaaaaaaaaaaaaaaaaaaaaaaaaaaaaaaaaaaaaaaaaaaaagaaaaaaaaaaagaataaacataaagaaaagaagacaagaaagaaagaagagcagaataaagataggcaaataacagcaacaataatacaaatatataagacatatgaatttagacaggaattcttaggcggcaagaggatatacaactcagtgtaaactatgcgggaaacacacaagcaggcaaagaggagagcgttgagattctgtcgagagggagtagaacacaaccaagaagatgcggcacaacacaacagcgccacgagagagagaggagaacagaaaaaccatgacgaagagagctcgcgacacaagcataagacacgacagagacaaacagcgcgccacaacaaaggagtaaaagaaaaaacataagagccaaccgaagacaccaaacgacaaggacacagcaaaagataaactgagggtgatagacacgggagaaagcagaatcatcatagcacaggagggtgacagaccgaaggctggtatacagtaaacgggggacaataatctagagggacataagaaagactgagcgcattatccgactgaagcatatacgacagaacgaagatacacctacggaaacgaagtcggggaaagacgaaggagcagcataagacagaacgacatcgacccagtaggcagaacgatgagcactgcgcatcagaagggaaaaatgagaaaag

SEQ ID NO: 428078 - DNA, 1803 bp, Homo sapiens
ggcgcgtcggcgcaggtttccgcagctgagggggcagctccgcggcggcgtccggggtctccagtagggctgacgctccggtgctcgcacaatcccccgcctcggctggcaacgggcgtccctccactccccgagtccccggcagccgccgccaccccagcgcgccccgatctggccccctgccccgcgaagatggctgccgtacgccgggcccgcagttattgccgctgcctggtgcgcttctccgaccgagaactctgctaagctccgctgcagagacaggcaggagtagacacccggacacccagcacccctcctccggggggcggtgcagagggggcacggagagcccctcgagcgcagcaggccgccccgccagcatggcagaagctgaggaagattgtcattctgatactgtcagagcagatgatgatgaagaaaatgaaagtcctgctgaaacagatctgcaggcacaactccagatgttccgagctcagtggatgtttgaacttgctccaggtgtaagctctagcaatttagaaaatcgaccttgcagagcagcaagaggctctctccagaaaacatcggcagataccaaaggaaaacaagaacaggcaaaagaagaaaaggctcgagaactcttcctaaaagcagtagaagaagaacaaaatggagctctctatgaagccatcaagttttatcgtagggctatgcaacttgtacctgatatagagttcaagattacttatacccggtctccagatggtgatggcgttggaaacagctacattgaagataatgatgatgacagcaaaatggcagatctcttgtcctacttccagcagcaactcacatttcaggagtctgtgcttaaactgtgtcagcctgagcttgagagcagtcagattcacatatcagtgctgccaatggaggtcctgatgtacatcttccgatgggtggtgtctagtgacttggacctcagatcattggagcagttgtcgctggtgtgcagaggattctacatctgtgccagagaccctgaaatatggcgtctggcctgcttgaaagtttggggcagaagctgtattaaacttgttccgtacacgtcctggagagagatgtttttagaacggcctcgtgttcggtttgatggcgtgtatatcagtaaaaccacatatattcgtcaaggggaacagtctcttgatggtttctatagagcctggcaccaagtggaatattacaggtacataagattctttcctgatggccatgtgatgatgttgacaacccctgaagagcctcagtccattgttccacgtttaagaactaggaataccaggactgatgcaattctactgggtcactatcgcttgtcacaagacacagacaatcagaccaaagtatttgctgtaataactaagaaaaaagaagaaaaaccacttgactataaatacagatattttcgtcgtgtccctgtacaagaagcagatcagagttttcatgtggggctacagctatgttccagtggtcaccagaggttcaacaaactcatctggatacatcattcttgtcacattacttacaaatcaactggtgagactgcagtcagtgcttttgagattgacaagatgtacacccccttgttcttcgccagagtaaggagctacacagctttctcagaaaggcctctgtagagcctcaagtccagtcctctatcacttttgcatgaattaaagtatatagcgcaaaagaacacgatagcacccgcgcgaatcccttgcaccagcacgattccctcagcat

SEQ ID NO: 428079 - DNA, 1762 bp, Homo sapiens
gcactccagcctgggcaacagagcaagaacctgtcacaaaaaaaaaagaaattcatgtatttttaatatgttaaatattgtttggttcggggctttttcagaggaggacaattaaaagttttcaaggagatgaaaataactttagtgttaatagatgcaatatggatcacacacacatagattattttcctaaaacatttattttaatatgtctggcaaaataatcttatgagggaaaagagtgctttataaaaagtagcttcagatctatactgaaaaaacaaagatatttatgtcttgatgttaagaaccattattattattgagtagctaaatacattcatgctttagctctgagcaatacagagggaaggtataaatgtactgggaatgtagttgtgacaatagaatgacatagaggagagtcactgaaggatgattttccttttgccagtgctgccaatggaggtcctgatgtacatcttccgatgggtggtgtctagtgacttggacctcagatcattggagcagttgtcgctggtgtgcagaggattctacatctgtgccagagaccctgaaatatggcgtctggcctgcttgaaagtttggggcagaagctgtattaaacttgttccgtacacgtcctggagagagatgtttttagaacggcctcgtgttcggtttgatggcgtgtatatcagtaaaaccacatatattcgtcaaggggaacagtctcttgatggtttctatagagcctggcaccaagtggaatattacaggtacataagattctttcctgatggccatgtgatgatgttgacaacccctgaagagcctcagtccattgttccacgtttaagaactaggaataccaggactgatgcaattctactgggtcactatcgcttgtcacaagacacagacaatcagaccaaagtatttgctgtaataactaagaaaaaagaagaaaaaccacttgactataaatacagatattttcgtcgtgtccctgtacaagaagcagatcagagttttcatgtggggctacagctatgttccagtggtcaccagaggttcaacaaactcatctggatacatcattcttgtcacattacttacaaatcaactggtgagactgcagtcagtgcttttgagattgacaagatgtacacccccttgttcttcgccagagtaaggagctacacagctttctcagaaaggcctctgtagagcctcaagtccagtcctctatcacttttgcatgaattaaagtatatagcgcaaaagagcacctaagttataaatgtgtgtgtgtgtgtgtgtgtgtatatatatatatatatatatatatatatatatatatatatggaattggaacttattttaaattgttggagttcttttaagaagaatataaattgattattttttttatttaaagggatagttgattcctggggtgttttgaaattaagttggaattaagttgcttaagcatatttatgttgtgagaaaccttaatatgaggtttatcatgccctttttcaagcagatttatgagcagatttctgtcacataagtcgtcttctgcttgagtatcctaatatttcaatgcatcaggggagcgctccactggataagcattttatttcccgcatggcatagtgtttttgcactaaaggctcaaagtgtgagaacctgttctggatttgtttgaaattatttcaccaataaagatcataaataaatgtttctttcaaga

SEQ ID NO: 428080 - DNA, 1549 bp, Homo sapiens
ggcgcgtcggcgcaggtttccgcagctgagggggcagctccgcggcggcgtccggggtctccagtagggctgacgctccggtgctcgcacaatcccccgcctcggctggcaacgggcgtccctccactccccgagtccccggcagccgccgccaccccagcgcgccccgatctggccccctgccccgcgaagatggctgccgtacgccgggcccgcagttattgccgctgcctggtgcgcttctccgaccgagaactctgctaagctccgctgcagagacaggcaggagtagacacccggacacccagcacccctcctccggggggcggtgcagagggggcacggagagcccctcgagcgcagcaggccgccccgccagcatggcagaagctgaggaagattgtcattctgatactgtcagagcagatgatgatgaagaaaatgaaagtcctgctgaaacagatctgcaggcacaactccagatgttccgagctcagtggatgtttgaacttgctccaggtgtaagctctagcaatttagaaaatcgaccttgcagagcagcaagaggctctctccagaaaacatcggcagataccaaaggaaaacaagaacaggcaaaagaagaaaaggctcgagaactcttcctaaaagcagtagaagaagaacaaaatggagctctctatgaagccatcaagttttatcgtagggctatgcaacttgtacctgatatagagttcaagattacttatacccggtctccagatggtgatggcgttggaaacagctacattgaagataatgatgatgacagcaaaatggcagatctcttgtcctacttccagcagcaactcacatttcaggagtctgtgcttaaactgtgtcagcctgagcttgagagcagtcagattcacatatcagtgctgccaatggaggtcctgatgtacatcttccgatgggtggtgtctagtgacttggacctcagatcattggagcagttgtcgctggtgtgcagaggattctacatctgtgccagagaccctgaaatatggcgtctggcctgcttgaaagtttggggcagaagctgtattaaacttgttccgtacacgtcctggagagagatgtttttagaacggcctcgtgttcggtttgatggcgtgtatatcagtaaaaccacatatattcgtcaaggggaacagtctcttgatggtttctatagagcctggcaccaagtggaatattacaggtacataagattctttcctgatggccatgtgatgatgttgacaacccctgaagagcctcagtccattgttccacgtttaagaactaggaataccaggactgatgcaattctactgggtcactatcgcttgtcacaagacacagacaatcagaccaaagtatttgctgtaataactaagaaaaaagaagaaaaaccacttgactataaatacagatattttcgtcgtgtccctgtacaagaagcagatcagagttttcatgtggggctacagccatttaggtacagccatttaggtacagccattag

SEQ ID NO: 428081 - DNA, 2506 bp, Homo sapiens
ggcgcgtcggcgcaggtttccgcagctgagggggcagctccgcggcggcgtccggggtctccagtagggctgacgctccggtgctcgcacaatcccccgcctcggctggcaacgggcgtccctccactccccgagtccccggcagccgccgccaccccagcgcgccccgatctggccccctgccccgcgaagatggctgccgtacgccgggcccgcagttattgccgctgcctggtgcgcttctccgaccgagaactctgctaagctccgctgcagagacaggcaggagtagacacccggacacccagcacccctcctccggggggcggtgcagagggggcacggagagcccctcgagcgcagcaggccgccccgccagcatggcagaagctgaggaagattgtcattctgatactgtcagagcagatgatgatgaagaaaatgaaagtcctgctgaaacagatctgcaggcacaactccagatgttccgagctcagtggatgtttgaacttgctccaggtgtaagctctagcaatttagaaaatcgaccttgcagagcagcaagaggctctctccagaaaacatcggcagataccaaaggaaaacaagaacaggcaaaagaagaaaaggctcgagaactcttcctaaaagcagtagaagaagaacaaaatggagctctctatgaagccatcaagttttatcgtagggctatgcaacttgtacctgatatagagttcaagattacttatacccggtctccagatggtgatggcgttggaaacagctacattgaagataatgatgatgacagcaaaatggcagatctcttgtcctacttccagcagcaactcacatttcaggagtctgtgcttaaactgtgtcagcctgagcttgagagcagtcagattcacatatcagtgctgccaatggaggtcctgatgtacatcttccgatgggtggtgtctagtgacttggacctcagatcattggagcagttgtcgctggtgtgcagaggattctacatctgtgccagagaccctgaaatatggcgtctggcctgcttgaaagtttggggcagaagctgtattaaacttgttccgtacacgtcctggagagagatgtttttagaacggcctcgtgttcggtttgatggcgtgtatatcagtaaaaccacatatattcgtcaaggggaacagtctcttgatggtttctatagagcctggcaccaagtggaatattacaggtacaactgtagtacactgagtgagtggaaaattctctctctccatgtattagttaaatggacatctgttctttgttgcttttgattgacccgcaaaatggccctcagtatttttatctagtactcaatgtaggaattgcactaaaaaaaaaaataggctaatataaattacagaatttcttctggcctcttttagatttcttcttgtcttttgccctgggtgtatttacttgccttttcaaatagcttgtgcttttattccaccttattgcttgccaaatattattgtcatttagaaaaaaatagacatgttaaccgttgtgtgtggctctcactttgtttgaaattgttgctttgggaaaaacacagaactttaataaaacaatatttgacttttattcagtgagtaaaacttaaaagttcaacagtttcccctgaggaagataaaatatctttggttctttgttgctggactaacaggtagtcagtaatatttgttttaatgttttagcagttctttagcccgtggtatttcagtgttggtttcatagctatgaataggcataggtactaatagataaggacatattttatactttgtgtggggggtgtgttttggtcttccttttcttattacataggtacataagattctttcctgatggccatgtgatgatgttgacaacccctgaagagcctcagtccattgttccacgtttaagaactaggaataccaggactgatgcaattctactgggtcactatcgcttgtcacaagacacagacaatcagaccaaagtatttgctgtaataactaagaaaaaagaagaaaaaccacttgactataaatacagatattttcgtcgtgtccctgtacaagaagcagatcagagttttcatgtggggctacagctatgttccagtggtcaccagaggttcaacaaactcatctggatacatcattcttgtcacattacttacaaatcaactggtgagactgcagtcagtgcttttgagattgacaagatgtacacccccttgttcttcgccagaatttatgagcagatttctgtcacataagtcgtcttctgcttgagtatcctaatatttcaatgcatcaggggagcgctccactggataagcattttatttcccgcatggcatagtgtttttgcactaaaggctcaaagtgtgagaacctgttctggatttgtttgaaattatttcaccaataaagatcataaataaatgtttctttcaaga

SEQ ID NO: 428082 - DNA, 1254 bp, Homo sapiens
aaagaagattcaccagggcagaaaaggcaagccgtggaagtagagtgctcagagcactcaaagaccctgaaatatggcgtctggcctgcttgaaagtttggggcagaagctgtattaaacttgttccgtacacgtcctggagagagatgtttttagaacggcctcgtgttcggtttgatggcgtgtatatcagtaaaaccacatatattcgtcaaggggaacagtctcttgatggtttctatagagcctggcaccaagtggaatattacaggtacataagattctttcctgatggccatgtgatgatgttgacaacccctgaagagcctcagtccattgttccacgtttaagaactaggaataccaggactgatgcaattctactgggtcactatcgcttgtcacaagacacagacaatcagaccaaagtatttgctgtaataactaagaaaaaagaagaaaaaccacttgactataaatacagatattttcgtcgtgtccctgtacaagaagcagatcagagttttcatgtggggctacagctatgttccagtggtcaccagaggttcaacaaactcatctggatacatcattcttgtcacattacttacaaatcaactggtgagactgcagtcagtgcttttgagattgacaagatgtacacccccttgttcttcgccagagtaaggagctacacagctttctcagaaaggcctctgtagagcctcaagtccagtcctctatcacttttgcatgaattaaagtatatagcgcaaaagagcacctaagttataaatgtgtgtgtgtgtgtgtgtgtgtatatatatatatatatatatatatatatatatatatatatggaattggaacttattttaaattgttggagttcttttaagaagaatataaattgattattttttttatttaaagggatagttgattcctggggtgttttgaaattaagttggaattaagttgcttaagcatatttatgttgtgagaaaccttaatatgaggtttatcatgccctttttcaagcagatttatgagcagatttctgtcacataagtcgtcttctgcttgagtatcctaatatttcaatgcatcaggggagcgctccactggataagcattttatttcccgcatggcatagtgtttttgcactaaaggctcaaagtgtgagaacctgttctggatttgtttgaaattatttcaccaataaagatcataaataaatgtttctttcaaga

SEQ ID NO: 428083 - DNA, 1318 bp, Homo sapiens
aacagaccccaaggtatagatgccacctacagggcaggacaggggactttacaggcagtgcgtggctgctgagggcgggacgaggaccggatggggaccaggagggtgacagctgaagggtacagggtttcttttgaagagatgaaaatgttctgaaattggctgtggtgacggcggcgggtttgtcaatacacgcaggtcccctgaggtgtacttttagaacggcctcgtgttcggtttgatggcgtgtatatcagtaaaaccacatatattcgtcaaggggaacagtctcttgatggtttctatagagcctggcaccaagtggaatattacaggtacataagattctttcctgatggccatgtgatgatgttgacaacccctgaagagcctcagtccattgttccacgtttaagaactaggaataccaggactgatgcaattctactgggtcactatcgcttgtcacaagacacagacaatcagaccaaagtatttgctgtaataactaagaaaaaagaagaaaaaccacttgactataaatacagatattttcgtcgtgtccctgtacaagaagcagatcagagttttcatgtggggctacagctatgttccagtggtcaccagaggttcaacaaactcatctggatacatcattcttgtcacattacttacaaatcaactggtgagactgcagtcagtgcttttgagattgacaagatgtacacccccttgttcttcgccagagtaaggagctacacagctttctcagaaaggcctctgtagagcctcaagtccagtcctctatcacttttgcatgaattaaagtatatagcgcaaaagagcacctaagttataaatgtgtgtgtgtgtgtgtgtgtgtatatatatatatatatatatatatatatatatatatatatggaattggaacttattttaaattgttggagttcttttaagaagaatataaattgattattttttttatttaaagggatagttgattcctggggtgttttgaaattaagttggaattaagttgcttaagcatatttatgttgtgagaaaccttaatatgaggtttatcatgccctttttcaagcagatttatgagcagatttctgtcacataagtcgtcttctgcttgagtatcctaatatttcaatgcatcaggggagcgctccactggataagcattttatttcccgcatggcatagtgtttttgcactaaaggctcaaagtgtgagaacctgttctggatttgtttgaaattatttcaccaataaagatcataaataaatgtttctttcaaga

SEQ ID NO: 428084 - DNA, 2343 bp, Homo sapiens
ggcgcgtcggcgcaggtttccgcagctgagggggcagctccgcggcggcgtccggggtctccagtagggctgacgctccggtgctcgcacaatcccccgcctcggctggcaacgggcgtccctccactccccgagtccccggcagccgccgccaccccagcgcgccccgatctggccccctgccccgcgaagatggctgccgtacgccgggcccgcagttattgccgctgcctggtgcgcttctccgaccgagaactctgctaagctccgctgcagagacaggcaggagtagacacccggacacccagcacccctcctccggggggcggtgcagagggggcacggagagcccctcgagcgcagcaggccgccccgccagcatggcagaagctgaggaagattgtcattctgatactgtcagagcagatgatgatgaagaaaatgaaagtcctgctgaaacagatctgcaggcacaactccagatgttccgagctcagtggatgtttgaacttgctccaggtgtaagctctagcaatttagaaaatcgaccttgcagagcagcaagaggctctctccagaaaacatcggcagataccaaaggaaaacaagaacaggcaaaagaagaaaaggctcgagaactcttcctaaaagcagtagaagaagaacaaaatggagctctctatgaagccatcaagttttatcgtagggctatgcaacttgtacctgatatagagttcaagattacttatacccggtctccagatggtgatggcgttggaaacagctacattgaagataatgatgatgacagcaaaatggcagatctcttgtcctacttccagcagcaactcacatttcaggagtctgtgcttaaactgtgtcagcctgagcttgagagcagtcagattcacatatcagtgctgccaatggaggtcctgatgtacatcttccgatgggtggtgtctagtgacttggacctcagatcattggagcagttgtcgctggtgtgcagaggattctacatctgtgccagagaccctgaaatatggcgtctggcctgcttgaaagtttggggcagaagctgtattaaacttgttccgtacacgtcctggagagagatgtttttagaacggcctcgtgttcggtttgatggcgtgtatatcagtaaaaccacatatattcgtcaaggggaacagtctcttgatggtttctatagagcctggcaccaagtggaatattacaggtacaactgtagtacactgagtgagtggaaaattctctctctccatgtattagttaaatggacatctgttctttgttgcttttgattgacccgcaaaatggccctcagtatttttatctagtactcaatgtaggaattgcactaaaaaaaaaaataggctaatataaattacagaatttcttctggcctcttttagatttcttcttgtcttttgccctgggtgtatttacttgccttttcaaatagcttgtgcttttattccaccttattgcttgccaaatattattgtcatttagaaaaaaatagacatgttaaccgttgtgtgtggctctcactttgtttgaaattgttgctttgggaaaaacacagaactttaataaaacaatatttgacttttattcagtgagtaaaacttaaaagttcaacagtttcccctgaggaagataaaatatctttggttctttgttgctggactaacaggtagtcagtaatatttgttttaatgttttagcagttctttagcccgtggtatttcagtgttggtttcatagctatgaataggcataggtactaatagataaggacatattttatactttgtgtggggggtgtgttttggtcttccttttcttattacataggtacataagattctttcctgatggccatgtgatgatgttgacaacccctgaagagcctcagtccattgttccacgtttaagaactaggaataccaggactgatgcaattctactgggtcactatcgcttgtcacaagacacagacaatcagaccaaagtatttatattttcgtcgtgtccctgtacaagaagcagatcagagttttcatgtggggctacagctatgttccagtggtcaccagaggttcaacaaactcatctggatacatcattcttgtcacattacttacaaatcaactggtgagactgcagtcagtgcttttgagattgacaagatgtacacccccttgttcttcgccagagtaaggagctacacagctttctcagaaaggcctctgtagagcctcaagtccagtcctctatcacttttgcatgaattaaagtatatagcgcaaaaga

SEQ ID NO: 428085 - DNA, 1296 bp, Homo sapiens
ggcgcgtcggcgcaggtttccgcagctgagggggcagctccgcggcggcgtccggggtctccagtagggctgacgctccggtgctcgcacaatcccccgcctcggctggcaacgggcgtccctccactccccgagtccccggcagccgccgccaccccagcgcgccccgatctggccccctgccccgcgaagatggctgccgtacgccgggcccgcagttattgccgctgcctggtgcgcttctccgaccgagaactctgctaagctccgctgcagagacaggcaggagtagacacccggacacccagcacccctcctccggggggcggtgcagagggggcacggagagcccctcgagcgcagcaggccgccccgccagcatggcagaagctgaggaagattgtcattctgatactgtcagagcagatgatgatgaagaaaatgaaagtcctgctgaaacagatctgcaggcacaactccagatgttccgagctcagtggatgtttgaacttgctccaggtgtaagctctagcaatttagaaaatcgaccttgcagagcagcaagaggctctctccagaaaacatcggcagataccaaaggaaaacaagaacaggcaaaagaagaaaaggctcgagaactcttcctaaaagcagtagaagaagaacaaaatggagctctctatgaagccatcaagttttatcgtagggctatgcaacttgtacctgatatagagttcaagattacttatacccggtctccagatggtgatggcgttggaaacagctacattgaagataatgatgatgacagcaaaatggcagatctcttgtcctacttccagcagcaactcacatttcaggagtctgtgcttaaactgtgtcagcctgagcttgagagcagtcagattcacatatcagtgctgccaatggaggtcctgatgtacatcttccgatgggtggtgtctagtgacttggacctcagatcattggagcagttgtcgctggtgtgcagaggattctacatctgtgccagagaccctgaaatatggcgtctggcctgcttgaaagtttggggcagaagctgtattaaacttgttccgtacacgtcctggagagagatgtttttagaacggcctcgtgttcggtttgatggtaagttggattctgtagaactcagcagaaatactgatctataatgctgatttttataaatacgccgtttaaattttctgtgatgaatgtgagtactgtaagcatgtttaaaggaaaccacagtaaatataatgctgggaatat

SEQ ID NO: 428086 - DNA, 941 bp, Homo sapiens
tgatggtgatggggaaaaaaatctgatatttttagagtatttaacagtttttaaagcactcatacattcttgtgatagtcatactatttctgtaaacatagaagtgaggtaaggtttcattataacttatgcatcttttcttttgcagaaaccacttgactataaatacagatattttcgtcgtgtccctgtacaagaagcagatcagagttttcatgtggggctacagctatgttccagtggtcaccagaggttcaacaaactcatctggatacatcattcttgtcacattacttacaaatcaactggtgagactgcagtcagtgcttttgagattgacaagatgtacacccccttgttcttcgccagagtaaggagctacacagctttctcagaaaggcctctgtagagcctcaagtccagtcctctatcacttttgcatgaattaaagtatatagcgcaaaagagcacctaagttataaatgtgtgtgtgtgtgtgtgtgtgtatatatatatatatatatatatatatatatatatatatatggaattggaacttattttaaattgttggagttcttttaagaagaatataaattgattattttttttatttaaagggatagttgattcctggggtgttttgaaattaagttggaattaagttgcttaagcatatttatgttgtgagaaaccttaatatgaggtttatcatgccctttttcaagcagatttatgagcagatttctgtcacataagtcgtcttctgcttgagtatcctaatatttcaatgcatcaggggagcgctccactggataagcattttatttcccgcatggcatagtgtttttgcactaaaggctcaaagtgtgagaacctgttctggatttgtttgaaattatttcaccaataaagatcataaataaatgtttctttcaaga

SEQ ID NO: 428087 - DNA, 2455 bp, Homo sapiens
  misc_feature (539)..(539): n is a, c, g, or t
  misc_feature (568)..(569): n is a, c, g, or t
  misc_feature (572)..(572): n is a, c, g, or t
  misc_feature (577)..(578): n is a, c, g, or t
  misc_feature (580)..(580): n is a, c, g, or t
  misc_feature (586)..(586): n is a, c, g, or t
  misc_feature (588)..(588): n is a, c, g, or t
  misc_feature (590)..(590): n is a, c, g, or t
  misc_feature (592)..(592): n is a, c, g, or t
  misc_feature (594)..(594): n is a, c, g, or t
  misc_feature (597)..(597): n is a, c, g, or t
tgatggtgatggggaaaaaaatctgatatttttagagtatttaacagtttttaaagcactcatacattcttgtgatagtcatactatttctgtaaacatagaagtgaggtaaggtttcattataacttatgcatcttttcttttgcagaaaccacttgactataaatacagatattttcgtcgtgtccctgtacaagaagcagatcagagttttcatgtggggctacagctatgttccagtggtcaccagaggttcaacaaactcatctggatacatcattcttgtcacattacttacaaatcaactggtgagactgcagtcagtgcttttgagattgacaagatgtacacccccttgttcttcgccagagtaaggagctacacagctttctcagaaaggcctctgtagagcctcaagtccagtcctctatcacttttgcatgaattaaagtatatagcgcaaaagagcacctaagttataaatgtgtgtgtgtgtgtgtgtgtgtatatatatatatatatatatatatacacacacncacacacacacacacacacacacacacannccnctgcnncnattttncnangncncanttcttttaagaagaatataaattgattattttttttatttaaagggatagttgattcctggggtgttttgaaattaagttggaattaagttgcttaagcatatttatgttgtgagaaaccttaatatgaggtttatcatgccctttttcaagcagatttatgagcagatttctgtcacataagtcgtcttctgcttgagtatcctaatatttcaatgcatcaggggagcgctccactggataagcattttatttcccgcatggcatagtgtttttgcactaaaggctcaaagtgtgagaacctgttctggatttgtttgaaattatttcaccaataaagatcataaataaatgtttctttcaagaaaatatatttggatggcctttttaaagtaacaggatatttaataagagtcctagatagccagcggagactttaagaatcattgcctctagctgggtgtggtggcatgcacctgtagtcccagctatttgggaggctgatgcaggagaatagcttaagcccaggaatttgagtctgggagtttgagtccagcatgggcaacataacaagaccccatcccttattaaaagaaaaactcatgtaggcaccttaccaatatatgacattaagtgagagtgaatcccttaggactggaacacttcaagctcaaccaactgactcagttgtcattcttcacaaaagaatagtagaggatcatgtaaacctgagcctaactcttgttccagtatgaaagttgggggagagcaccagccacctaggaaaactgtatgttacctttttactcaaaggagtcccccctgcccagtaacagtcctattagtgtttaatttcagagtttgtgtctggtagacctctacctgattcagatttggttttgttgtttcaaccatagttagagacaaattctcatgtactttcagaaatcaatatctgcagccactgttacttttaattgacattaagagacacttcataggttcccacaattcagtatgggataggctttttaaaaagcacatacagaccaggcgtggtggctcatgcctataatcccagcactttgggaggctaagacaggcagatcacctgagctcaggagtccaagaccagcctgggcaacatggcaaaacaccgtctctacaaaaaaaaaaaaaaaaaaaattagccaagtacagtggggcacacctatagtcgcagctacttgggaggctggggcaggagaattgcctgagcctgggaagtggaagttgcagtgagccaagatcgtgccattccactccagcctgagcaacacagtgagaccctatctcaaaaaaataatgatgatagtacacgttatgttaaaggtgaaatgtgcatacagaaggaagagagttggccaggtgtggtgactcacacctataatcccaatactttgggaggccaaggcaggaggattgcttgaggtcaggagttttagaccagcctggacaacatagcaagacctcatctcttctaaaaattaaaaaaaaaaaaaataggcatggtggtacacacctgtggtcccagctagttgggaggctaaggcaggaggatcacttagccaggaggctgaggctacagtgagccaagattgcaccactgtgctccagcctgggtgagaaagcgagaccctgtctcaaaaaagaaaaaaaagagaggttggccttttgtagcaatctgagaagtgtgtttttcaagttggaaaggaaggagaaaagcaacttgcctaagataaggtagctcttcatgatatgactgttatttctgatatacaaataaatagaacatgattaggacatagtcaaatatagct

SEQ ID NO: 428088 - DNA, 950 bp, Homo sapiens
ggcgcgtcggcgcaggtttccgcagctgagggggcagctccgcggcggcgtccggggtctccagtagggctgacgctccggtgctcgcacaatcccccgcctcggctggcaacgggcgtccctccactccccgagtccccggcagccgccgccaccccagcgcgccccgatctggccccctgccccgcgaagatggctgccgtacgccgggcccgcagttattgccgctgcctggtgcgcttctccgaccgagaactctgctaagctccgctgcagagacaggcaggagtagacacccggacacccagcacccctcctccggggggcggtgcagagggggcacggagagcccctcgagcgcagcaggccgccccgccagcatggcagaagctgaggaagattgtcattctgatactgtcagagcagatgatgatgaagaaaatgaaagtcctgctgaaacagatctgcaggcacaactccagatgttccgagctcagtggatgtttgaacttgctccaggtgtaagctctagcaatttagaaaatcgaccttgcagagcagcaagaggctctctccagaaaacatcggcagataccaaaggaaaacaagaacaggcaaaagaagaaaagttaagtattatagatattgtaacaaattacattttttttttttggcacatggaaattttcactgacacagtaagtaggcattataaccagactttcgggacataaacacatatcttgtaaaataaaaattttgactagtatactagtttatatatttctcacaatttcttctaggtactttggatggtaccactactcctgcatggcttttttctctgtgggtacactgtcttcattgagctgtcttttgttaatttatagacctctgggattcatgtggttcctaaaagattggtgtctctgaatttattaacagaacca

SEQ ID NO: 428089 - DNA, 540 bp, Homo sapiens
gatgattttccttttgccagtgctgccaatggaggtcctgatgtacatcttccgatgggtggtgtctagtgacttggacctcagatcattggagcagttgtcgctggtgtgcagaggattctacatctgtgccaggtactaagtttttgtttttgttttttaaacaactgaggcaatggtgaaaagaaagatggtcctttgccaatcctgataaaattacttgattggtgttctgagttaaagcttagaataaacaagttttgctaagctgtacttaactttctcaaataacttagaatttaaaggctagaatatgctaggtttctagggtatagaataatatgtaggacagatgtagtaacccatactactaccatagagtttacatgctagcttaactgatttgggaaaaagagttatattagaaaaatatattcaagtcatttttacactaactgtaaactcattgtggtaatggtttagattaaaacagcactagcattttcttatggctcattaaaagttattctatattttgaa

SEQ ID NO: 428090 - DNA, 441 bp, Homo sapiens
cagcagtatttgcagaagtgtaattctaatgaaccttgtcacagctgtttgctcatttattttactgttattgcaaaagataagttatactctgtgctttttcagcatccttcaccaatttatcactttccctcttaaaaaatgtccaagtgttttccagtagaaggaaatactaggcttagagataggagataataattttacatcccatctatgtaatgttggttacatagtagttttacctccctggatcttcattttttaagctagtaaatagaaataatgcaatcatatttaacacatgaggttattatgatgattaactgagatgatggtgatggggaaaaaaatctgatatttttagagtatttaacagtttttaaagcactcatacattcttgtgatagtcaaaacgactctttactgcatgcaaatattatg

SEQ ID NO: 428091 - DNA, 761 bp, Homo sapiens
ggctgcagtatgccggcagccccgccctgtgtgcggtgtctaaggattccgtccccaagcaaggacaacatattatcttccccgcccttctcttttctacagtatctgttacctcagtcagattgaggatgcacatatactgggaaaataatcgacttccagcgtccctcatgtagtctctacctgattcaggaatctctaacccagtatcggaacgttaagcggcttctccgctttcctgccgtgagaaactcgaggtgacaacctccgtttccggttggctccggttgcagagttgagtgtcctgagaggtcagattgctgtcagacatggcccatgaacatggacatgagcatggacatcataaaatggaacttccagattatagacaatggaagatagaagggacaccattagaaactatccagaagaagctggctgcaaaagggctaagggatccatggggccgcaatgaagcttggagatacatgggtggctttgcaaagagtgtttccttttctgatgtattctttaaaggattcaaatggggatttgctgcatttgtggtagctgtaggagctgaatattacctggagtccctgaataaagataagaagcatcactgaagataatacctggaagcatcatagtggtttcttaactctccaaaataagatttcttctctgtagcctacttgtctggtttatcccttacagaatattagtaagatttaatcaattaaaatatatatatatgccaa

SEQ ID NO: 428092 - DNA, 922 bp, Homo sapiens
ggctgcagtatgccggcagccccgccctgtgtgcggtgtctaaggattccgtccccaagcaaggacaacatattatcttccccgcccttctcttttctacagtatctgttacctcagtcagattgaggatgcacatatactgggaaaataatcgacttccagcgtccctcatgtagtctctacctgattcaggaatctctaacccagtatcggaacgttaagcggcttctccgctttcctgccgtgagaaactcgaggtgacaacctccgtttccggttggctccggttgcagagttgagtgtcctgagaggtcagattgctgtcagacatggcccatgaacatggacatgagcatggacatcataaaatggaacttccagattatagacaatggaagatagaagggacaccattagaaactatccagaagaagctggctgcaaaagggctaagggatccatggggccgcaatgaagcttggagatacatgggtggctttgcaaagagtgtttccttttctgatgtattctttaaaggattcaaatggggatttgctgcatttgtggtagctgtaggagctgaatattacctggagtccctgaataaagataagaagcatcactgaagataatacctggaagcatcatagtggtttcttaactctccaaaataagatttcttctctgtagcctacttgtctggtttatcccttacagaatattagtaagatttaatcaattaaaatatatatatatgccaaaaaaaaaaaacaaaagggggggggctaaagttacctggaagggccaggtttaggtcccgttttggcaagggccctaaggggggaaaagaaggcggggcgttaaagcggtggaaagggtggtttggagggcttggggggtcatgggaccgagatagccggaa

SEQ ID NO: 428093 - DNA, 643 bp, Homo sapiens
  misc_feature (6)..(6): n is a, c, g, or t
  misc_feature (22)..(22): n is a, c, g, or t
  misc_feature (29)..(29): n is a, c, g, or t
ctcgtncaatttcggcagaggnagaggtnagattgctgtcacatggcccatgaacatggacatgagcatggacatcataaaatggaacttccagattatagacaatggaagatagaagggacaccattagaaactatccagaagaagctggctgcaaaagggctaagggatccatggggccgcaatgaagcttggagatacatgggtggctttgcaaagagtgtttccttttctgatgtattctttaaaggattcaaatggggatttgctgcatttgtggtagctgtaggagctgaatattacctggagtccctgaataaagataagaagcatcactgaagataatacctggaagcatcatagtggtttcttaactctccaaaataagatttcttctctgtagcctacttgtctggtttatcccttacagaatattagtaagatttaatcaattaaaatatatatatatgccaaaaaaaaaaaggaatgaataaaggacaccctgaaccacctgttttaaacaagttttcaaatggtagcggtacgaattgtaaactgagggcctattagcatagaggattagaagcccatttggggttcatggcacattcgcctaagggggggggttaaattaacggcgcgt

SEQ ID NO: 428094 - DNA, 492 bp, Homo sapiens
gtttattcttctattttatatgtgaaacttgggcatatacttaattatcctatgccacagaaagattcctattgcgattcacttaaatgatcttctgtagggtagcatttaagtcaattagaaagatgaaaattaaatgtcttcaacgtatatacacacacgttgtgtatgattataattttttctttttttttttctagcaatgaagcttggagatacatgggtggctttgcaaagagtgtttccttttctgatgtattctttaaaggattcaaatggggatttgctgcatttgtggtagctgtaggagctgaatattacctggagtccctgaataaagataagaagcatcactgaagataatacctggaagcatcatagtggtttcttaactctccaaaataagatttcttctctgtagcctacttgtctggtttatcccttacagaatattagtaagatttaatcaattaaaatatatatatatgccaa

SEQ ID NO: 428095 - DNA, 347 bp, Homo sapiens
ttttattatttatatgttgtgtttaatttgatatattaatacatttacatgtgaacaatgaagcttggagatacatgggtggctttgcaaagagtgtttccttttctgatgtattctttaaaggattcaaatggggatttgctgcatttgtggtagctgtaggagctgaatattacctggagtccctgaataaagataagaagcatcactgaagataatacctggaagcatcatagtggtttcttaactctccaaaataagatttcttctctgtagcctacttgtctggtttatcccttacagaatattagtaagatttaatcaattaaaatatatatatatgccaa

SEQ ID NO: 428096 - DNA, 334 bp, Homo sapiens
gcgattctcctgcctctgcctcccgaatagctgggattacagcaatgaagcttggagatacatgggtggctttgcaaagagtgtttccttttctgatgtattctttaaaggattcaaatggggatttgctgcatttgtggtagctgtaggagctgaatattacctggagtccctgaataaagataagaagcatcactgaagataatacctggaagcatcatagtggtttcttaactctccaaaataagatttcttctctgtagcctacttgtctggtttatcccttacagaatattagtaagatttaatcaattaaaatatatatatatgccaa

SEQ ID NO: 428097 - DNA, 556 bp, Homo sapiens
tgtgattaggaataaaatgtctagaaaggttccttacagggacaatagttaaaaattggttgaaaaacactgccttagaatctcccagtatgtttctgtgattccatctcctccaccaagagacatggcccatgaacatggacatgagcatggacatcataaaatggaacttccagattatagacaatggaagatagaagggacaccattagaaactatccagaagaagctggctgcaaaagggctaagggatccatggggccgcaatgaagcttggagatacatgggtggctttgcaaagagtgtttccttttctgatgtattctttaaaggattcaaatggggatttgctgcatttgtggtagctgtaggagctgaatattacctggagtccctgaataaagataagaagcatcactgaagataatacctggaagcatcatagtggtttcttaactctccaaaataagatttcttctctgtagcctacttgtctggtttatcccttacagaatattagtaagatttaatcaattaaaatatatatatatgccaa

SEQ ID NO: 428098 - DNA, 784 bp, Homo sapiens
ggctgcagtatgccggcagccccgccctgtgtgcggtgtctaaggattccgtccccaagcaaggacaacatattatcttccccgcccttctcttttctacagtatctgttacctcagtcagattgaggatgcacatatactgggaaaataatcgacttccagcgtccctcatgtagtctctacctgattcaggaatctctaacccagtatcggaacgttaagcggcttctccgctttcctgccgtgagaaactcgaggtgacaacctccgtttccggttggctccggttgcagagttgagtgtcctgagaggtcagattgctgtcaggcagaagaacagcatcactaaaaacatggcccatgaacatggacatgagcatggacatcataaaatggaacttccagattatagacaatggaagatagaagggacaccattagaaactatccagaagaagctggctgcaaaagggctaagggatccatggggccgcaatgaagcttggagatacatgggtggctttgcaaagagtgtttccttttctgatgtattctttaaaggattcaaatggggatttgctgcatttgtggtagctgtaggagctgaatattacctggagtccctgaataaagataagaagcatcactgaagataatacctggaagcatcatagtggtttcttaactctccaaaataagatttcttctctgtagcctacttgtctggtttatcccttacagaatattagtaagatttaatcaattaaaatatatatatatgccaa

SEQ ID NO: 428099 - DNA, 474 bp, Homo sapiens
  misc_feature (6)..(6): n is a, c, g, or t
  misc_feature (22)..(22): n is a, c, g, or t
  misc_feature (29)..(29): n is a, c, g, or t
ctcgtncaatttcggcagaggnagaggtnagattgctgtcacatggcccatgaacatggacatgagcatggacatcataaaatggaacttccagattatagacaatggaagatagaagggacaccattagaaactatccagaagaagctggctgcaaaagggctaagggatccatggggccgcaatgaagcttggagatacatgggtggctttgcaaagagtgtttccttttctgatgtattctttaaaggattcaaatggggatttgctgcatttgtggtagctgtaggagctgaatattacctggagtccctgaataaagataagaagcatcactgaagataatacctggaagcatcatagtggtttcttaactctccaaaataagatttcttctctgtagcctacttgtctggtttatcccttacagaatattagtaagatttaatcaattaaaatatatatatatgccaa

SEQ ID NO: 428100 - DNA, 832 bp, Homo sapiens
ggctgcagtatgccggcagccccgccctgtgtgcggtgtctaaggattccgtccccaagcaaggacaacatattatcttccccgcccttctcttttctacagtatctgttacctcagtcagattgaggatgcacatatactgggaaaataatcgacttccagcgtccctcatgtagtctctacctgattcaggaatctctaacccagtatcggaacgttaagcggcttctccgctttcctgccgtgagaaactcgaggtgacaacctccgtttccggttggctccggttgcagagttgagtgtcctgagaggtcagattgctgtcagacatggcccatgaacatggacatgagcatggacatcataaaatggaacttccagattatagacaatggaagatagaagggacaccattagaaactatccagaagaagctggctgcaaaagggctaagggatccatggggccgcaatgaagcttggagatacatgggtggctttgcaaagagtgtttccttttctgatgtattctttaaaggattcaaatggggatttgctgcatttgtggtagctgtaggagctgaatattacctggagtccctgaataaagataagaagcatcactgaagataatacctggaagcatcatagtggtttcttaactctccaaaataagatttcttctctgtagcctacttgtctggtttatcccttacagaatattagtaagatttaatcaattaaaatatatatatatgccaacgaaaaaaaaaaataataaacaaagggatgaaagaaatattatctttttggccttttttggcctaaagggg

SEQ ID NO: 428101 - DNA, 803 bp, Homo sapiens
ggctgcagtatgccggcagccccgccctgtgtgcggtgtctaaggattccgtccccaagcaaggacaacatattatcttccccgcccttctcttttctacagtatctgttacctcagtcagattgaggatgcacatatactgggaaaataatcgacttccagcgtccctcatgtagtctctacctgattcaggaatctctaacccagtatcggaacgttaagcggcttctccgctttcctgccgtgagaaactcgaggtgacaacctccgtttccggttggctccggttgcagagttgagtgtcctgagaggtcagattgctgtcagacatggcccaagttgagtgtcctgagaggtcagattgctgtcacatggcccatgaacatggacatgagcatggacatcataaaatggaacttccagattatagacaatggaagatagaagggacaccattagaaactatccagaagaagctggctgcaaaagggctaagggatccatggggccgcaatgaagcttggagatacatgggtggctttgcaaagagtgtttccttttctgatgtattctttaaaggattcaaatggggatttgctgcatttgtggtagctgtaggagctgaatattacctggagtccctgaataaagataagaagcatcactgaagataatacctggaagcatcatagtggtttcttaactctccaaaataagatttcttctctgtagcctacttgtctggtttatcccttacagaatattagtaagatttaatcaattaaaatatatatatatgccaa

SEQ ID NO: 428102 - DNA, 1120 bp, Homo sapiens
ggctgcagtatgccggcagccccgccctgtgtgcggtgtctaaggattccgtccccaagcaaggacaacatattatcttccccgcccttctcttttctacagtatctgttacctcagtcagattgaggatgcacatatactgggaaaataatcgacttccagcgtccctcatgtagtctctacctgattcaggaatctctaacccagtatcggaacgttaagcggcttctccgctttcctgccgtgagaaactcgaggtgacaacctccgtttccggttggctccggttgcagagttgagtgtcctgagaggtcagattgctgtcagacatggcccatgaacatggacatgagcatggacatcataaaatggaacttccagattatagacaatggaagatagaagggacaccattagaaactatccagaagaagctggctgcaaaagggctaagggatccatggggccgcaatgaagcttggagatacatgggtggctttgcaaagagtgtttccttttctgatgtattctttaaaggattcaaatggggatttgctgcatttgtggtagctgtaggagctgaatattacctggagtccctgaataaagataagaagcatcactgaagataatacctggaagcatcatagtggtttcttaactctccaaaataagatttcttctctgtagcctacttgtctggtttatcccttacagaatattagtaagatttaatcaattaaaatatatatatatgccaaaaaaaaaaaaaaaaaaaaaaaaaaattgtgggggcgggccgggcccgggaaagttttcaacccctcggttggggggggggccccgggtggtaacgggcccaggggtcccaaggaaaccgggccagggcacaggcgtgggttctccccataaaaaacgcgcggggacccgggggtcggacaatccaagtgggttcgggcctccggtccacacgagggcccaggaagcacataccccgccccggggcggggaaagacagagacggaagcgaaaaaagaacacaagacgaggaaaaaacaacggaaaaaaagagcgaagagaacaaaaagcaaaaaaaacacaacacaagagacacacaagc

SEQ ID NO: 428103 - DNA, 1344 bp, Homo sapiens
gtgggtcgaaccttcacctactctttgtctgtacaagctcttgttgtctgggtgagcggcggaggcgctgctgtggattggtcacagggagaaacctctgatctgttcctattggcccgtccgtcaagggacgatgatgattggtagggcagagcaatctgagtcctagttggtggagttctgcccggatggaagctccggccgcggagtgatggtggcctcagcgaagatgggccgggcagggaccatggcggtggcagcagaggtggcaggggcggggcggctggcggtagaggaggctgtggtcctcagggggctgtaggtggaggtatggctcgggccagcagcgggaacggcagcgaggaggcctggggggcacttcgggcgccgcaacagcagcttcgagagctgtgcccaggagtgaacaaccagccctacctctgtgagagtggtcactgctgcggggagactggctgctgcacctactactatgagctctggtggttctggctgctctggactgtcctcatcctctttagctgctgttgcgccttccgccaccgacgagctaaactcaggctgcaacaacagcagcggcagcgtgaaatcaacttgttggcctatcatggggcatgccatggggctggtcctttccctaccggttcactgcttgaccttcgcttcctcagcaccttcaagcccccagcctacgaggatgtggttcaccgcccaggcacaccaccccccccttatactgtggccccaggccgccccttgactgcttccagtgaacaaacctgctgttcctcctcatccagctgccctgcccactttgaaggaacaaatgtggaaggtgtttcctcccaccagagtgccccccctcatcaggagggtgagcccggggcaggggtgacccctgcctccacacccccctcctgccgctatcgccgtttaactggcgactccggtattgagctctgcccttgtcctgcctccggtgagggtgagccagtcaaggaggtgagggttagtgccaccctgccagatctggaggactactccccgtgtgcactacccccagagtctgtaccgcagatctttcccatggggctgtcttccagtgaaggggacatcccataagtagttttgagagggtggatgggttacttgcccaccagaaacagccctagtcccaactccttgcgttcctttggcccctccctgcctacctagaatctgcctgaaagggctggagaggggcagtattgggggactgtgctagctttacccccgcaggacatacacaggagcctttgatctcattaaagagatgtgaaccagcta

SEQ ID NO: 428104 - DNA, 2223 bp, Homo sapiens
gtgggtcgaaccttcacctactctttgtctgtacaagctcttgttgtctgggtgagcggcggaggcgctgctgtggattggtcacagggagaaacctctgatctgttcctattggcccgtccgtcaagggacgatgatgattggtagggcagagcaatctgagtcctagttggtggagttctgcccggatggaagctccggccgcggagtgatggtggcctcagcgaagatgggccgggcagggaccatggcggtggcagcagaggtggcaggggcggggcggctggcggtagaggaggctgtggtcctcagggggctgtaggtggaggtatggctcgggccagcagcgggaacggcagcgaggaggcctggggggcacttcgggcgccgcaacagcagatcccaatagctccaaaacctatcacgacagccatttgtctctttcccctttccttgtcccttccttttgggggtgggggaggaactcacggagccaaaggtactgtgaagttcctaaacatgtctcttccactctttgtctaaactttgtaacgtagatgcagctgactttgcctgtagcctcatagaacccatcccatggctgcagtggaagcttgcggtggctctccagtgaccagaggcatagtgaggtcccagggaggctccctctgtcttgcaacagttatttgtgatctttttctatgtgcctattgtcacaacagagtccggcagcgtcttctcttgagggagcaatttggagaagagctggaacccagactcgcgccctggatgccatcctttatcatccacagcaatcccatctggttgggagcactgctctgggtctcacactgcccctcctctatcctagggagcctgaggcccaggggtggaaagatccagttgcgggtggggggtagtgaaccgtgcaggataatgaaagcaacttgctttggaaatgacctaccgctacccgttgtctgagactgagattatctcagactgtcttctggcttctgccaaaacactcccttaacagaaagcaccgaggggatgggggtaggggggttggggagagtgaggcttgagtgtgaaggaagtctcatatatgcagagctgaaatctccctctttgtatgtccacacttttgtcttgttctctagactgattcttgctattccaaatcctcttccacgttgacagcccttcagatatttcaacactcctctcagcatcctccacttcccccatctctccaagctgaacttggttcacaggcttcgagagctgtgcccaggagtgaacaaccagccctacctctgtgagagtggtcactgctgcggggagactggctgctgcacctactactatgagctctggtggttctggctgctctggactgtcctcatcctctttagctgctgttgcgccttccgccaccgacgagctaaactcaggctgcaacaacagcagcggcagcgtgaaatcaacttgttggcctatcatggggcatgccatggggctggtcctttccctaccggttcactgcttgaccttcgcttcctcagcaccttcaagcccccagcctacgaggatgtggttcaccgcccaggcacaccaccccccccttatactgtggccccaggccgccccttgactgcttccagtgaacaaacctgctgttcctcctcatccagctgccctgcccactttgaaggaacaaatgtggaaggtgtttcctcccaccagagtgccccccctcatcaggagggtgagcccggggcaggggtgacccctgcctccacacccccctcctgccgctatcgccgtttaactggcgactccggtattgagctctgcccttgtcctgcctccggtgagggtgagccagtcaaggaggtgagggttagtgccaccctgccagatctggaggactactccccgtgtgcactacccccagagtctgtaccgcagatctttcccatggggctgtcttccagtgaaggggacatcccataagtagttttgagagggtggatgggttacttgcccaccagaaacagccctagtcccaactccttgcgttcctttggcccctccctgcctacctagaatctgcctgaaagggctggagaggggcagtattgggggactgtgctagctttacccccgcaggacatacacaggagcctttgatctcattaaagagatgtgaaccagcta

SEQ ID NO: 428105 - DNA, 2313 bp, Homo sapiens
gtgggtcgaaccttcacctactctttgtctgtacaagctcttgttgtctgggtgagcggcggaggcgctgctgtggattggtcacagggagaaacctctgatctgttcctattggcccgtccgtcaagggacgatgatgattggtagggcagagcaatctgagtcctagttggtggagttctgcccggatggaagctccggccgcggagtgatggtggcctcagcgaagatgggccgggcagggaccatggcggtggcagcagaggtggcaggggcggggcggctggcggtagaggaggctgtggtcctcagggggctgtaggtggaggtatggctcgggccagcagcgggaacggcagcgaggaggcctggggggcacttcgggcgccgcaacagcagatcccaatagctccaaaacctatcacgacagccatttgtctctttcccctttccttgtcccttccttttgggggtgggggaggaactcacggagccaaaggtactgtgaagttcctaaacatgtctcttccactctttgtctaaactttgtaacgtagatgcagctgactttgcctgtagcctcatagaacccatcccatggctgcagtggaagcttgcggtggctctccagtgaccagaggcatagtgaggtcccagggaggctccctctgtcttgcaacagttatttgtgatctttttctatgtgcctattgtcacaacagagtccggcagcgtcttctcttgagggagcaatttggagaagagctggaacccagactcgcgccctggatgccatcctttatcatccacagcaatcccatctggttgggagcactgctctgggtctcacactgcccctcctctatcctagggagcctgaggcccaggggtggaaagatccagttgcgggtggggggtagtgaaccgtgcaggataatgaaagcaacttgctttggaaatgacctaccgctacccgttgtctgagactgagattatctcagactgtcttctggcttctgccaaaacactcccttaacagaaagcaccgaggggatgggggtaggggggttggggagagtgaggcttgagtgtgaaggaagtctcatatatgcagagctgaaatctccctctttgtatgtccacacttttgtcttgttctctagactgattcttgctattccaaatcctcttccacgttgacagcccttcagatatttcaacactcctctcagcatcctccacttcccccatctctccaagctgaacttggttcacagggtgggattgtgtatgtgcatgcaggaggtgggggtggacagtgccctgggctggaatcccccttagttctaagtgcctccttgcccgcagcttcgagagctgtgcccaggagtgaacaaccagccctacctctgtgagagtggtcactgctgcggggagactggctgctgcacctactactatgagctctggtggttctggctgctctggactgtcctcatcctctttagctgctgttgcgccttccgccaccgacgagctaaactcaggctgcaacaacagcagcggcagcgtgaaatcaacttgttggcctatcatggggcatgccatggggctggtcctttccctaccggttcactgcttgaccttcgcttcctcagcaccttcaagcccccagcctacgaggatgtggttcaccgcccaggcacaccaccccccccttatactgtggccccaggccgccccttgactgcttccagtgaacaaacctgctgttcctcctcatccagctgccctgcccactttgaaggaacaaatgtggaaggtgtttcctcccaccagagtgccccccctcatcaggagggtgagcccggggcaggggtgacccctgcctccacacccccctcctgccgctatcgccgtttaactggcgactccggtattgagctctgcccttgtcctgcctccggtgagggtgagccagtcaaggaggtgagggttagtgccaccctgccagatctggaggactactccccgtgtgcactacccccagagtctgtaccgcagatctttcccatggggctgtcttccagtgaaggggacatcccataagtagttttgagagggtggatgggttacttgcccaccagaaacagccctagtcccaactccttgcgttcctttggcccctccctgcctacctagaatctgcctgaaagggctggagaggggcagtattgggggactgtgctagctttacccccgcaggacatacacaggagcctttgatctcattaaagagatgtgaaccagcta

SEQ ID NO: 428106 - DNA, 2155 bp, Homo sapiens
gtgggtcgaaccttcacctactctttgtctgtacaagctcttgttgtctgggtgagcggcggaggcgctgctgtggattggtcacagggagaaacctctgatctgttcctattggcccgtccgtcaagggacgatgatgattggtagggcagagcaatctgagtcctagttggtggagttctgcccggatggaagctccggccgcggagtgatggtggcctcagcgaagatgggccgggcagggaccatggcggtggcagcagaggtggcaggggcggggcggctggcggtagaggaggctgtggtcctcagggggctgtaggtggaggtatggctcgggccagcagcgggaacggcagcgaggaggcctggggggcacttcgggcgccgcaacagcagtgggggtgggggaggaactcacggagccaaaggtactgtgaagttcctaaacatgtctcttccactctttgtctaaactttgtaacgtagatgcagctgactttgcctgtagcctcatagaacccatcccatggctgcagtggaagcttgcggtggctctccagtgaccagaggcatagtgaggtcccagggaggctccctctgtcttgcaacagttatttgtgatctttttctatgtgcctattgtcacaacagagtccggcagcgtcttctcttgagggagcaatttggagaagagctggaacccagactcgcgccctggatgccatcctttatcatccacagcaatcccatctggttgggagcactgctctgggtctcacactgcccctcctctatcctagggagcctgaggcccaggggtggaaagatccagttgcgggtggggggtagtgaaccgtgcaggataatgaaagcaacttgctttggaaatgacctaccgctacccgttgtctgagactgagattatctcagactgtcttctggcttctgccaaaacactcccttaacagaaagcaccgaggggatgggggtaggggggttggggagagtgaggcttgagtgtgaaggaagtctcatatatgcagagctgaaatctccctctttgtatgtccacacttttgtcttgttctctagactgattcttgctattccaaatcctcttccacgttgacagcccttcagatatttcaacactcctctcagcatcctccacttcccccatctctccaagctgaacttggttcacaggcttcgagagctgtgcccaggagtgaacaaccagccctacctctgtgagagtggtcactgctgcggggagactggctgctgcacctactactatgagctctggtggttctggctgctctggactgtcctcatcctctttagctgctgttgcgccttccgccaccgacgagctaaactcaggctgcaacaacagcagcggcagcgtgaaatcaacttgttggcctatcatggggcatgccatggggctggtcctttccctaccggttcactgcttgaccttcgcttcctcagcaccttcaagcccccagcctacgaggatgtggttcaccgcccaggcacaccaccccccccttatactgtggccccaggccgccccttgactgcttccagtgaacaaacctgctgttcctcctcatccagctgccctgcccactttgaaggaacaaatgtggaaggtgtttcctcccaccagagtgccccccctcatcaggagggtgagcccggggcaggggtgacccctgcctccacacccccctcctgccgctatcgccgtttaactggcgactccggtattgagctctgcccttgtcctgcctccggtgagggtgagccagtcaaggaggtgagggttagtgccaccctgccagatctggaggactactccccgtgtgcactacccccagagtctgtaccgcagatctttcccatggggctgtcttccagtgaaggggacatcccataagtagttttgagagggtggatgggttacttgcccaccagaaacagccctagtcccaactccttgcgttcctttggcccctccctgcctacctagaatctgcctgaaagggctggagaggggcagtattgggggactgtgctagctttacccccgcaggacatacacaggagcctttgatctcattaaagagatgtgaaccagcta

SEQ ID NO: 428107 - DNA, 1816 bp, Homo sapiens
gtgggtcgaaccttcacctactctttgtctgtacaagctcttgttgtctgggtgagcggcggaggcgctgctgtggattggtcacagggagaaacctctgatctgttcctattggcccgtccgtcaagggacgatgatgattggtagggcagagcaatctgagtcctagttggtggagttctgcccggatggaagctccggccgcggagtgatggtggcctcagcgaagatgggccgggcagggaccatggcggtggcagcagaggtggcaggggcggggcggctggcggtagaggaggctgtggtcctcagggggctgtaggtggaggtatggctcgggccagcagcgggaacggcagcgaggaggcctggggggcacttcgggcgccgcaacagcagtgggggtgggggaggaactcacggagccaaaggtactgtgaagttcctaaacatgtctcttccactctttgtctaaactttgtaacgtagatgcagctgactttgcctgtagcctcatagaacccatcccatggctgcagtggaagcttgcggtggctctccagtgaccagaggcatagtgaggtcccagggaggctccctctgtcttgcaacagttatttgtgatctttttctatgtgcctattgtcacaacagagtccggcagcgtcttctcttgagggagcaatttggagaagagctggaacccagactcgcgccctggatgccatcctttatcatccacagcaatcccatctgactgattcttgctattccaaatcctcttccacgttgacagcccttcagatatttcaacactcctctcagcatcctccacttcccccatctctccaagctgaacttggttcacaggcttcgagagctgtgcccaggagtgaacaaccagccctacctctgtgagagtggtcactgctgcggggagactggctgctgcacctactactatgagctctggtggttctggctgctctggactgtcctcatcctctttagctgctgttgcgccttccgccaccgacgagctaaactcaggctgcaacaacagcagcggcagcgtgaaatcaacttgttggcctatcatggggcatgccatggggctggtcctttccctaccggttcactgcttgaccttcgcttcctcagcaccttcaagcccccagcctacgaggatgtggttcaccgcccaggcacaccaccccccccttatactgtggccccaggccgccccttgactgcttccagtgaacaaacctgctgttcctcctcatccagctgccctgcccactttgaaggaacaaatgtggaaggtgtttcctcccaccagagtgccccccctcatcaggagggtgagcccggggcaggggtgacccctgcctccacacccccctcctgccgctatcgccgtttaactggcgactccggtattgagctctgcccttgtcctgcctccggtgagggtgagccagtcaaggaggtgagggttagtgccaccctgccagatctggaggactactccccgtgtgcactacccccagagtctgtaccgcagatctttcccatggggctgtcttccagtgaaggggacatcccataagtagttttgagagggtggatgggttacttgcccaccagaaacagccctagtcccaactccttgcgttcctttggcccctccctgcctacctagaatctgcctgaaagggctggagaggggcagtattgggggactgtgctagctttacccccgcaggacatacacaggagcctttgatctcattaaagagatgtgaaccagcta

SEQ ID NO: 428108 - DNA, 2065 bp, Homo sapiens
gtgggtcgaaccttcacctactctttgtctgtacaagctcttgttgtctgggtgagcggcggaggcgctgctgtggattggtcacagggagaaacctctgatctgttcctattggcccgtccgtcaagggacgatgatgattggtagggcagagcaatctgagtcctagttggtggagttctgcccggatggaagctccggccgcggagtgatggtggcctcagcgaagatgggccgggcagggaccatggcggtggcagcagaggtggcaggggcggggcggctggcggtagaggaggctgtggtcctcagggggctgtaggtggaggtatggctcgggccagcagcgggaacggcagcgaggaggcctggggggcacttcgggcgccgcaacagcagatgcagctgactttgcctgtagcctcatagaacccatcccatggctgcagtggaagcttgcggtggctctccagtgaccagaggcatagtgaggtcccagggaggctccctctgtcttgcaacagttatttgtgatctttttctatgtgcctattgtcacaacagagtccggcagcgtcttctcttgagggagcaatttggagaagagctggaacccagactcgcgccctggatgccatcctttatcatccacagcaatcccatctggttgggagcactgctctgggtctcacactgcccctcctctatcctagggagcctgaggcccaggggtggaaagatccagttgcgggtggggggtagtgaaccgtgcaggataatgaaagcaacttgctttggaaatgacctaccgctacccgttgtctgagactgagattatctcagactgtcttctggcttctgccaaaacactcccttaacagaaagcaccgaggggatgggggtaggggggttggggagagtgaggcttgagtgtgaaggaagtctcatatatgcagagctgaaatctccctctttgtatgtccacacttttgtcttgttctctagactgattcttgctattccaaatcctcttccacgttgacagcccttcagatatttcaacactcctctcagcatcctccacttcccccatctctccaagctgaacttggttcacaggcttcgagagctgtgcccaggagtgaacaaccagccctacctctgtgagagtggtcactgctgcggggagactggctgctgcacctactactatgagctctggtggttctggctgctctggactgtcctcatcctctttagctgctgttgcgccttccgccaccgacgagctaaactcaggctgcaacaacagcagcggcagcgtgaaatcaacttgttggcctatcatggggcatgccatggggctggtcctttccctaccggttcactgcttgaccttcgcttcctcagcaccttcaagcccccagcctacgaggatgtggttcaccgcccaggcacaccaccccccccttatactgtggccccaggccgccccttgactgcttccagtgaacaaacctgctgttcctcctcatccagctgccctgcccactttgaaggaacaaatgtggaaggtgtttcctcccaccagagtgccccccctcatcaggagggtgagcccggggcaggggtgacccctgcctccacacccccctcctgccgctatcgccgtttaactggcgactccggtattgagctctgcccttgtcctgcctccggtgagggtgagccagtcaaggaggtgagggttagtgccaccctgccagatctggaggactactccccgtgtgcactacccccagagtctgtaccgcagatctttcccatggggctgtcttccagtgaaggggacatcccataagtagttttgagagggtggatgggttacttgcccaccagaaacagccctagtcccaactccttgcgttcctttggcccctccctgcctacctagaatctgcctgaaagggctggagaggggcagtattgggggactgtgctagctttacccccgcaggacatacacaggagcctttgatctcattaaagagatgtgaaccagcta

SEQ ID NO: 428109 - DNA, 1393 bp, Homo sapiens
gtgggtcgaaccttcacctactctttgtctgtacaagctcttgttgtctgggtgagcggcggaggcgctgctgtggattggtcacagggagaaacctctgatctgttcctattggcccgtccgtcaagggacgatgatgattggtagggcagagcaatctgagtcctagttggtggagttctgcccggatggaagctccggccgcggagtgatggtggcctcagcgaagatgggccgggcagggaccatggcggtggcagcagagagtccggcagcgtcttctcttgagggagcaatttggagaagagctggaacccagactcgcgccctggatgccatcctttatcatccacagcaatcccatctgtgacagcccttcagatatttcaacactcctctcagcatcctccacttcccccatctctccaagctgaacttggttcacaggcttcgagagctgtgcccaggagtgaacaaccagccctacctctgtgagagtggtcactgctgcggggagactggctgctgcacctactactatgagctctggtggttctggctgctctggactgtcctcatcctctttagctgctgttgcgccttccgccaccgacgagctaaactcaggctgcaacaacagcagcggcagcgtgaaatcaacttgttggcctatcatggggcatgccatggggctggtcctttccctaccggttcactgcttgaccttcgcttcctcagcaccttcaagcccccagcctacgaggatgtggttcaccgcccaggcacaccaccccccccttatactgtggccccaggccgccccttgactgcttccagtgaacaaacctgctgttcctcctcatccagctgccctgcccactttgaaggaacaaatgtggaaggtgtttcctcccaccagagtgccccccctcatcaggagggtgagcccggggcaggggtgacccctgcctccacacccccctcctgccgctatcgccgtttaactggcgactccggtattgagctctgcccttgtcctgcctccggtgagggtgagccagtcaaggaggtgagggttagtgccaccctgccagatctggaggactactccccgtgtgcactacccccagagtctgtaccgcagatctttcccatggggctgtcttccagtgaaggggacatcccataagtagttttgagagggtggatgggttacttgcccaccagaaacagccctagtcccaactccttgcgttcctttggcccctccctgcctacctagaatctgcctgaaagggctggagaggggcagtattgggggactgtgctagctttacccccgcaggacatacacaggagcctttgatctcattaaagagatgtgaaccagcta

SEQ ID NO: 428110 - DNA, 1446 bp, Homo sapiens
gtgggtcgaaccttcacctactctttgtctgtacaagctcttgttgtctgggtgagcggcggaggcgctgctgtggattggtcacagggagaaacctctgatctgttcctattggcccgtccgtcaagggacgatgatgattggtagggcagagcaatctgagtcctagttggtggagttctgcccggatggaagctccggccgcggagtgatggtggcctcagcgaagatgggccgggcagggaccatggcggtggcagcagaggtggcaggggcggggcggctggcggtagaggaggctgtggtcctcagggggctgtaggtggaggtatggctcgggccagcagcgggaacggcagcgaggaggcctggggggcacttcgggcgccgcaacagcagagtccggcagcgtcttctcttgagggagcaatttggagaagagctggaacccagactcgcgccctggatgccatcctttatcatccacagcaatcccatctgcttcgagagctgtgcccaggagtgaacaaccagccctacctctgtgagagtggtcactgctgcggggagactggctgctgcacctactactatgagctctggtggttctggctgctctggactgtcctcatcctctttagctgctgttgcgccttccgccaccgacgagctaaactcaggctgcaacaacagcagcggcagcgtgaaatcaacttgttggcctatcatggggcatgccatggggctggtcctttccctaccggttcactgcttgaccttcgcttcctcagcaccttcaagcccccagcctacgaggatgtggttcaccgcccaggcacaccaccccccccttatactgtggccccaggccgccccttgactgcttccagtgaacaaacctgctgttcctcctcatccagctgccctgcccactttgaaggaacaaatgtggaaggtgtttcctcccaccagagtgccccccctcatcaggagggtgagcccggggcaggggtgacccctgcctccacacccccctcctgccgctatcgccgtttaactggcgactccggtattgagctctgcccttgtcctgcctccggtgagggtgagccagtcaaggaggtgagggttagtgccaccctgccagatctggaggactactccccgtgtgcactacccccagagtctgtaccgcagatctttcccatggggctgtcttccagtgaaggggacatcccataagtagttttgagagggtggatgggttacttgcccaccagaaacagccctagtcccaactccttgcgttcctttggcccctccctgcctacctagaatctgcctgaaagggctggagaggggcagtattgggggactgtgctagctttacccccgcaggacatacacaggagcctttgatctcattaaagagatgtgaaccagcta

SEQ ID NO: 428111 - DNA, 1210 bp, Homo sapiens
gtgggtcgaaccttcacctactctttgtctgtacaagctcttgttgtctgggtgagcggcggaggcgctgctgtggattggtcacagggagaaacctctgatctgttcctattggcccgtccgtcaagggacgatgatgattggtagggcagagcaatctgagtcctagttggtggagttctgcccggatggaagctccggccgcggagtgatggtggcctcagcgaagatgggccgggcagggaccatggcggtggcagcagagcttcgagagctgtgcccaggagtgaacaaccagccctacctctgtgagagtggtcactgctgcggggagactggctgctgcacctactactatgagctctggtggttctggctgctctggactgtcctcatcctctttagctgctgttgcgccttccgccaccgacgagctaaactcaggctgcaacaacagcagcggcagcgtgaaatcaacttgttggcctatcatggggcatgccatggggctggtcctttccctaccggttcactgcttgaccttcgcttcctcagcaccttcaagcccccagcctacgaggatgtggttcaccgcccaggcacaccaccccccccttatactgtggccccaggccgccccttgactgcttccagtgaacaaacctgctgttcctcctcatccagctgccctgcccactttgaaggaacaaatgtggaaggtgtttcctcccaccagagtgccccccctcatcaggagggtgagcccggggcaggggtgacccctgcctccacacccccctcctgccgctatcgccgtttaactggcgactccggtattgagctctgcccttgtcctgcctccggtgagggtgagccagtcaaggaggtgagggttagtgccaccctgccagatctggaggactactccccgtgtgcactacccccagagtctgtaccgcagatctttcccatggggctgtcttccagtgaaggggacatcccataagtagttttgagagggtggatgggttacttgcccaccagaaacagccctagtcccaactccttgcgttcctttggcccctccctgcctacctagaatctgcctgaaagggctggagaggggcagtattgggggactgtgctagctttacccccgcaggacatacacaggagcctttgatctcattaaagagatgtgaaccagcta

SEQ ID NO: 428112 - DNA, 2383 bp, Homo sapiens
gtgggtcgaaccttcacctactctttgtctgtacaagctcttgttgtctgggtgagcggcggaggcgctgctgtggattggtcacagggagaaacctctgatctgttcctattggcccgtccgtcaagggacgatgatgattggtagggcagagcaatctgagtcctagttggtggagttctgcccggatggaagctccggccgcggagtgatggtggcctcagcgaagatgggccgggcagggaccatggcggtggcagcagaggtggcaggggcggggcggctggcggtagaggaggctgtggtcctcagggggctgtaggtggaggtatggctcgggccagcagcgggaacggcagcgaggaggcctggggggcacttcgggcgccgcaacagcagatcccaatagctccaaaacctatcacgacagccatttgtctctttcccctttccttgtcccttccttttgggggtgggggaggaactcacggagccaaaggtactgtgaagttcctaaacatgtctcttccactctttgtctaaactttgtaacgtagatgcagctgactttgcctgtagcctcatagaacccatcccatggctgcagtggaagcttgcggtggctctccagtgaccagaggcatagtgaggtcccagggaggctccctctgtcttgcaacagttatttgtgatctttttctatgtgcctattgtcacaacagagtccggcagcgtcttctcttgagggagcaatttggagaagagctggaacccagactcgcgccctggatgccatcctttatcatccacagcaatcccatctggttgggagcactgctctgggtctcacactgcccctcctctatcctagggagcctgaggcccaggggtggaaagatccagttgcgggtggggggtagtgaaccgtgcaggataatgaaagcaacttgctttggaaatgacctaccgctacccgttgtctgagactgagattatctcagactgtcttctggcttctgccaaaacactcccttaacagaaagcaccgaggggatgggggtaggggggttggggagagtgaggcttgagtgtgaaggaagtctcatatatgcagagctgaaatctccctctttgtatgtccacacttttgtcttgttctctagactgattcttgctattccaaatcctcttccacgttgacagcccttcagatatttcaacactcctctcagcatcctccacttcccccatctctccaagctgaacttggttcacagggtgggattgtgtatgtgcatgcaggaggtgggggtggacagtgccctgggctggaatcccccttagttctaagtgcctccttgcccgcagcttcgagagctgtgcccaggagtgaacaaccagccctacctctgtgagagtggtcactgctgcggggagactggctgctgcacctactactatgagctctggtggttctggctgctctggactgtcctcatcctctttagctgctgttgcgccttccgccaccgacgagctaaactcaggctgcaacaacagcagcggcagcgtgaaatcaacttgttggcctatcatggggcatgccatggggctggtcctttccctaccggttcactgcttgaccttcgtgagtgacttgatgccctgggtcagctaccagtggccctccccaaaccagaaccccaaatcgtctcacattcccttttccacacatttcaaagtatttttccctaatataaaaactagcaccctatacctggttgtcttcaaccaatcatgccaattttctcccctgcaggcttccagtgaacaaacctgctgttcctcctcatccagctgccctgcccactttgaaggaacaaatgtggaaggtgtttcctcccaccagagtgccccccctcatcaggagggtgagcccggggcaggggtgacccctgcctccacacccccctcctgccgctatcgccgtttaactggcgactccggtattgagctctgcccttgtcctgcctccggtgagggtgagccagtcaaggaggtgagggttagtgccaccctgccagatctggaggactactccccgtgtgcactacccccagagtctgtaccgcagatctttcccatggggctgtcttccagtgaaggggacatcccataagtagttttgagagggtggatgggttacttgcccaccagaaacagccctagtcccaactccttgcgttcctttggcccctccctgcctacctagaatctgcctgaaagggctggagaggggcagtattgggggactgtgctagctttacccccgcaggacatacacaggagcctttgatctcattaaagagatgtgaaccagcta

SEQ ID NO: 428113 - DNA, 1432 bp, Homo sapiens
gtgggtcgaaccttcacctactctttgtctgtacaagctcttgttgtctgggtgagcggcggaggcgctgctgtggattggtcacagggagaaacctctgatctgttcctattggcccgtccgtcaagggacgatgatgattggtagggcagagcaatctgagtcctagttggtggagttctgcccggatggaagctccggccgcggagtgatggtggcctcagcgaagatgggccgggcagggaccatggcggtggcagcagaggtggcaggggcggggcggctggcggtagaggaggctgtggtcctcagggggctgtaggtggaggtatggctcgggccagcagcgggaacggcagcgaggaggcctggggggcacttcgggcgccgcaacagcagatgcagctgactttgcctgtagcctcatagaacccatcccatggctgcagtggaagcttgcggtggctctccagtgaccagaggcatacttcgagagctgtgcccaggagtgaacaaccagccctacctctgtgagagtggtcactgctgcggggagactggctgctgcacctactactatgagctctggtggttctggctgctctggactgtcctcatcctctttagctgctgttgcgccttccgccaccgacgagctaaactcaggctgcaacaacagcagcggcagcgtgaaatcaacttgttggcctatcatggggcatgccatggggctggtcctttccctaccggttcactgcttgaccttcgcttcctcagcaccttcaagcccccagcctacgaggatgtggttcaccgcccaggcacaccaccccccccttatactgtggccccaggccgccccttgactgcttccagtgaacaaacctgctgttcctcctcatccagctgccctgcccactttgaaggaacaaatgtggaaggtgtttcctcccaccagagtgccccccctcatcaggagggtgagcccggggcaggggtgacccctgcctccacacccccctcctgccgctatcgccgtttaactggcgactccggtattgagctctgcccttgtcctgcctccggtgagggtgagccagtcaaggaggtgagggttagtgccaccctgccagatctggaggactactccccgtgtgcactacccccagagtctgtaccgcagatctttcccatggggctgtcttccagtgaaggggacatcccataagtagttttgagagggtggatgggttacttgcccaccagaaacagccctagtcccaactccttgcgttcctttggcccctccctgcctacctagaatctgcctgaaagggctggagaggggcagtattgggggactgtgctagctttacccccgcaggacatacacaggagcctttgatctcattaaagagatgtgaaccagcta

SEQ ID NO: 428114 - DNA, 1516 bp, Homo sapiens
gtgggtcgaaccttcacctactctttgtctgtacaagctcttgttgtctgggtgagcggcggaggcgctgctgtggattggtcacagggagaaacctctgatctgttcctattggcccgtccgtcaagggacgatgatgattggtagggcagagcaatctgagtcctagttggtggagttctgcccggatggaagctccggccgcggagtgatggtggcctcagcgaagatgggccgggcagggaccatggcggtggcagcagaggtggcaggggcggggcggctggcggtagaggaggctgtggtcctcagggggctgtaggtggaggtatggctcgggccagcagcgggaacggcagcgaggaggcctggggggcacttcgggcgccgcaacagcagcttcgagagctgtgcccaggagtgaacaaccagccctacctctgtgagagtggtcactgctgcggggagactggctgctgcacctactactatgagctctggtggttctggctgctctggactgtcctcatcctctttagctgctgttgcgccttccgccaccgacgagctaaactcaggctgcaacaacagcagcggcagcgtgaaatcaacttgttggcctatcatggggcatgccatggggctggtcctttccctaccggttcactgcttgaccttcgtgagtgacttgatgccctgggtcagctaccagtggccctccccaaaccagaaccccaaatcgtctcacattcccttttccacacatttcaaagtatttttccctaatataaaaactagcaccctatacctggttgtcttcaaccaatcatgccaattttctcccctgcagggcttcctcagcaccttcaagcccccagcctacgaggatgtggttcaccgcccaggcacaccaccccccccttatactgtggccccaggccgccccttgactgcttccagtgaacaaacctgctgttcctcctcatccagctgccctgcccactttgaaggaacaaatgtggaaggtgtttcctcccaccagagtgccccccctcatcaggagggtgagcccggggcaggggtgacccctgcctccacacccccctcctgccgctatcgccgtttaactggcgactccggtattgagctctgcccttgtcctgcctccggtgagggtgagccagtcaaggaggtgagggttagtgccaccctgccagatctggaggactactccccgtgtgcactacccccagagtctgtaccgcagatctttcccatggggctgtcttccagtgaaggggacatcccataagtagttttgagagggtggatgggttacttgcccaccagaaacagccctagtcccaactccttgcgttcctttggcccctccctgcctacctagaatctgcctgaaagggctggagaggggcagtattgggggactgtgctagctttacccccgcaggacatacacaggagcctttgatctcattaaagagatgtgaaccagcta

SEQ ID NO: 428115 - DNA, 986 bp, Homo sapiens
gtgggtcgaaccttcacctactctttgtctgtacaagctcttgttgtctgggtgagcggcggaggcgctgctgtggattggtcacagggagaaacctctgatctgttcctattggcccgtccgtcaagggacgatgatgattggtagggcagagcaatctgagtcctagttggtggagttctgcccggatggaagctccggccgcggagtgatggtggcctcagcgaagatgggccgggcagggaccatggcggtggcagcagaggtggcaggggcggggcggctggcggtagaggaggctgtggtcctcagggggctgtaggtggaggtatggctcgggccagcagcgggaacggcagcgaggaggcctggggggcacaccaccccccccttatactgtggccccaggccgccccttgactgcttccagtgaacaaacctgctgttcctcctcatccagctgccctgcccactttgaaggaacaaatgtggaaggtgtttcctcccaccagagtgccccccctcatcaggagggtgagcccggggcaggggtgacccctgcctccacacccccctcctgccgctatcgccgtttaactggcgactccggtattgagctctgcccttgtcctgcctccggtgagggtgagccagtcaaggaggtgagggttagtgccaccctgccagatctggaggactactccccgtgtgcactacccccagagtctgtaccgcagatctttcccatggggctgtcttccagtgaaggggacatcccataagtagttttgagagggtggatgggttacttgcccaccagaaacagccctagtcccaactccttgcgttcctttggcccctccctgcctacctagaatctgcctgaaagggctggagaggggcagtattgggggactgtgctagctttacccccgcaggacatacacaggagcctttgatctcattaaagagatgtgaaccagcta

SEQ ID NO: 428116 - DNA, 1374 bp, Homo sapiens
  misc_feature (1330)..(1330): n is a, c, g, or t
gtgggtcgaaccttcacctactctttgtctgtacaagctcttgttgtctgggtgagcggcggaggcgctgctgtggattggtcacagggagaaacctctgatctgttcctattggcccgtccgtcaagggacgatgatgattggtagggcagagcaatctgagtcctagttggtggagttctgcccggatggaagctccggccgcggagtgatggtggcctcagcgaagatgggccgggcagggaccatggcggtggcagcagaggtggcaggggcggggcggctggcggtagaggaggctgtggtcctcagggggctgtaggtggaggtatggctcgggccagcagcgggaacggcagcgaggaggcctggggggcacttcgggcgccgcaacagcagcttcgagagctgtgcccaggagtgaacaaccagccctacctctgtgagagtggtcactgctgcggggagactggctgctgcacctactactatgagctctggtggttctggctgctctggactgtcctcatcctctttagctgctgttgcgccttccgccaccgacgagctaaactcaggctgcaacaacagcagcggcagcgtgaaatcaacttgttggcctatcatggggcatgccatggggctggtcctttccctaccggttcactgcttgaccttcgcttcctcagcaccttcaagcccccagcctacgaggatgtggttcaccgcccaggcacaccaccccccccttatactgtggccccaggccgccccttgactgcttccagtgaacaaacctgctgttcctcctcatccagctgccctgcccactttgaaggaacaaatgtggaaggtgtttcctcccaccagagtgccccccctcatcaggagggtgagcccggggcaggggtgacccctgcctccacacccccctcctgccgctatcgccgtttaactggcgactccggtattgagctctgcccttgtcctgcctccggtgagggtgagccagtcaaggaggtgagggttagtgccaccctgccagatctggaggactactccccgtgtgcactacccccagagtctgtaccgcagatctttcccatggggctgtcttccagtgaaggggacatcccataagtagttttgagagggtggatgggttacttgcccaccagaaacagccctagtcccaactccttgcgttcctttggcccctccctgcctacctagaatctgcctgaaagggctggagaggggcagtattgggtgtgaatcgaattcctgcagcccgggggatccactagttctagagcggccgccaccgcgntggagctccagtttttgttccctttagttattgttaattgcgca

SEQ ID NO: 428117 - DNA, 1422 bp, Homo sapiens
gtgggtcgaaccttcacctactctttgtctgtacaagctcttgttgtctgggtgagcggcggaggcgctgctgtggattggtcacagggagaaacctctgatctgttcctattggcccgtccgtcaagggacgatgatgattggtagggcagagcaatctgagtcctagttggtggagttctgcccggatggaagctccggccgcggagtgatggtggcctcagcgaagatgggccgggcagggaccatggcggtggcagcagaggtggcaggggcggggcggctggcggtagaggaggctgtggtcctcagggggctgtaggtggaggtatggctcgggccagcagcgggaacggcagcgaggaggcctggggggcacttcgggcgccgcaacagcagcttcgagagctgtgcccaggagtgaacaaccagccctacctctgtgagagtggtcactgctgcggggagactggctgctgcacctactactatgagctctggtggttctggctgctctggactgtcctcatcctctttagctgctgttgcgccttccgccaccgacgagctaaactcaggctgcaacaacagcagcggcagcgtgaaatcaacttgttggcctatcatggggcatgccatggggctggtcctttccctaccggttcactgcttgaccttcgcttcctcagcaccttcaagcccccagcctacgaggatgtggttcaccgcccaggcacaccaccccccccttatactgtggccccaggccgccccttgactgcttccagtgaacaaacctgctgttcctcctcatccagctgccctgcccactttgaaggaacaaatgtggaaggtgtttcctcccaccagagtgccccccctcatcaggagggtgagcccggggcaggggtgacccctgcctccacacccccctcctgccgctatcgccgtttaactggcgactccggtattgagctctgcccttgtcctgcctccggtgagggtgagccagtcaaggaggtgagggttagtgccaccctgccagatctggaggactactccccgtgtgcactacccccagagtctgtaccgcagatctttcccatggggctgtcttccagtgaaggggacatcccataagtagttttgagagggtggatgggttacttgcccaccagaaacagccctagtcccaactccttgcgttcctttggcccctccctgcctacctagaatctgcctgaaagggctggagaggggcagtattgggggactgtgctagctttacccccgcaggacatacacaggagcctttgatctcattaaagagatgtgaaccagctaaattaaatcccttattcacttcttccaagagggtaataactgaaaaaaaaaacccgttacttgtcctcctggggccat

SEQ ID NO: 428118 - DNA, 1916 bp, Homo sapiens
gtgggtcgaaccttcacctactctttgtctgtacaagctcttgttgtctgggtgagcggcggaggcgctgctgtggattggtcacagggagaaacctctgatctgttcctattggcccgtccgtcaagggacgatgatgattggtagggcagagcaatctgagtcctagttggtggagttctgcccggatggaagctccggccgcggagtgatggtggcctcagcgaagatgggccgggcagggaccatggcggtggcagcagaggtggcaggggcggggcggctggcggtagaggaggctgtggtcctcagggggctgtaggtggaggtatggctcgggccagcagcgggaacggcagcgaggaggcctggggggcacttcgggcgccgcaacagcagatcccaatagctccaaaacctatcacgacagccatttgtctctttcccctttccttgtcccttccttttgggggtgggggaggaactcacggagccaaaggtactgtgaagttcctaaacatgtctcttccactctttgtctaaactttgtaacgtagatgcagctgactttgcctgtagcctcatagaacccatcccatggctgcagtggaagcttgcggtggctctccagtgaccagaggcatagtgaggtcccagggaggctccctctgtcttgcaacagttatttgtgatctttttctatgtgcctattgtcacaacagagtccggcagcgtcttctcttgagggagcaatttggagaagagctggaacccagactcgcgccctggatgccatcctttatcatccacagcaatcccatctggttgggagcactgctctgggtctcacactgcccctcctctatcctagggagcctgaggcccaggggtggaaagatccagttgcgggtggggggtagtgaaccgtgcaggataatgaaagcaacttgctttggaaatgacctaccgctacccgttgtctgagactgagattatctcagactgtcttctggcttctgccaaaacactcccttaacagaaagcaccgaggggatgggggtaggggggttggggagagtgaggcttgagtgtgaaggaagtctcatatatgcagagctgaaatctccctctttgtatgtccacacttttgtcttgttctctagactgattcttgctattccaaatcctcttccacgttgacagcccttcagatatttcaacactcctctcagcatcctccacttcccccatctctccaagctgaacttggttcacagggtgggattgtgtatgtgcatgcaggaggtgggggtggacagtgccctgggctggaatcccccttagttctaagtgcctccttgcccgcagcttcgagagctgtgcccaggagtgaacaaccagccctacctctgtgagagtggtcactgctgcggggagactggctgctgcacctactactatgagctctggtggttctggctgctctggactgtcctcatcctctttagctgctgttgcgccttccgccaccgacgagctaaactcaggctgcaacaacagcagcggcagcgtgaaatcaacttgttggcctatcatggggcattgccaccctgccagatctggaggactactccccgtgtgcactacccccagagtctgtaccgcagatctttcccatggggctgtcttccagtgaaggggacatcccataagtagttttgagagggtggatgggttacttgcccaccagaaacagccctagtcccaactccttgcgttcctttggcccctccctgcctacctagaatctgcctgaaagggctggagaggggcagtattgggggactgtgctagctttacccccgcaggacatacacaggagcctttgatctcattaaagagatgtgaaccagcta

SEQ ID NO: 428119 - DNA, 1485 bp, Homo sapiens
gtgggtcgaaccttcacctactctttgtctgtacaagctcttgttgtctgggtgagcggcggaggcgctgctgtggattggtcacagggagaaacctctgatctgttcctattggcccgtccgtcaagggacgatgatgattggtagggcagagcaatctgagtcctagttggtggagttctgcccggatggaagctccggccgcggagtgatggtggcctcagcgaagatgggccgggcagggaccatggcggtggcagcagaggtggcaggggcggggcggctggcggtagaggaggctgtggtcctcagggggctgtaggtggaggtatggctcgggccagcagcgggaacggcagcgaggaggcctggggggcacttcgggcgccgcaacagcagatcccaatagctccaaaacctatcacgacagccatttgtctctttcccctttccttgtcccttccttttgggggtgggggaggaactcacggagccaaaggtactgtgaagttcctaaacatgtctcttccactctttgtctaaactttgtaacgtagatgcagctgactttgcctgtagcctcatagaacccatcccatggctgcagtggaagcttgcggtggctctccagtgaccagaggcatagtgaggtcccagggaggctccctctgtcttgcaacagttatttgtgatctttttctatgtgcctattgtcacaacagagtccggcagcgtcttctcttgagggagcaatttggagaagagctggaacccagactcgcgccctggatgccatcctttatcatccacagcaatcccatctggttgggagcactgctctgggtctcacactgcccctcctctatcctagggagcctgaggcccaggggtggaaagatccagttgcgggtggggggtagtgaaccgtgcaggataatgaaagcaacttgctttggaaatgacctaccgctacccgttgtctgagactgagattatctcagactgtcttctggcttctgccaaaacactcccttaacagaaagcaccgaggggatgggggtaggggggttggggagagtgaggcttgagtgtgaaggaagtctcatatatgcagagctgaaatctccctctttgtatgtccacacttttgtcttgttctctagactgattcttgctattccaaatcctcttccacgttactccccgtgtgcactacccccagagtctgtaccgcagatctttcccatggggctgtcttccagtgaaggggacatcccataagtagttttgagagggtggatgggttacttgcccaccagaaacagccctagtcccaactccttgcgttcctttggcccctccctgcctacctagaatctgcctgaaagggctggagaggggcagtattgggggactgtgctagctttacccccgcaggacatacacaggagcctttgatctcattaaagagatgtgaaccagcta

SEQ ID NO: 428120 - DNA, 1911 bp, Homo sapiens
gtgggtcgaaccttcacctactctttgtctgtacaagctcttgttgtctgggtgagcggcggaggcgctgctgtggattggtcacagggagaaacctctgatctgttcctattggcccgtccgtcaagggacgatgatgattggtagggcagagcaatctgagtcctagttggtggagttctgcccggatggaagctccggccgcggagtgatggtggcctcagcgaagatgggccgggcagggaccatggcggtggcagcagaggtggcaggggcggggcggctggcggtagaggaggctgtggtcctcagggggctgtaggtggaggtatggctcgggccagcagcgggaacggcagcgaggaggcctggggggcacttcgggcgccgcaacagcagatcccaatagctccaaaacctatcacgacagccatttgtctctttcccctttccttgtcccttccttttgggggtgggggaggaactcacggagccaaaggtactgtgaagttcctaaacatgtctcttccactctttgtctaaactttgtaacgtagatgcagctgactttgcctgtagcctcatagaacccatcccatggctgcagtggaagcttgcggtggctctccagtgaccagaggcatagtgaggtcccagggaggctccctctgtcttgcaacagttatttgtgatctttttctatgtgcctattgtcacaacagagtccggcagcgtcttctcttgagggagcaatttggagaagagctggaacccagactcgcgccctggatgccatcctttatcatccacagcaatcccatctggttgggagcactgctctgggtctcacactgcccctcctctatcctagggagcctgaggcccaggggtggaaagatccagttgcgggtggggggtagtgaaccgtgcaggataatgaaagcaacttgctttggaaatgacctaccgctacccgttgtctgagactgagattatctcagactgtcttctggcttctgccaaaacactcccttaacagaaagcaccgaggggatgggggtaggggggttggggagagtgaggcttgagtgtgaaggaagtctcatatatgcagagctgaaatctccctctttgtatgtccacacttttgtcttgttctctagactgattcttgctattccaaatcctcttccacgttgacagcccttcagatatttcaacactcctctcagcatcctccacttcccccatctctccaagctgaacttggttcacagggtgggattgtgtatgtgcatgcaggaggtgggggtggacagtgccctgggctggaatcccccttagttctaagtgcctccttgcccgcagcttcgagagctgtgcccaggagtgaacaaccagccctacctctgtgagagtggtcactgctgcggggagactggctgctgcacctactactatgagctctggtggttctggctgctctggactgtcctcatcctctttagctgctgttgcgccttccgccaccgacgagctaaactcaggctgcaacaacagcagcggcagcgtgaaatcaacttgttggcctatcatggggcatgccatggggctggtcctttccctaccggttcactgcttgaccttcgcttcctcagcaccttcaagcccccagcctacgaggatgtggttcaccgcccaggcacaccaccccccccttatactgtggccccaggccgccccttgactgcttccagtgaacaaacctgctggcggtagaggaggctgtggtcctcagggggctgtaggtggaggtatggctcgggccagcagcgggaacggcagcgaggaggcctggggggcacttcgggcgccgcaacagcagctttcggagagctttgcccagggagt

SEQ ID NO: 428121 - DNA, 1362 bp, Homo sapiens
gtgggtcgaaccttcacctactctttgtctgtacaagctcttgttgtctgggtgagcggcggaggcgctgctgtggattggtcacagggagaaacctctgatctgttcctattggcccgtccgtcaagggacgatgatgattggtagggcagagcaatctgagtcctagttggtggagttctgcccggatggaagctccggccgcggagtgatggtggcctcagcgaagatgggccgggcagggaccatggcggtggcagcagaggtggcaggggcggggcggctggcggtagaggaggctgtggtcctcagggggctgtaggtggaggtatggctcgggccagcagcgggaacggcagcgaggaggcctggggggcacttcgggcgccgcaacagcagatcccaatagctccaaaacctatcacgacagccatttgtctctttcccctttccttgtcccttccttttgggggtgggggaggaactcacggagccaaaggtactgtgaagttcctaaacatgtctcttccactctttgtctaaactttgtaacgtagatgcagctgactttgcctgtagcctcatagaacccatcccatggctgcagtggaagcttgcggtggctctccagtgaccagaggcatagtgaggtcccagggaggctccctctgtcttgcaacagttatttgtgatctttttctatgtgcctattgtcacaacagagtccggcagcgtcttctcttgagggagcaatttggagaagagctggaacccagactcgcgccctggatgccatcctttatcatccacagcaatcccatctggttgggagcactgctctgggtctcacactgcccctcctctatcctagggagcctgaggcccaggggtggaaagatccagttgcgggtggggggtagtgaaccgtgcaggataatgaaagcaacttgctttggaaatgacctaccgctacccgttgtctgagactgagattatctcagactgtcttctggcttctgccaaaacactcccttaacagaaagcaccgaggggatgggggtaggggggttggggagagtgaggcttgagtgtgaaggaaagtctgtaccgcagatctttcccatggggctgtcttccagtgaaggggacatcccataagtagttttgagagggtggatgggttacttgcccaccagaaacagccctagtcccaactccttgcgttcctttggcccctccctgcctacctagaatctgcctgaaagggctggagaggggcagtattgggggactgtgctagctttacccccgcaggacatacacaggagcctttgatctcattaaagagatgtgaaccagcta

SEQ ID NO: 428122 - DNA, 1420 bp, Homo sapiens
gtgggtcgaaccttcacctactctttgtctgtacaagctcttgttgtctgggtgagcggcggaggcgctgctgtggattggtcacagggagaaacctctgatctgttcctattggcccgtccgtcaagggacgatgatgattggtagggcagagcaatctgagtcctagttggtggagttctgcccggatggaagctccggccgcggagtgatggtggcctcagcgaagatgggccgggcagggaccatggcggtggcagcagaggtggcaggggcggggcggctggcggtagaggaggctgtggtcctcagggggctgtaggtggaggtatggctcgggccagcagcgggaacggcagcgaggaggcctggggggcacttcgggcgccgcaacagcagatcccaatagctccaaaacctatcacgacagccatttgtctctttcccctttccttgtcccttccttttgggggtgggggaggaactcacggagccaaaggtactgtgaagttcctaaacatgtctcttccactctttgtctaaactttgtaacgtagatgcagctgactttgcctgtagcctcatagaacccatcccatggctgcagtggaagcttgcggtggctctccagtgaccagaggcatagtgaggtcccagggaggctccctctgtcttgcaacagttatttgtgatctttttctatgtgcctattgtcacaacagagtccggcagcgtcttctcttgagggagcaatttggagaagagctggaacccagactcgcgccctggatgccatcctttatcatccacagcaatcccatctggttgggagcactgctctgggtctcacactgcccctcctctatcctagggagcctgaggcccaggggtggaaagatccagttgcgggtggggggtagtgaaccgtgcaggataatgaaagcaacttgctttggaaatgacctaccgctacccgttgtctgagactgagattatctcagactgtcttctggcttctgccaaaacactcccttaacagaaagcaccgaggggatgggggtaggggggttggggagagtgaggcttgagtgtgaaggaagtctcatatatgcagagctgaaatctccctctttgtatgtccacacttttgtcttgttctctagactgattcttgctattccaaatcctcttccacgttgaaggggacatcccataagtagttttgagagggtggatgggttacttgcccaccagaaacagccctagtcccaactccttgcgttcctttggcccctccctgcctacctagaatctgcctgaaagggctggagaggggcagtattgggggactgtgctagctttacccccgcaggacatacacaggagcctttgatctcattaaagagatgtgaaccagcta

SEQ ID NO: 428123 - DNA, 727 bp, Homo sapiens
gtgggtcgaaccttcacctactctttgtctgtacaagctcttgttgtctgggtgagcggcggaggcgctgctgtggattggtcacagggagaaacctctgatctgttcctattggcccgtccgtcaagggacgatgatgattggtagggcagagcaatctgagtcctagttggtggagttctgcccggatggaagctccggccgcggagtgatggtggcctcagcgaagatgggccgggcagggaccatggcggtggcagcagaggtggcaggggcggggcggctggcggtagaggaggctgtggtcctcagggggctgtaggtggaggtatggctcgggccagcagcgggaacggcagcgaggaggcctggggggcacttcgggcgccgcaacagcagatgcagctgactttgcctgtagcctcatagaacccatcccatggctgcagtggaagcttgcggtggctctccagtgaccagaggcatagtgaggtcccagggaggctccctctgtcttgcaacagttatttgtgatctttttctatgtgcctattgtcacaacagagtccggcagcgtcttctcttgagggagcaatttggagaagagctggaacccagactcgcgccctggatgccatcctttatcatccacagcaatcccatctgcccttcagatatttcacactcctctcagcatccgaacgtccggggatcttagatgacctcc

SEQ ID NO: 428124 - DNA, 466 bp, Homo sapiens
ccggtccgaaaattcccgggtcgcctaactactactaaattaacggccgcgtcgacgccagatagctggaagacattagatcagcaacagttcttcacagaggaagaactaaaagaatatgaaaatattattgctttacaagaaaatgaacttaagaagaaggcagatgagcttcagaaacaaaaagaagagctacaacgtcagcatgatcaactggaggctcagaagctggaatatcatcaggtcatacagcagatggaacaaaaaaaattacaacaaggaattcctccatcagggccagctggagaattgaagtttgagccacacatttaaagtctgaagtccaccagaacttggaagaaagctgttaactcaacatctatttcatctttttagctcccttcctttttctctgctcaataaatattttaaaagcatatttgaaataaagggagatactttttaa

SEQ ID NO: 428125 - DNA, 551 bp, Homo sapiens
ggggcagagcggagcggtgggccgggggctggaggacaggtttgtgcgctggacgcaagcaccaggcgcagcctcgctcgccgacacccggccaggtaaggccggtggccgcgcgaacgtgttacgagtcagtttttagtgaaaaaacattgagctaggagccaagacccatctcttcactattttggtattgtgcaagtcatcttacctctctggatctcagttgtctcatctgtaaaaaggagataaaaattatttacctgcctgaacatgaggtggaggaccatcctgctacagtattgctttctcttgattacatgtttacttactgctcttgaagctgtgcctattgacatagacaagacaaaagtacaaaatattcaccctgtggaaagtgcgaagatagaaccaccagtaagtgaaatgaagtgaaatgggaggaattataactaaatgaaatgaattataattgtaactaaatgaggtggaatgaggtgaaactataactaaatgaaatgagaggaattataacaaaaatattgctaatattt

SEQ ID NO: 428126 - DNA, 1646 bp, Homo sapiens
ggggcagagcggagcggtgggccgggggctggaggacaggtttgtgcgctggacgcaagcaccaggcgcagcctcgctcgccgacacccggccagaacgtgttacgagtcagtttttagtgaaaaaacattgagctaggagccaagacccatctcttcactattttggtattgtgcaagtcatcttacctctctggatctcagttgtctcatctgtaaaaaggagataaaaattatttacctgcctgaacatgaggtggaggaccatcctgctacagtattgctttctcttgattacatgtttacttactgctcttgaagctgtgcctattgacatagacaagacaaaagtacaaaatattcaccctgtggaaagtgcgaagatagaaccaccagatactggactttattatgatgaatatctcaagcaagtgattgatgtgctggaaacagataaacacttcagagaaaagctccagaaagcagacatagaggaaataaagagtgggaggctaagcaaagaactggatttagtaagtcaccatgtgaggacaaaacttgatgaactgaaaaggcaagaagtaggaaggttaagaatgttaattaaagctaagttggattcccttcaagatataggcatggaccaccaagctcttctaaaacaatttgatcacctaaaccacctgaatcctgacaagtttgaatccacagatttagatatgctaatcaaagcggcaacaagtgatctggaacactatgacaagactcgtcatgaagaatttaaaaaatatgaaatgatgaaggaacatgaaaggagagaatatttaaaaacattgaatgaagaaaagagaaaagaagaagagtctaaatttgaagaaatgaagaaaaagcatgaaaatcaccctaaagttaatcacccaggaagcaaagatcaactaaaagaggtatgggaagagactgatggattggatcctaatgactttgaccccaagacatttttcaaattacatgatgtcaatagtgatggattcctggatgaacaagaattagaagccctatttactaaagagttggagaaagtatatgaccctaaaaatgaagaggatgatatggtagaaatggaagaagaaaggcttagaatgagggaacatgtaatgaatgaggttgatactaacaaagacagattggtgactctggaggagtttttgaaagccacagaaaaaaaagaattcttggagccagatagctgggagacattagatcagcaacagttcttcacagaggaagaactaaaagaatatgaaaatattattgctttacaagaaaatgaacttaagaagaaggcagatgagcttcagaaacaaaaagaagagctacaacgtcagcatgatcaactggaggctcagaagctggaatatcatcaggtcatacagcagatggaacaaaaaaaattacaacaaggaattcctccatcagggccagctggagaattgaagtttgagccacacatttaaagtctgaagtccaccagaacttggaagaaagctgttaactcaacatctatttcatctttttagctcccttcctttttctctgctcaataaatattttaaaagcatatttgaaataaagggagatactttttaa

SEQ ID NO: 428127 - DNA, 2105 bp, Homo sapiens
ggggcagagcggagcggtgggccgggggctggaggacaggtttgtgcgctggacgcaagcaccaggcgcagcctcgctcgccgacacccggccaggtaaggccggtggccgcgcgaacgtgttacgagtcagtttttagtgaaaaaacattgagctaggagccaagacccatctcttcactattttggtattgtgcaagtcatcttacctctctggatctcagttgtctcatctgtaaaaaggagataaaaattatttacctgcctgaacatttctccttaaaaatatcagtcttggccgggcacggtggctcaggcctgtaatcccagcactttgggaggctgaggcgggcagatcacctgaggtcaggagttcaagaccagcctggccaacatgatgaggtggaggaccatcctgctacagtattgctttctcttgattacatgtttacttactgctcttgaagctgtgcctattgacatagacaagacaaaagtacaaaatattcaccctgtggaaagtgcgaagatagaaccaccagatactggactttattatgatgaatatctcaagcaagtgattgatgtgctggaaacagataaacacttcagagaaaagctccagaaagcagacatagaggaaataaagagtgggaggctaagcaaagaactggatttagtaagtcaccatgtgaggacaaaacttgatgaactgaaaaggcaagaagtaggaaggttaagaatgttaattaaagctaagttggattcccttcaagatataggcatggaccaccaagctcttctaaaacaatttgatcacctaaaccacctgaatcctgacaagtttgaatccacagatttagatatgctaatcaaagcggcaacaagtgatctggaacactatgacaagactcgtcatgaagaatttaaaaaatatgaaatgatgaaggaacatgaaaggagagaatatttaaaaacattgaatgaagaaaagagaaaagaagaagagtctaaatttgaagaaatgaagaaaaagcatgaaaatcaccctaaagttaatcacccaggaagcaaagatcaactaaaagaggtatgggaagagactgatggattggatcctaatgactttgaccccaagacatttttcaaattacatgatgtcaatagtgatggattcctggatgaacaagaattagaagccctatttactaaagagttggagaaagtatatgaccctaaaaatgaagaggatgatatggtagaaatggaagaagaaaggcttagaatgagggaacatgtaatgaatgaggttgatactaacaaagacagattggtgactctggaggagtttttgaaagccacagaaaaaaaagaattcttggagccagatagctgggagacattagatcagcaacagttcttcacagaggaagaactaaaagaatatgaaaatattattgctttacaagaaaatgaacttaagaagaaggcagatgagcttcagaaacaaaaagaagagctacaacgtcagcatgatcaactggaggctcagaagctggaatatcatcaggtcatacagcagatggaacaaaaaaaattacaacaaggaattcctccatcagggccagctggagaattgaagtttgagccacacatttaaagtctgaagtccaccagaacttggaagaaagctgttaactcaacatctatttcatctttttagctcccttcctttttctctgctcaataaatattttaaaagcatatttgaaataaagggagatactttttaaatgaaaacactttttttgggacacagatattaaaggattgaagtttatcagaaccaggaagaaaacaaactcactgtctgctctctgctctcacattcacacggctcttttatttatttttttgttctcctttaatgatttaattaagtggctttatgccataatttagtgaaactattaggaactatttaagtgagaaaactctgcctcttgcttttaaattagattgctctcacttactcgtaaacataggtattcttttatgggtgcttatcattccttctttcaataaatgtctgtttgatattaacaa

SEQ ID NO: 428128 - DNA, 2160 bp, Homo sapiens
ggggcagagcggagcggtgggccgggggctggaggacaggtttgtgcgctggacgcaagcaccaggcgcagcctcgctcgccgacacccggccaggtaaggccggtggccgcgcgaacgtgttacgagtcagtttttagtgaaaaaacattgagctaggagccaagacccatctcttcactattttggtattgtgcaagtcatcttacctctctggatctcagttgtctcatctgtaaaaaggagataaaaattatttacctgcctgaacatgaggtggaggaccatcctgctacagtattgctttctcttgattacatgtttacttactgctcttgaagctgtgcctattgacatagacaagacaaaagtacaaaatattcaccctgtggaaagtgcgaagatagaaccaccagatactggactttattatgatgaatatctcaagcaagtgattgatgtgctggaaacagataaacacttcagagaaaagctccagaaagcagacatagaggaaataaagagtgggaggctaagcaaagaactggatttagtaagtcaccatgtgaggacaaaacttgatgaactgaaaaggcaagaagtaggaaggttaagaatgttaattaaagctaagttggattcccttcaagatataggcatggaccaccaagctcttctaaaacaatttgatcacctaaaccacctgaatcctgacaagtttgaatccacagatttagatatgctaatcaaagcggcaacaagtgatctggaacactatgacaagactcgtcatgaagaatttaaaaaatatgaaatgatgaaggaacatgaaaggagagaatatttaaaaacattgaatgaagaaaagagaaaagaagaagagtctaaatttgaagaaatgaagaaaaagcatgaaaatcaccctaaagttaatcacccaggaagcaaagatcaactaaaagaggtatgggaagagactgatggattggatcctaatgactttgaccccaagacatttttcaaattacatgatgtcaatagtgatggattcctggatgaacaagaattagaagccctatttactaaagagttggagaaagtatatgaccctaaaaatgaagaggatgatatggtagaaatggaagaagaaaggcttagaatgagggaacatgtaatgaatgaggttgatactaacaaagacagattggtgactctggaggagtttttgaaagccacagaaaaaaaagaattcttggagccagatagctgggagacattagatcagcaacagttcttcacagaggaagaactaaaagaatatgaaaatattattgctttacaagaaaatgaacttaagaagaaggcagatgagcttcagaaacaaaaagaagagctacaacgtcagcatgatcaactggaggctcagaagctggaatatcatcaggtcatacagcagatggaacaaaaaaaattacaacaaggaattcctccatcagggccagctggagaattgaagtttgagccacgtccagaggtgtccttctaaagctggtagaggtttcacgagtcatcagggacccagaacccttctcttttgctgtccctttgtcctagtgcatggtttccacactgtggtgcaagatgtctcctcaagctctaggcattacatctgctatcctgctgtcagaaagaaggaaggggaaaagaagatcatttccttctctttaaggacatttcccagaagtcacacagaacatttccatttatattactttggccagaacttggtcatatggccacatttagttccagaatgattaggaaatgcagtcttttattgatccctgtgcccaggaaaatattggaggcctttttcaaggaaaaaggggaaaacagatattggttgacaaatagcagtctctgccatactgtccctggatacatgtctttgagtgaatgtcccttatttaccattctgattacttgttggatattttcaatatgtgttacaatatggttccaaaattgtatgtgatattccaacagcaagttggatgcaatgtgtcataaaaatgacctcagtgtcaaccagcatttgaataccgtgtctcaatgctgtgcaccaataaagaacacagaaagtcagagttttccataaata

SEQ ID NO: 428129 - DNA, 1922 bp, Homo sapiens
ggggcagagcggagcggtgggccgggggctggaggacaggtttgtgcgctggacgcaagcaccaggcgcagcctcgctcgccgacacccggccaggtaaggccggtggccgcgcgaacgtgttacgagtcagtttttagtgaaaaaacattgagctaggagccaagacccatctcttcactattttggtattgtgcaagtcatcttacctctctggatctcagttgtctcatctgtaaaaaggagataaaaattatttacctgcctgaacatgaggtggaggaccatcctgctacagtattgctttctcttgattacatgtttacttactgctcttgaagctgtgcctattgacatagacaagacaaaagtacaaaatattcaccctgtggaaagtgcgaagatagaaccaccagatactggactttattatgatgaatatctcaagcaagtgattgatgtgctggaaacagataaacacttcagagaaaagctccagaaagcagacatagaggaaataaagagtgggaggctaagcaaagaactggatttagtaagtcaccatgtgaggacaaaacttgatgaactgaaaaggcaagaagtaggaaggttaagaatgttaattaaagctaagttggattcccttcaagatataggcatggaccaccaagctcttctaaaacaatttgatcacctaaaccacctgaatcctgacaagtttgaatccacagatttagatatgctaatcaaagcggcaacaagtgatctggaacactatgacaagactcgtcatgaagaatttaaaaaatatgaaatgatgaaggaacatgaaaggagagaatatttaaaaacattgaatgaagaaaagagaaaagaagaagagtctaaatttgaagaaatgaagaaaaagcatgaaaatcaccctaaagttaatcacccaggaagcaaagatcaactaaaagaggtatgggaagagactgatggattggatcctaatgactttgaccccaagacatttttcaaattacatgatgtcaatagtgatggattcctggatgaacaagaattagaagccctatttactaaagagttggagaaagtatatgaccctaaaaatgaagaggatgatatggtagaaatggaagaagaaaggcttagaatgagggaacatgtaatgaatgaggttgatactaacaaagacagattggtgactctggaggagtttttgaaagccacagaaaaaaaagaattcttggagccagatagctgggagacattagatcagcaacagttcttcacagaggaagaactaaaagaatatgaaaatattattgctttacaagaaaatgaacttaagaagaaggcagatgagcttcagaaacaaaaagaagagctacaacgtcagcatgatcaactggaggctcagaagctggaatatcatcaggtcatacagcagatggaacaaaaaaaattacaacaaggaattcctccatcagggccagctggagaattgaagtttgagccacgtgtgtaattttgtttgattatttatttaggaaaataaattattttatcaattgaaatccacatttattacaaatataatttcaaatcattaagatgttatgttattttttgtgtattttttgtggtattagagcaatttagattatagaaaaatgaaaatgcctccaaaagttttatgtagcagcaaattttaagtgctgtatcatttgtataatttgataaccatatttatggtaaaatgatttatttcaactttatttgtaattctttctaattatattaatcttaccagagaatatgttttttaaaattgtgatctatgattagctaagcatattttttaaaacaagtatatttgtatatgaaggaacatttagaataaaggaagatactttt

SEQ ID NO: 428130 - DNA, 1567 bp, Homo sapiens
  misc_feature (16)..(16): n is a, c, g, or t
  misc_feature (25)..(25): n is a, c, g, or t
  misc_feature (34)..(34): n is a, c, g, or t
agctgttccgaggatncccgtcganagaatccangcaagtgattgatgtgctggaaacagataaacacttcagagaaaagctccagaaagcagacatagaggaaataaagagtgggaggctaagcaaagaactggatttagtaagtcaccatgtgaggacaaaacttgatgaactgaaaaggcaagaagtaggaaggttaagaatgttaattaaagctaagttggattcccttcaagatataggcatggaccaccaagctcttctaaaacaatttgatcacctaaaccacctgaatcctgacaagtttgaatccacagatttagatatgctaatcaaagcggcaacaagtgatctggaacactatgacaagactcgtcatgaagaatttaaaaaatatgaaatgatgaaggaacatgaaaggagagaatatttaaaaacattgaatgaagaaaagagaaaagaagaagagtctaaatttgaagaaatgaagaaaaagcatgaaaatcaccctaaagttaatcacccaggaagcaaagatcaactaaaagaggtatgggaagagactgatggattggatcctaatgactttgaccccaagacatttttcaaattacatgatgtcaatagtgatggattcctggatgaacaagaattagaagccctatttactaaagagttggagaaagtatatgaccctaaaaatgaagaggatgatatggtagaaatggaagaagaaaggcttagaatgagggaacatgtaatgaatgaggttgatactaacaaagacagattggtgactctggaggagtttttgaaagccacagaaaaaaaagaattcttggagccagatagctgggagacattagatcagcaacagttcttcacagaggaagaactaaaagaatatgaaaatattattgctttacaagaaaatgaacttaagaagaaggcagatgagcttcagaaacaaaaagaagagctacaacgtcagcatgatcaactggaggctcagaagctggaatatcatcaggtcatacagcagatggaacaaaaaaaattacaacaaggaattcctccatcagggccagctggagaattgaagtttgagccacacatttaaagtctgaagtccaccagaacttggaagaaagctgttaactcaacatctatttcatctttttagctcccttcctttttctctgctcaataaatattttaaaagcatatttgaaataaagggagatactttttaaatgaaaacactttttttgggacacagatattaaaggattgaagtttatcagaaccaggaagaaaacaaactcactgtctgctctctgctctcacattcacacggctcttttatttatttttttgttctcctttaatgatttaattaagtggctttatgccataatttagtgaaactattaggaactatttaagtgagaaaactctgcctcttgcttttaaattagattgctctcacttactcgtaaacataggtattcttttatgggtgcttatcattccttctttcaataaatgtctgtttgatattaacaa

SEQ ID NO: 428131 - DNA, 1220 bp, Homo sapiens
ccaacatctcatttcttcacatttagtcgtcatgaagaatttaaaaaatatgaaatgatgaaggaacatgaaaggagagaatatttaaaaacattgaatgaagaaaagagaaaagaagaagagtctaaatttgaagaaatgaagaaaaagcatgaaaatcaccctaaagttaatcacccaggaagcaaagatcaactaaaagaggtatgggaagagactgatggattggatcctaatgactttgaccccaagacatttttcaaattacatgatgtcaatagtgatggattcctggatgaacaagaattagaagccctatttactaaagagttggagaaagtatatgaccctaaaaatgaagaggatgatatggtagaaatggaagaagaaaggcttagaatgagggaacatgtaatgaatgaggttgatactaacaaagacagattggtgactctggaggagtttttgaaagccacagaaaaaaaagaattcttggagccagatagctgggagacattagatcagcaacagttcttcacagaggaagaactaaaagaatatgaaaatattattgctttacaagaaaatgaacttaagaagaaggcagatgagcttcagaaacaaaaagaagagctacaacgtcagcatgatcaactggaggctcagaagctggaatatcatcaggtcatacagcagatggaacaaaaaaaattacaacaaggaattcctccatcagggccagctggagaattgaagtttgagccacacatttaaagtctgaagtccaccagaacttggaagaaagctgttaactcaacatctatttcatctttttagctcccttcctttttctctgctcaataaatattttaaaagcatatttgaaataaagggagatactttttaaatgaaaacactttttttgggacacagatattaaaggattgaagtttatcagaaccaggaagaaaacaaactcactgtctgctctctgctctcacattcacacggctcttttatttatttttttgttctcctttaatgatttaattaagtggctttatgccataatttagtgaaactattaggaactatttaagtgagaaaactctgcctcttgcttttaaattagattgctctcacttactcgtaaacataggtattcttttatgggtgcttatcattccttctttcaataaatgtctgtttgatattaacaa

SEQ ID NO: 428132 - DNA, 1132 bp, Homo sapiens
taaattcgcggtcgcgtcgacgaaaagaagaagagtctaaatttgaagaaatgaagaaaaagcatgaaaatcaccctaaagttaatcacccaggaagcaaagatcaactaaaagaggtatgggaagagactgatggattggatcctaatgactttgaccccaagacatttttcaaattacatgatgtcaatagtgatggattcctggatgaacaagaattagaagccctatttactaaagagttggagaaagtatatgaccctaaaaatgaagaggatgatatggtagaaatggaagaagaaaggcttagaatgagggaacatgtaatgaatgaggttgatactaacaaagacagattggtgactctggaggagtttttgaaagccacagaaaaaaaagaattcttggagccagatagctgggagacattagatcagcaacagttcttcacagaggaagaactaaaagaatatgaaaatattattgctttacaagaaaatgaacttaagaagaaggcagatgagcttcagaaacaaaaagaagagctacaacgtcagcatgatcaactggaggctcagaagctggaatatcatcaggtcatacagcagatggaacaaaaaaaattacaacaaggaattcctccatcagggccagctggagaattgaagtttgagccacacatttaaagtctgaagtccaccagaacttggaagaaagctgttaactcaacatctatttcatctttttagctcccttcctttttctctgctcaataaatattttaaaagcatatttgaaataaagggagatactttttaaatgaaaacactttttttgggacacagatattaaaggattgaagtttatcagaaccaggaagaaaacaaactcactgtctgctctctgctctcacattcacacggctcttttatttatttttttgttctcctttaatgatttaattaagtggctttatgccataatttagtgaaactattaggaactatttaagtgagaaaactctgcctcttgcttttaaattagattgctctcacttactcgtaaacataggtattcttttatgggtgcttatcattccttctttcaataaatgtctgtttgatattaacaa

SEQ ID NO: 428133 - DNA, 1576 bp, Homo sapiens
ggggcagagcggagcggtgggccgggggctggaggacaggtttgtgcgctggacgcaagcaccaggcgcagcctcgctcgccgacacccggccaggtaaggccggtggccgcgcgaacgtgttacgagtcagtttttagtgaaaaaacattgagctaggagccaagacccatctcttcactattttggtattgtgcaagtcatcttacctctctggatctcagttgtctcatctgtaaaaaggagataaaaattatttacctgcctgaacatgaggtggaggaccatcctgctacagtattgctttctcttgattacatgtttacttactgctcttgaagctgtgcctattgacatagacaagacaaaagtacaaaatattcaccctgtggaaagtgcgaagatagaaccaccagatactggactttattatgatgaatatctcaagcaagtgattgatgtgctggaaacagataaacacttcagagaaaagctccagaaagcagacatagaggaaataaagagtgggaggctaagcaaagaactggatttagtaagtcaccatgtgaggacaaaacttgatgaactgaaaaggcaagaagtaggaaggttaagaatgttaattaaagctaagttggattcccttcaagatataggcatggaccaccaagctcttctaaaacaatttgatcacctaaaccacctgaatcctgacaagtttgaatccacagatttagatatgctaatcaaagcggcaacaagtgatctggaacactatgacaagactcgtcatgaagaatttaaaaaatatgaaatgatgaaggaacatgaaaggagagaatatttaaaaacattgaatgaagaaaagagaaaagaagaagagtctaaatttgaagaaatgaagaaaaagcatgaaaatcaccctaaagttaatcacccaggaagcaaagatcaactaaaagaggtatgggaagagactgatggattggatcctaatgactttgaccccaagacatttttcaaattacatgatgtcaatagtgatggattcctggatgaacaagaattagaagccctatttactaaagagttggagaaagtatatgaccctaaaaatgaagaggatgatatggtagaaatggaagaagaaaggcttagaatgagggaacatgtaatgaatgagacattagatcagcaacagttcttcacagaggaagaactaaaagaatatgaaaatattattgctttacaagaaaatgaacttaagaagaaggcagatgagcttcagaaacaaaaagaagagctacaacgtcagcatgatcaactggaggctcagaagctggaatatcatcaggtcatacagcagatggaacaaaaaaaattacaacaaggaattcctccatcagggccagctggagaattgaagtttgagccacacatttaaagtctgaagtccaccagaacttggaagaaagctgttaactcaacatctatttcatctttttagctcccttcctttttctctgctcaataaatattttaaaagcatatttgaaataaagggagatactttttaa

SEQ ID NO: 428134 - DNA, 1293 bp, Homo sapiens
ggggcagagcggagcggtgggccgggggctggaggacaggtttgtgcgctggacgcaagcaccaggcgcagcctcgctcgccgacacccggccaggtaaggccggtggccgcgcgaacgtgttacgagtcagtttttagtgaaaaaacattgagctaggagccaagacccatctcttcactattttggtattgtgcaagtcatcttacctctctggatctcagttgtctcatctgtaaaaaggagataaaaattatttacctgcctgaacatgaggtggaggaccatcctgctacagtattgctttctcttgattacatgtttacttactgctcttgaagctgtgcctattgacatagacaagacaaaagtacaaaatattcaccctgtggaaagtgcgaagatagaaccaccagatactggactttattatgatgaatatctcaagcaagtgattgatgtgctggaaacagataaacacttcagagaaaagctccagaaagcagacatagaggaaataaagagtgggaggctaagcaaagaactggatttagtaagtcaccatgtgaggacaaaacttgatgaactgaaaaggcaagaagtaggaaggttaagaatgttaattaaagctaagttggattcccttcaagatataggcatggaccaccaagctcttctaaaacaatttgatcacctaaaccacctgaatcctgacaagtttgaatccacagatttagatatgctaatcaaagcggcaacaagtgatctggaacactatgacaagactcgtcatgaagaatttaaaaaatatgaaatgatgaaggaacatgaaaggagagaatatttaaaaacattgaatgaagaaaagagaaaagaagaagagtctaaatttgaagaaatgaagaaaaagcatgaaaatcaccctaaagttaatcacccaggaagcaaagatcaactaaaagaggtatgggaagagactgatggattggatcctaatgactttgaccccaagacatttttcaaattacatgatgtcaatagtgatggattcctggatgaacaagaattagaagccctatttactaaagagttggagaaagtatatgaccctaaaaatgaagaggatgatatggtagaaatggaagaagaaaggcttagaatgagggaacatgtaatgaatgagagttgggtgcccattacatagactcaaattcgtctatgcgctgcgttcatgttgccctgccggatctagcgcagggtcatcgtattgtctcggcccaatcgcatgttatct

SEQ ID NO: 428135 - DNA, 161 bp, Homo sapiens
tcatgactttaccataattactcctttatttcagatgaggtggaggaccatcctgctacagtattgctttctcttgattacatgtttacttactgctcttgaagctgtgcctattgacatagacaagacaaaagtacaaaatattcaccctgtggaaagtg

SEQ ID NO: 428136 - DNA, 1959 bp, Homo sapiens
ggggcagagcggagcggtgggccgggggctggaggacaggtttgtgcgctggacgcaagcaccaggcgcagcctcgctcgccgacacccggccagaacgtgttacgagtcagtttttagtgaaaaaacattgagctaggagccaagacccatctcttcactattttggtattgtgcaagtcatcttacctctctggatctcagttgtctcatctgtaaaaaggagataaaaattatttacctgcctgaacatgaggtggaggaccatcctgctacagtattgctttctcttgattacatgtttacttactgctcttgaagctgtgcctattgacatagacaagacaaaagtacaaaatattcaccctgtggaaagtgcgaagatagaaccaccagatactggactttattatgatgaatatctcaagcaagtgattgatgtgctggaaacagataaacacttcagagaaaagctccagaaagcagacatagaggaaataaagagtgggaggctaagcaaagaactggatttagtaagtcaccatgtgaggacaaaacttgatgaactgaaaaggcaagaagtaggaaggttaagaatgttaattaaagctaagttggattcccttcaagatataggcatggaccaccaagctcttctaaaacaatttgatcacctaaaccacctgaatcctgacaagtttgaatccacagatttagatatgctaatcaaagcggcaacaagtgatctggaacactatgacaagactcgtcatgaagaatttaaaaaatatgaaatgatgaaggaacatgaaaggagagaatatttaaaaacattgaatgaagaaaagagaaaagaagaagagtctaaatttgaagaaatgaagaaaaagcatgaaaatcaccctaaagttaatcacccaggaagcaaagatcaactaaaagaggtatgggaagagactgatggattggatcctaatgactttgaccccaagacatttttcaaattacatgatgtcaatagtgatggattcctggatgaacaagaattagaagccctatttactaaagagttggagaaagtatatgaccctaaaaatgaagaggatgatatggtagaaatggaagaagaaaggcttagaatgagggaacatgtaatgaatgaggttgatactaacaaagacagattggtgactctggaggagtttttgaaagccacagaaaaaaaagaattcttggagccagatagctgggagacattagatcagcaacagttcttcacagaggaagaactaaaagaatatgaaaatattattgctttacaagaaaatgaacttaagaagaaggcagatgagcttcagaaacaaaaagaagagctacaacgtcagcatgatcaactggaggctcagaagctggaatatcatcaggtcatacagcagatggaacaaaaaaaattacaacaaggaattcctccatcagggccagctggagaattgaagtttgagccacacatttaaagtctgaagtccaccagaacttggaagaaagctgttaactcaacatctatttcatctttttagctcccttcctttttctctgctcaataaatattttaaaagcatatttgaaataaagggagatactttttaaatgaaaacactttttttgggacacagatattaaaggattgaagtttatcagaaccaggaagaaaacaaactcactgtctgctctctgctctcacattcacacggctcttttatttatttttttgttctcctttaatgatttaattaagtggctttatgccataatttagtgaaactattaggaactatttaagtgagaaaactctgcctcttgcttttaaattagattgctctcacttactcgtaaacataggtattcttttatgggtgcttatcattccttctttcaataaatgtctgtttgatattaacaa

SEQ ID NO: 428137 - DNA, 1738 bp, Homo sapiens
ggggcagagcggagcggtgggccgggggctggaggacaggtttgtgcgctggacgcaagcaccaggcgcagcctcgctcgccgacacccggccagaacgtgttacgagtcagtttttagtgaaaaaacattgagctaggagccaagacccatctcttcactattttggtattgtgcaagtcatcttacctctctggatctcagttgtctcatctgtaaaaaggagataaaaattatttacctgcctgaacatgaggtggaggaccatcctgctacagtattgctttctcttgattacatgtttacttactgctcttgaagctgtgcctattgacatagacaagacaaaagtacaaaatattcaccctgtggaaagtgcgaagatagaaccaccagatactggactttattatgatgaatatctcaagcaagtgattgatgtgctggaaacagataaacacttcagagaaaagctccagaaagcagacatagaggaaataaagagtgggaggctaagcaaagaactggatttagtaagtcaccatgtgaggacaaaacttgatgaactgaaaaggcaagaagtaggaaggttaagaatgttaattaaagctaagttggattcccttcaagatataggcatggaccaccaagctcttctaaaacaatttgatcacctaaaccacctgaatcctgacaagtttgaatccacagatttagatatgctaatcaaagcggcaacaagtgatctggaacactatgacaagactcgtcatgaagaatttaaaaaatatgaaatgatgaaggaacatgaaaggagagaatatttaaaaacattgaatgaagaaaagagaaaagaagaagagtctaaatttgaagaaatgaagaaaaagcatgaaaatcaccctaaagttaatcacccaggaagcaaagatcaactaaaagaggtatgggaagagactgatggattggatcctaatgactttgaccccaagacatttttcaaattacatgatgtcaatagtgatggattcctggatgaacaagaattagaagccctatttactaaagagttggagaaagtatatgaccctaaaaatgaagaggatgatatggtagaaatggaagaagaaaggcttagaatgagggaacatgtaatgaatgaggttgatactaacaaagacagattggtgactctggaggagtttttgaaagccacagaaaaaaaagaattcttggagccagatagctgggagacattagatcagcaacagttcttcacagaggaagaactaaaagaatatgaaaatattattgctttacaagaaaatgaacttaagaagaaggcagatgagcttcagaaacaaaaagaagagctacaacgtcagcatgatcaactggaggctcagaagctggaatatcatcaggtcatacagcagatggaacaaaaaaaattacaacaaggaattcctccatcagggccagctggagaattgaagtttgagccacacatttaaagtctgaagtccaccagaacttggaagaaagctgttaactcaacatctatttcatctttttagctcccttcctttttctctgctcaataaatattttaaaagcatatttgaaataaagggagatactttttaagaaaatagacaatgatataagatttgatcaaccaccaagataaaagtaaagggaaggaacgaaggaactataattggtctttttggcctaaa

SEQ ID NO: 428138 - DNA, 1786 bp, Homo sapiens
ggggcagagcggagcggtgggccgggggctggaggacaggtttgtgcgctggacgcaagcaccaggcgcagcctcgctcgccgacacccggccaggtaaggccggtggccgcgcgaacgtgttacgagtcagtttttagtgaaaaaacattgagctaggagccaagacccatctcttcactattttggtattgtgcaagtcatcttacctctctggatctcagttgtctcatctgtaaaaaggagataaaaattatttacctgcctgaacatgaggtggaggaccatcctgctacagtattgctttctcttgattacatgtttacttactgctcttgaagctgtgcctattgacatagacaagacaaaagtacaaaatattcaccctgtggaaagtgcgaagatagaaccaccagatactggactttattatgatgaatatctcaagcaagtgattgatgtgctggaaacagataaacacttcagagaaaagctccagaaagcagacatagaggaaataaagagtgggaggctaagcaaagaactggatttagtaagtcaccatgtgaggacaaaacttgatgaactgaaaaggcaagaagtaggaaggttaagaatgttaattaaagctaagttggattcccttcaagatataggcatggaccaccaagctcttctaaaacaatttgatcacctaaaccacctgaatcctgacaagtttgaatccacagatttagatatgctaatcaaagcggcaacaagtgatctggaacactatgacaagactcgtcatgaagaatttaaaaaatatgaaatgatgaaggaacatgaaaggagagaatatttaaaaacattgaatgaagaaaagagaaaagaagaagagtctaaatttgaagaaatgaagaaaaagcatgaaaatcaccctaaagttaatcacccaggaagcaaagatcaactaaaagaggtatgggaagagactgatggattggatcctaatgactttgaccccaagacatttttcaaattacatgatgtcaatagtgatggattcctggatgaacaagaattagaagccctatttactaaagagttggagaaagtatatgaccctaaaaatgaagaggatgatatggtagaaatggaagaagaaaggcttagaatgagggaacatgtaatgaatgaggttgatactaacaaagacagattggtgactctggaggagtttttgaaagccacagaaaaaaaagaattcttggagccagatagctgggagacattagatcagcaacagttcttcacagaggaagaactaaaagaatatgaaaatattattgctttacaagaaaatgaacttaagaagaaggcagatgagcttcagaaacaaaaagaagagctacaacgtcagcatgatcaactggaggctcagaagctggaatatcatcaggtcatacagcagatggaacaaaaaaaattacaacaaggaattcctccatcagggccagctggagaattgaagtttgagccacacatttaaagtctgaagtccaccagaacttggaagaaagctgttaactcaacatctatttcatctttttagctcccttcctttttctctgctcaataaatatttaaaccaaaaaaaaaaaaaaaaaatttgggcgccggcccagaaagtctaaacatccttgggccggccaagagagaaagggcaagcggcccagaaccgggagaggggggctcccaaaaaggggggcgggggaaaccgggtgggctgccaacagccacag

SEQ ID NO: 428139 - DNA, 2144 bp, Homo sapiens
  misc_feature (2131)..(2131): n is a, c, g, or t
  misc_feature (2139)..(2139): n is a, c, g, or t
  misc_feature (2144)..(2144): n is a, c, g, or t
ggggcagagcggagcggtgggccgggggctggaggacaggtttgtgcgctggacgcaagcaccaggcgcagcctcgctcgccgacacccggccaggtaaggccggtggccgcgcgaacgtgttacgagtcagtttttagtgaaaaaacattgagctaggagccaagacccatctcttcactattttggtattgtgcaagtcatcttacctctctggatctcagttgtctcatctgtaaaaaggagataaaaattatttacctgcctgaacatgaggtggaggaccatcctgctacagtattgctttctcttgattacatgtttacttactgctcttgaagctgtgcctattgacatagacaagacaaaagtacaaaatattcaccctgtggaaagtgcgaagatagaaccaccagatactggactttattatgatgaatatctcaagcaagtgattgatgtgctggaaacagataaacacttcagagaaaagctccagaaagcagacatagaggaaataaagagtgggaggctaagcaaagaactggatttagtaagtcaccatgtgaggacaaaacttgatgaactgaaaaggcaagaagtaggaaggttaagaatgttaattaaagctaagttggattcccttcaagatataggcatggaccaccaagctcttctaaaacaatttgatcacctaaaccacctgaatcctgacaagtttgaatccacagatttagatatgctaatcaaagcggcaacaagtgatctggaacactatgacaagactcgtcatgaagaatttaaaaaatatgaaatgatgaaggaacatgaaaggagagaatatttaaaaacattgaatgaagaaaagagaaaagaagaagagtctaaatttgaagaaatgaagaaaaagcatgaaaatcaccctaaagttaatcacccaggaagcaaagatcaactaaaagaggtatgggaagagactgatggattggatcctaatgactttgaccccaagacatttttcaaattacatgatgtcaatagtgatggattcctggatgaacaagaattagaagccctatttactaaagagttggagaaagtatatgaccctaaaaatgaagaggatgatatggtagaaatggaagaagaaaggcttagaatgagggaacatgtaatgaatgaggttgatactaacaaagacagattggtgactctggaggagtttttgaaagccacagaaaaaaaagaattcttggagccagatagctgggagacattagatcagcaacagttcttcacagaggaagaactaaaagaatatgaaaatattattgctttacaagaaaatgaacttaagaagaaggcagatgagcttcagaaacaaaaagaagagctacaacgtcagcatgatcaactggaggctcagaagctggaatatcatcaggtcatacagcagatggaacaaaaaaaattacaacaaggaattcctccatcagggccagctggagaattgaagtttgagccacgtccagaggtgtccttctaaagctggtagaggtttcacgagtcatcagggacccagaacccttctcttttgctgtccctttgtcctagtgcatggtttccacactgtggtgcaagatgtctcctcaagctctaggcattacatctgctatcctgctgtcagaaagaaggaaggggaaaagaagatcatttccttctctttaaggacatttcccagaagtcacacagaacatttccatttatattactttggccagaacttggtcatatggccacatttagttccagaatgattaggaaatgcagtcttttattgatccctgtgcccaggaaaatattggaggcctttttcaaggaaaaaggggaaaacagatattggttgacaaatagcagtctctgccatactgtccctggatacatgtctttgagtgaatgtcccttatttaccattctgattacttgttggatattttcaatatgtgttacaatatggttccaaaattgtatgtgatattccaacagcaagttggatgcaatgtgtcataaaaatgacctcagtgtcaaccagcatttgaataccgatggtcctgcggggtaccgagctcganaacgtaancgggn

SEQ ID NO: 428140 - DNA, 1614 bp, Homo sapiens
aaggtaaaccatccaagcagtttttattcattaatattcataaatacacacagcagcttcattagagatttcaattttcctcttcagtttgaatgtggagtattaggagagccttttgcatgtcaaggtacaggaagcagagatagaggaaataaagagtgggaggctaagcaaagaactggatttagtaagtcaccatgtgaggacaaaacttgatgaactgaaaaggcaagaagtaggaaggttaagaatgttaattaaagctaagttggattcccttcaagatataggcatggaccaccaagctcttctaaaacaatttgatcacctaaaccacctgaatcctgacaagtttgaatccacagatttagatatgctaatcaaagcggcaacaagtgatctggaacactatgacaagactcgtcatgaagaatttaaaaaatatgaaatgatgaaggaacatgaaaggagagaatatttaaaaacattgaatgaagaaaagagaaaagaagaagagtctaaatttgaagaaatgaagaaaaagcatgaaaatcaccctaaagttaatcacccaggaagcaaagatcaactaaaagaggtatgggaagagactgatggattggatcctaatgactttgaccccaagacatttttcaaattacatgatgtcaatagtgatggattcctggatgaacaagaattagaagccctatttactaaagagttggagaaagtatatgaccctaaaaatgaagaggatgatatggtagaaatggaagaagaaaggcttagaatgagggaacatgtaatgaatgaggttgatactaacaaagacagattggtgactctggaggagtttttgaaagccacagaaaaaaaagaattcttggagccagatagctgggagacattagatcagcaacagttcttcacagaggaagaactaaaagaatatgaaaatattattgctttacaagaaaatgaacttaagaagaaggcagatgagcttcagaaacaaaaagaagagctacaacgtcagcatgatcaactggaggctcagaagctggaatatcatcaggtcatacagcagatggaacaaaaaaaattacaacaaggaattcctccatcagggccagctggagaattgaagtttgagccacacatttaaagtctgaagtccaccagaacttggaagaaagctgttaactcaacatctatttcatctttttagctcccttcctttttctctgctcaataaatattttaaaagcatatttgaaataaagggagatactttttaaatgaaaacactttttttgggacacagatattaaaggattgaagtttatcagaaccaggaagaaaacaaactcactgtctgctctctgctctcacattcacacggctcttttatttatttttttgttctcctttaatgatttaattaagtggctttatgccataatttagtgaaactattaggaactatttaagtgagaaaactctgcctcttgcttttaaattagattgctctcacttactcgtaaacataggtattcttttatgggtgcttatcattccttctttcaataaatgtctgtttgatattaacaa

SEQ ID NO: 428141 - DNA, 1889 bp, Homo sapiens
ggggcagagcggagcggtgggccgggggctggaggacaggtttgtgcgctggacgcaagcaccaggcgcagcctcgctcgccgacacccggccaggtaaggccggtggccgcgcgaacgtgttacgagtcagtttttagtgaaaaaacattgagctaggagccaagacccatctcttcactattttggtattgtgcaagtcatcttacctctctggatctcagttgtctcatctgtaaaaaggagataaaaattatttacctgcctgaacatgaggtggaggaccatcctgctacagtattgctttctcttgattacatgtttacttactgctcttgaagctgtgcctattgacatagacaagacaaaagtacaaaatattcaccctgtggaaagtgcgaagatagaaccaccagatactggactttattatgatgaatatctcaagcaagtgattgatgtgctggaaacagataaacacttcagagaaaagctccagaaagcagacatagaggaaataaagagtgggaggctaagcaaagaactggatttagtaagtcaccatgtgaggacaaaacttgatgaactgaaaaggcaagaagtaggaaggttaagaatgttaattaaagctaagttggattcccttcaagatataggcatggaccaccaagctcttctaaaacaatttgatcacctaaaccacctgaatcctgacaagtttgaatccacagatttagatatgctaatcaaagcggcaacaagtgatctggaacactatgacaagactcgtcatgaagaatttaaaaaatatgaaatgatgaaggaacatgaaaggagagaatatttaaaaacattgaatgaagaaaagagaaaagaagaagagtctaaatttgaagaaatgaagaaaaagcatgaaaatcaccctaaagttaatcacccaggaagcaaagatcaactaaaagaggtatgggaagagactgatggattggatcctaatgactttgaccccaagacatttttcaaattacatgatgtcaatagtgatggattcctggatgaacaagaattagaagccctatttactaaagagttggagaaagtatatgaccctaaaaatgaagaggatgatatggtagaaatggaagaagaaaggcttagaatgagggaacatgtaatgaatgagacattagatcagcaacagttcttcacagaggaagaactaaaagaatatgaaaatattattgctttacaagaaaatgaacttaagaagaaggcagatgagcttcagaaacaaaaagaagagctacaacgtcagcatgatcaactggaggctcagaagctggaatatcatcaggtcatacagcagatggaacaaaaaaaattacaacaaggaattcctccatcagggccagctggagaattgaagtttgagccacacatttaaagtctgaagtccaccagaacttggaagaaagctgttaactcaacatctatttcatctttttagctcccttcctttttctctgctcaataaatattttaaaagcatatttgaaataaagggagatactttttaaatgaaaacactttttttgggacacagatattaaaggattgaagtttatcagaaccaggaagaaaacaaactcactgtctgctctctgctctcacattcacacggctcttttatttatttttttgttctcctttaatgatttaattaagtggctttatgccataatttagtgaaactattaggaactatttaagtgagaaaactctgcctcttgcttttaaattagattgctctcacttactcgtaaacataggtattcttttatgggtgcttatcattccttctttcaataaatgtctgtttgatattaacaa

SEQ ID NO: 428142 - DNA, 1808 bp, Homo sapiens
ggggcagagcggagcggtgggccgggggctggaggacaggtttgtgcgctggacgcaagcaccaggcgcagcctcgctcgccgacacccggccaggtaaggccggtggccgcgcgaacgtgttacgagtcagtttttagtgaaaaaacattgagctaggagccaagacccatctcttcactattttggtattgtgcaagtcatcttacctctctggatctcagttgtctcatctgtaaaaaggagataaaaattatttacctgcctgaacatgaggtggaggaccatcctgctacagtattgctttctcttgattacatgtttacttactgctcttgaagctgtgcctattgacatagacaagacaaaagtacaaaatattcaccctgtggaaagtgcgaagatagaaccaccagatactggactttattatgatgaatatctcaagcaagtgattgatgtgctggaaacagataaacacttcagagaaaagctccagaaagcagacatagaggaaataaagagtgggaggctaagcaaagaactggatttagtaagtcaccatgtgaggacaaaacttgatgaactgaaaaggcaagaagtaggaaggttaagaatgttaattaaagctaagttggattcccttcaagatataggcatggaccaccaagctcttctaaaacaatttgatcacctaaaccacctgaatcctgacaagtttgaatccacagatttagatatgctaatcaaagcggcaacaagtgatctggaacactatgacaagactcgtcatgaagaatttaaaaaatatgaaatgatgaaggaacatgaaaggagagaatatttaaaaacattgaatgaagaaaagagaaaagaagaagagtctaaatttgaagaaatgaagaaaaagcatgaaaatcaccctaaagttaatcacccaggaagcaaagatcaactaaaagaggtatgggaagagactgatggattggatcctaatgactttgaccccaagacatttttcaaattacatgatgtcaatagtgatggattcctggatgaacaagaattagaagccctatttactaaagagttggagaaagtatatgaccctaaaaatgaagaggatgatatggtagaaatggaagaagaaaggcttagaatgagggaacatgtaatgaatgaggttgatactaacaaagacagattggtgactctggaggagtttttgaaagccacagaaaaaaaagaattcttggagccagatagctgggaggtcatacagcagatggaacaaaaaaaattacaacaaggaattcctccatcagggccagctggagaattgaagtttgagccacacatttaaagtctgaagtccaccagaacttggaagaaagctgttaactcaacatctatttcatctttttagctcccttcctttttctctgctcaataaatattttaaaagcatatttgaaataaagggagatactttttaaatgaaaacactttttttgggacacagatattaaaggattgaagtttatcagaaccaggaagaaaacaaactcactgtctgctctctgctctcacattcacacggctcttttatttatttttttgttctcctttaatgatttaattaagtggctttatgccataatttagtgaaactattaggaactatttaagtgagaaaactctgcctcttgcttttaaattagattgctctcacttactcgtaaacataggtattcttttatgggtgcttatcattccttctttcaataaatgtctgtttgatattaacaa

SEQ ID NO: 428143 - DNA, 1427 bp, Homo sapiens
ggggcagagcggagcggtgggccgggggctggaggacaggtttgtgcgctggacgcaagcaccaggcgcagcctcgctcgccgacacccggccaggtaaggccggtggccgcgcgaacgtgttacgagtcagtttttagtgaaaaaacattgagctaggagccaagacccatctcttcactattttggtattgtgcaagtcatcttacctctctggatctcagttgtctcatctgtaaaaaggagataaaaattatttacctgcctgaacatgaggtggaggaccatcctgctacagtattgctttctcttgattacatgtttacttactgctcttgaagctgtgcctattgacatagacaagacaaaagtacaaaatattcaccctgtggaaagtgcgaagatagaaccaccagatactggactttattatgatgaatatctcaagcaagtgattgatgtgctggaaacagataaacacttcagagaaaagctccagaaagcagacatagaggaaataaagagtgggaggctaagcaaagaactggatttagtaagtcaccatgtgaggacaaaacttgatgaactgaaaaggcaagaagtaggaaggttaagaatgttaattaaagctaagttggattcccttcaagatataggcatggaccaccaagctcttctaaaacaatttgatcacctaaaccacctgaatcctgacaagtttgaatccacagatttagatatgctaatcaaagcggcaacaagtgatctggaacactatgacaagactcgtcatgaagaatttaaaaaatatgaaatgatgaaggaacatgaaaggagagaatatttaaaaacattgaatgaagaaaagagaaaagaagaagagtctaaatttgaagaaatgaagaaaaagcatgaaaatcaccctaaagttaatcacccaggaagcaaagatcaactaaaagaggtatgggaagagactgatggattggatcctaatgactttgaccccaagacatttttcaaattacatgatgtcaatagtgatggattcctggatgaacaagaattagaagccctatttactaaagagttggacacaacgtatattgaacgcttaaaaattgacgacagatgatactgggtcagaacactggcagcaagcaaaaggttacgaaatgcgcgggacctgcgtatgaatcgacgggtggatactcaaccaaaggacaggaattgcgggaacccttggacggagacctttggaaaaggccccgagacacaaaagaagttcttggggccccaattgctggggaacactctagccgacagagagtgcttcctcaaagggaagaacctctacgacactttgacaatgtattgctgcgtatacgaaacaagagtacacaacaacaggcactggatgttctctaa

SEQ ID NO: 428144 - DNA, 3828 bp, Homo sapiens
ggactttgggactggacagacctggtcacagtctaggttctacatcttactggtcgagcaactttagagtcaacctatttgatttcttgacaagaccacaatctgatcccaaagatgtgctccacaaatccaggcaaatgggtcacctttgatgatgatcctgctgttcaatcttctcaaaagtcaaagaattttcctctggagaatcaaggtgtctgtagaccaaatggactgaagctgaaccctcctggcctcagggaatttcccagtggatcttcctccaccagcagcactcctctctcctcccccattgtagatttttatttcagtccaggacctccaagtaactctcctctttctacacctaccaaagacttcccaggttttcctggcatccccaaagcagggactcatgtgctttatcctattccagaatcatcttcagacagcccactcgcaatatcaggaggagaatcttccttactgcctaccagaccaacatgtttatcccatgccttgttacccagtgaccactcatgtacacatccaactcccaaagtaggtcttccagatgaagttaatcctcaacaggctgaaagcctaggattccaaagtgatgatctcccccagtttcagtattttcgagaggactgtgctttttcaagtccatttcggaaagatgaaggcagtgattcccatttcacccttgacccaccaggaagcaaaaagatgttctcatcaagaaacaaggagatgcctattgaccaaaaaagcctaaataagtgttcactcaactatatctgtgagaagcttgaacatctccagtcagctgagaaccaagactcacttagaagtttgtctatgcactgtctatgtgctgaagaaaatgcctcttcctttgtcccccacacactcttcaggagtcagccaaaatccggatggtctttcatgctgagaattcctgagaagaagaatatgatgtcttcccggcaatggggaccaatttttctgaaagttttgcctggaggaattttgcagatgtattatgaacagggattagaaaaaccatttaaagagatacagcttgatccatattgtaggctttctgaacccaaggttgagaacttcagtgtagcaggaaaaatccacactgtgaagattgaacatgtgtcttacacagaaaaaaggaaataccattctaagacagaagtagttcatgaacctgacatagagcagatgctgaagttggggtccacatcgtaccatgacttccttgactttctgactactgtggaggaggagctgatgaagttgccagctgtttcaaaaccaaaaaagaactacgaggagcaagaaatttccttggaaattgtggacaacttttggggtaaagtcacaaaagaaggaaaatttgttgaaagtgctgtgataactcaaatttattgcctctgctttgtgaatgggaacctggaatgctttttaaccttgaatgaccttgagttgccgaagcgagatgaatcctattatgagaaggactcagaaaaaaaggggattgatattcttgactaccattttcataagtgtgtgaatgtacaagaatttgagcaatcaagaatcattaagtttgtacctctggatgcctgccggtttgagctgatgcgtttcaagactttgtataatggggataatcttcccttttccttgaagtctgtagtggttgtccagggagcatacgtggaacttcaggcttttgtcaacatggcctcattggcgcagaggtcatcctatgctggttccttaaggtcctgtgacaatataaggatacactttcctgtcccatcgcagtggatcaaggccctttggaccatgaacctccagaggcagaagtctctgaaagctaaaatgaaccgccgagcatgtctggggagtttacaggaacttgaatctgaacctgtcattcaagtcactgtggggtcagcaaaatatgagagtgcctaccaggcagtggtatggaagatagatcggcttccagacaaaaattcaagtctagatcatccccattgtctgtcatacaaattagagcttggatcagaccaagaaattccctctgattggtatccatttgctactgttcagttttccgtgcctgacacctgtgcctcaaggacagaggtcaggtctctgggagtggagagtgatgtccagccacagaaacatgttcagcagcgagcttgctacaacatccagcctaaactctacagatctgtaattgaagatgtaattgaaggagttcggaatctatttgctgaagaaggtatagaggaacaagttttaaaagacttgaagcagctctgggaaaccaaggttttgcagtctaaagcaacagaagacttcttcagaaatagcatccaatcacctctgtttactcttcagttgccgcacagcttgcaccaaacattgcaatcgtcaacagcatcattagttattcctgctggtagaactcttccaagttttaccacagcagaactgggcacttcaaactccagtgcaaactttacttttcctggttatcccattcatgtaccagcaggtgtgacactacagactgtatctggtcacctttataaagtcaatgtaccaattatggtgacagagacttctggaagagcaggtattcttcagcatccaattcagcaagtatttcaacagcttggccagccttcagtaatacaaactagtgttccacaattgaatccatggtctcttcaagcaactactgaaaaatcacagagaattgaaaccgtgctacagcaacccgcaattctaccttctgggccagtagataggaaacacttagaaaatgccaccagtgatatacttgtatctcctggaaatgagcataaaatcgtgcctgaagctttgttgtgtcatcaggaaagttctcactatatcagtcttccaggtgttgtattttctccacaggtctctcaaacaaattctgatgtggagtcagtgctcagtggttcagctagcatggctcaaaatctgcatgatgagtccctctccacaagccctcatggggctctccaccagcacgtgactgatattcagcttcatattcttaaaaataggatgtatggatgtgattctgtaaagcaaccaagaaatatagaggaacccagcaacatacctgtatcagagaaggattctaattctcaggtggatttaagcattcgggttactgatgatgatattggtgaaataattcaagtagatggaagcggtgatacatcttccaatgaagaaataggaagtacaagagatgcagatgagaatgaatttctagggaatattgacgggggagatctgaaggtacctgaagaagaagctgacagtatttcaaatgaggattcagccacaaacagtagtgataatgaagaccctcaagtaaacattgtagaagaggaccctttaaattctggagatgatgttagtgaacaggatgtgccagacctgtttgacacggataatgtaattgtctgtcagtatgataagattcatcgaagcaagaacaaatggaaattctatttgaaagatggtgttatgtgttttggagggagagactatgtatttgcaaaagccattggtgatgcagagtggtaaaccttgtgagctcagtacatctattttgtgaacatcagttggactatattgcatattgtgaattcatttttattttgaatatagtccagcacagagctgttcaaatttttagttcactgtatggaatttaataaaattataattcagatgcagatacaattacac

SEQ ID NO: 428145 - DNA, 1673 bp, Homo sapiens
tgcccagtgtttccctccgagggcactgcgtgccgcgcaggcgcaaagggccaggtgctggaggtgctgtcatggcctgcctcaacccggtgcctaaactctacagatctgtaattgaagatgtaattgaaggagttcggaatctatttgctgaagaaggtatagaggaacaagttttaaaagacttgaagcagctctgggaaaccaaggttttgcagtctaaagcaacagaagacttcttcagaaatagcatccaatcacctctgtttactcttcagttgccgcacagcttgcaccaaacattgcaatcgtcaacagcatcattagttattcctgctggtagaactcttccaagttttaccacagcagaactgggcacttcaaactccagtgcaaactttacttttcctggttatcccattcatgtaccagcaggtgtgacactacagactgtatctggtcacctttataaagtcaatgtaccaattatggtgacagagacttctggaagagcaggtattcttcagcatccaattcagcaagtatttcaacagcttggccagccttcagtaatacaaactagtgttccacaattgaatccatggtctcttcaagcaactactgaaaaatcacagagaattgaaaccgtgctacagcaacccgcaattctaccttctgggccagtagataggaaacacttagaaaatgccaccagtgatatacttgtatctcctggaaatgagcataaaatcgtgcctgaagctttgttgtgtcatcaggaaagttctcactatatcagtcttccaggtgttgtattttctccacaggtctctcaaacaaattctgatgtggagtcagtgctcagtggttcagctagcatggctcaaaatctgcatgatgagtccctctccacaagccctcatggggctctccaccagcacgtgactgatattcagcttcatattcttaaaaataggatgtatggatgtgattctgtaaagcaaccaagaaatatagaggaacccagcaacatacctgtatcagagaaggattctaattctcaggtggatttaagcattcgggttactgatgatgatattggtgaaataattcaagtagatggaagcggtgatacatcttccaatgaagaaataggaagtacaagagatgcagatgagaatgaatttctagggaatattgacgggggagatctgaaggtacctgaagaagaagctgacagtatttcaaatgaggattcagccacaaacagtagtgataatgaagaccctcaagtaaacattgtagaagaggaccctttaaattctggagatgatgttagtgaacaggatgtgccagacctgtttgacacggataatgtaattgtctgtcagtatgataagattcatcgaagcaagaacaaatggaaattctatttgaaagatggtgttatgtgttttggagggagagactatgtatttgcaaaagccattggtgatgcagagtggtaaaccttgtgagctcagtacatctattttgtgaacatcagttggactatattgcatattgtgaattcatttttattttgaatatagtccagcacagagctgttcaaatttttagttcactgtatggaatttaataaaattataattcagatgcagatacaattacac

SEQ ID NO: 428146 - DNA, 5530 bp, Homo sapiens
ggactttgggactggacagacctggtcacagtctaggttctacatcttactggtcgagcaactttagagtcaacctatttgatttcttgacaagaccacaatctgatcccaaagatgtgctccacaaatccaggcaaatgggtcacctttgatgatgatcctgctgttcaatcttctcaaaagtcaaagaattttcctctggagaatcaaggtgtctgtagaccaaatggactgaagctgaaccctcctggcctcagggaatttcccagtggatcttcctccaccagcagcactcctctctcctcccccattgtagatttttatttcagtccaggacctccaagtaactctcctctttctacacctaccaaagacttcccaggttttcctggcatccccaaagcagggactcatgtgctttatcctattccagaatcatcttcagacagcccactcgcaatatcaggaggagaatcttccttactgcctaccagaccaacatgtttatcccatgccttgttacccagtgaccactcatgtacacatccaactcccaaagtaggtcttccagatgaagttaatcctcaacaggctgaaagcctaggattccaaagtgatgatctcccccagtttcagtattttcgagaggactgtgctttttcaagtccatttcggaaagatgaaggcagtgattcccatttcacccttgacccaccaggaagcaaaaagatgttctcatcaagaaacaaggagatgcctattgaccaaaaaagcctaaataagtgttcactcaactatatctgtgagaagcttgaacatctccagtcagctgagaaccaagactcacttagaagtttgtctatgcactgtctatgtgctgaagaaaatgcctcttcctttgtcccccacacactcttcaggagtcagccaaaatccggatggtctttcatgctgagaattcctgagaagaagaatatgatgtcttcccggcaatggggaccaatttttctgaaagttttgcctggaggaattttgcagatgtattatgaacagggattagaaaaaccatttaaagagatacagcttgatccatattgtaggctttctgaacccaaggttgagaacttcagtgtagcaggaaaaatccacactgtgaagattgaacatgtgtcttacacagaaaaaaggaaataccattctaagacagaagtagttcatgaacctgacatagagcagatgctgaagttggggtccacatcgtaccatgacttccttgactttctgactactgtggaggaggagctgatgaagttgccagctgtttcaaaaccaaaaaagaactacgaggagcaagaaatttccttggaaattgtggacaacttttggggtaaagtcacaaaagaaggaaaatttgttgaaagtgctgtgataactcaaatttattgcctctgctttgtgaatgggaacctggaatgctttttaaccttgaatgaccttgagttgccgaagcgagatgaatcctattatgagaaggactcagaaaaaaaggggattgatattcttgactaccattttcataagtgtgtgaatgtacaagaatttgagcaatcaagaatcattaagtttgtacctctggatgcctgccggtttgagctgatgcgtttcaagactttgtataatggggataatcttcccttttccttgaagtctgtagtggttgtccagggagcatacgtggaacttcaggcttttgtcaacatggcctcattggcgcagaggtcatcctatgctggttccttaaggtcctgtgacaatataaggatacactttcctgtcccatcgcagtggatcaaggccctttggaccatgaacctccagaggcagaagtctctgaaagctaaaatgaaccgccgagcatgtctggggagtttacaggaacttgaatctgaacctgtcattcaagtcactgtggggtcagcaaaatatgagagtgcctaccaggcagtggtatggaagatagatcggcttccagacaaaaattcaagtctagatcatccccattgtctgtcatacaaattagagcttggatcagaccaagaaattccctctgattggtatccatttgctactgttcagttttccgtgcctgacacctgtgcctcaaggacagaggtcaggtctctgggagtggagagtgatgtccagccacagaaacatgttcagcagcgagcttgctacaacatccaggttgaaatagaaaaaaagtggattaaaatcgatggagaagacccagataaaattggtgactgcataactcagtaggagtagcaagagtttatgatgacagcccacttgtcaaatatgtaattcaccgaaaccacaccaagtcctgctactgtagagtggaaatgacttctgaatagcggttttaggacaggtctgatggctgtgtttagagaagtttagacctaaaaccgaacaatctgtattttttgcttttcatgtgtttttgtcctaggggttcgatctaaaatgtttctataattcgtgtgatgttttgcttcctattgaaactcaaaggcactgttactcgttgtgtgaccccgcagccagtatgatttttgattactcagtggctgactgttttgctctctggattactgaggtgccgtcttcatttcttcccatctcttcttgctgcttagtgtctgtactagagggtaagggaatcaaaggagacataaaccaaaatagttaattttccctctttcttgcctctgaaatgtggctaggtgtagaatgatgttgaaaccacaggctaaaatgtagatctggaagtatctgtgcttttgaattacttatttacctgtcctcttaccgttggtaaataataattggctatatttggtacctgtctctctcctactgtattgtcattttcaaaatgtgtttgttttctggcgcgtgctgcaaagaagctatttctgttgtcctacatattttagtataaatcactaagacatatttcctttcacttggcaggattcctttcaaaatggaatctgagtattagacactagttaacatatttgtgtatattaaatatgaatttttaaaatttataaatactattttccaaaagtacagactctaaggacatattttgataaagtattatttgtaatgaacacaagcctctcttgagtagaagtctaaatcacattatgattattttatactagttctgctatcatgctgttttatgctaattctgcttattttagagtatttttcattaaaaggtgagcaaagtgaaagatacttggtattttacccagatttctaagtggcaacatttttattcttcagagtcaggtaaatgactataatagtttggtttctaatgaaaagtcaatagcattagcagttataattctgtttataatttcctttcagcatttacagtgaaaagtgagaattttaaaatttatgaaatctatattccaggtattgtttttagtctgaaaaacaaactcccccatgtggtattaatataccttcaatttatgttgagtcttaaacataattaggagatatttttctctatttgctagatttgttttgagtcaaaactgatttagtgttcttccaaacaacatttatgtgttggcctacagagtttatttcatgtgttttttttaatatttaatattatattacattcattgaaatctgttcaaaaacagattaagacaaacatttatgatggtctgtatcaatcagcagattttattgcttttcattattttactgtaaaggcaaagaatgcaataggtgatggttggttgaaaggaattgttattgctgtttttattttttactttttttgagacagagtctcactctgttgcccagcctggagtgcagtgtgtcatcttggctcactgcaacctccgcctcctgggttcaagggattctcctgcctcagcctccaactagctgggattacaggcacaagccaccatgcctggctaaaattcttttgtatttttactacagacggagtttccccatgttggccgggctagtctcgaactcctgacctcaggtgatccaccagcctcggcctcccaaagttctgggattaaatgcgtgagccaccatgcccggccgctattgctctttttaacttcatttgatgccttgcttataatatcatatgcttgaggctcactgttgatgtagagtagggcaaatctgtgtgtgtatgtcattaaaaaaattctaccatctttctttatcatctggtgtgggcgcactctacagtgacttcagtctgctcagaacgaatgtggaggccggccgaaactgatgctgcccacagtcccagtgaagttaggtgggttaattactgccattcctttctaagtgtgttttatggcatcctgcccacaaagaactcacagtctgattaggatgaacttaatgactatttacacctcaaaatatattcagcaaagggttcacttagttgcccctcatgcttcacaggttgactagtatctgtgggtacctccctgcccaggttattcactcacaagccaccgggccttcaggacatctcaagattcagtcttgacaatataatagcaaaagctggactaaagcccaaatggattgtctgtggcaatgcagaagctgatagcattaacagcagggtgttacagcataattgttaattcgcacatctattaggatccttaaatattcattacttaatgttaaattaacattctgtgtagggaggggaggcttattcaattcttctgacctcagaactggcagaaggtcagatgtgactacagaactctaggtgaaaaatcaggtagggttcaaattaagtagaactgcccttgccggaatagtgatcttcaaaaaacccttgcttttaggggagggaagcggggaaggaaaggaatgagggaggaaatattcctttctagcattcattttgcttagatcactccattgtgagtttgaccattttggagtcaaatgagcagacttccaaggagttgaccagtttgtgactagtctggtcacctttccagttacaggatcatattaactgtgtaaatgaattcatgggtagatgatttgtgcagatctgaatttaagaacatttcctttttctgtgggaatcacaagagtttatccactaaaaaaagatatgtaaaaaagatactttccagcacataaataaaggctggaattttacaacctgatgtatatattagacagttctaggatgttagttcccttcattccagagctatgcttgtgatacagccccttttcttataaagtcagttagaaggacttccttaacaatgactattataatgtcttacttaaaatacagttttgtattctgtcaatgcaaatataagacaggttgagccttaatcatgtaacaaaatattttgtagattacatattgatttttcaaaaattaaaaatgtatttcaaa

SEQ ID NO: 428147 - DNA, 5926 bp, Homo sapiens
ggactttgggactggacagacctggtcacagtctaggttctacatcttactggtcgagcaactttagagtcaacctatttgatttcttgacaagaccacaatctgatcccaaagatgtgctccacaaatccaggcaaatgggtcacctttgatgatgatcctgctgttcaatcttctcaaaagtcaaagaattttcctctggagaatcaaggtgtctgtagaccaaatggactgaagctgaaccctcctggcctcagggaatttcccagtggatcttcctccaccagcagcactcctctctcctcccccattgtagatttttatttcagtccaggacctccaagtaactctcctctttctacacctaccaaagacttcccaggttttcctggcatccccaaagcagggactcatgtgctttatcctattccagaatcatcttcagacagcccactcgcaatatcaggaggagaatcttccttactgcctaccagaccaacatgtttatcccatgccttgttacccagtgaccactcatgtacacatccaactcccaaagtaggtcttccagatgaagttaatcctcaacaggctgaaagcctaggattccaaagtgatgatctcccccagtttcagtattttcgagaggactgtgctttttcaagtccatttcggaaagatgaaggcagtgattcccatttcacccttgacccaccaggaagcaaaaagatgttctcatcaagaaacaaggagatgcctattgaccaaaaaagcctaaataagtgttcactcaactatatctgtgagaagcttgaacatctccagtcagctgagaaccaagactcacttagaagtttgtctatgcactgtctatgtgctgaagaaaatgcctcttcctttgtcccccacacactcttcaggagtcagccaaaatccggatggtctttcatgctgagaattcctgagaagaagaatatgatgtcttcccggcaatggggaccaatttttctgaaagttttgcctggaggaattttgcagatgtattatgaacagggattagaaaaaccatttaaagagatacagcttgatccatattgtaggctttctgaacccaaggttgagaacttcagtgtagcaggaaaaatccacactgtgaagattgaacatgtgtcttacacagaaaaaaggaaataccattctaagacagaagtagttcatgaacctgacatagagcagatgctgaagttggggtccacatcgtaccatgacttccttgactttctgactactgtggaggaggagctgatgaagttgccagctgtttcaaaaccaaaaaagaactacgaggagcaagaaatttccttggaaattgtggacaacttttggggtaaagtcacaaaagaaggaaaatttgttgaaagtgctgtgataactcaaatttattgcctctgctttgtgaatgggaacctggaatgctttttaaccttgaatgaccttgagttgccgaagcgagatgaatcctattatgagaaggactcagaaaaaaaggggattgatattcttgactaccattttcataagtgtgtgaatgtacaagaatttgagcaatcaagaatcattaagtttgtacctctggatgcctgccggtttgagctgatgcgtttcaagactttgtataatggggataatcttcccttttccttgaagtctgtagtggttgtccagggagcatacgtggaacttcaggcttttgtcaacatggcctcattggcgcagaggtcatcctatgctggttccttaaggtcctgtgacaatataaggatacactttcctgtcccatcgcagtggatcaaggccctttggaccatgaacctccagaggcagaagtctctgaaagctaaaatgaaccgccgagcatgtctggggagtttacaggaacttgaatctgaacctgtcattcaagtcactgtggggtcagcaaaatatgagagtgcctaccaggcagtggtatggaagatagatcggcttccagacaaaaattcaagtctagatcatccccattgtctgtcatacaaattagagcttggatcagaccaagaaattccctctgattggtatccatttgctactgttcagttttccgtgcctgacacctgtgcctcaaggacagaggtcaggtctctgggagtggagagtgatgtccagccacagaaacatgttcagcagcgagcttgctacaacatccaggttgaaatagaaaaaaagtggattaaaatcgatggagaagacccagataaaattggtgactgcataactcagtaggagtagcaagagtttatgatgacagcccacttgtcaaatatgtaattcaccgaaaccacaccaagtcctgctactgtagagtggaaatgacttctgaatagcggttttaggacaggtctgatggctgtgtttagagaagtttagacctaaaaccgaacaatctgtattttttgcttttcatgtgtttttgtcctaggggttcgatctaaaatgtttctataattcgtgtgatgttttgcttcctattgaaactcaaaggcactgttactcgttgtgtgaccccgcagccagtatgatttttgattactcagtggctgactgttttgctctctggattactgaggtgccgtcttcatttcttcccatctcttcttgctgcttagtgtctgtactagagggtaagggaatcaaaggagacataaaccaaaatagttaattttccctctttcttgcctctgaaatgtggctaggtgtagaatgatgttgaaaccacaggctaaaatgtagatctggaagtatctgtgcttttgaattacttatttacctgtcctcttaccgttggtaaataataattggctatatttggtacctgtctctctcctactgtattgtcattttcaaaatgtgtttgttttctggcgcgtgctgcaaagaagctatttctgttgtcctacatattttagtataaatcactaagacatatttcctttcacttggcaggattcctttcaaaatggaatctgagtattagacactagttaacatatttgtgtatattaaatatgaatttttaaaatttataaatactattttccaaaagtacagactctaaggacatattttgataaagtattatttgtaatgaacacaagcctctcttgagtagaagtctaaatcacattatgattattttatactagttctgctatcatgctgttttatgctaattctgcttattttagagtatttttcattaaaaggtgagcaaagtgaaagatacttggtattttacccagatttctaagtggcaacatttttattcttcagagtcaggtaaatgactataatagtttggtttctaatgaaaagtcaatagcattagcagttataattctgtttataatttcctttcagcatttacagtgaaaagtgagaattttaaaatttatgaaatctatattccaggtattgtttttagtctgaaaaacaaactcccccatgtggtattaatataccttcaatttatgttgagtcttaaacataattaggagatatttttctctatttgctagatttgttttgagtcaaaactgatttagtgttcttccaaacaacatttatgtgttggcctacagagtttatttcatgtgttttttttaatatttaatattatattacattcattgaaatctgttcaaaaacagattaagacaaacatttatgatggtctgtatcaatcagcagattttattgcttttcattattttactgtaaaggcaaagaatgcaataggtgatggttggttgaaaggaattgttattgctgtttttattttttactttttttgagacagagtctcactctgttgcccagcctggagtgcagtgtgtcatcttggctcactgcaacctccgcctcctgggttcaagggattctcctgcctcagcctccaactagctgggattacaggcacaagccaccatgcctggctaaaattcttttgtatttttactacagacggagtttccccatgttggccgggctagtctcgaactcctgacctcaggtgatccaccagcctcggcctcccaaagttctgggattaaatgcgtgagccaccatgcccggccgctattgctctttttaacttcatttgatgccttgcttataatatcatatgcttgaggctcactgttgatgtagagtagggcaaatctgtgtgtgtatgtcattaaaaaaattctaccatctttctttatcatctggtgtgggcgcactctacagtgacttcagtctgctcagaacgaatgtggaggccggccgaaactgatgctgcccacagtcccagtgaagttaggtgggttaattactgccattcctttctaagtgtgttttatggcatcctgcccacaaagaactcacagtctgattaggatgaacttaatgactatttacacctcaaaatatattcagcaaagggttcacttagttgcccctcatgcttcacaggttgactagtatctgtgggtacctccctgcccaggttattcactcacaagccaccgggccttcaggacatctcaagattcagtcttgacaatataatagcaaaagctggactaaagcccaaatggattgtctgtggcaatgcagaagctgatagcattaacagcagggtgttacagcataattgttaattcgcacatctattaggatccttaaatattcattacttaatgttaaattaacattctgtgtagggaggggaggcttattcaattcttctgacctcagaactggcagaaggtcagatgtgactacagaactctaggtgaaaaatcaggtagggttcaaattaagtagaactgcccttgccggaatagtgatcttcaaaaaacccttgcttttaggggagggaagcggggaaggaaaggaatgagggaggaaatattcctttctagcattcattttgcttagatcactccattgtgagtttgaccattttggagtcaaatgagcagacttccaaggagttgaccagtttgtgactagtctggtcacctttccagttacaggatcatattaactgtgtaaatgaattcatgggtagatgatttgtgcagatctgaatttaagaacatttcctttttctgtgggaatcacaagagtttatccactaaaaaaagatatgtaaaaaagatactttccagcacataaataaaggctggaattttacaacctgatgtatatattagacagttctaggatgttagttcccttcattccagagctatgcttgtgatacagccccttttcttataaagtcagttagaaggacttccttaacaatgactattataatgtcttacttaaaatacagttttgtattctgtcaatgcaaatataagacaggttgagccttaatcatgtaacaaaatattttgtagattacatattgatttttcaaaaattaaaaatgtatttcaaagtattcttactgtgctgtgaatttatatcttcttctgcaagacctggggctatttttttttcttaaggtatgaaatcaatttcaataaccttaaacaattgaccctctgtcaggcatatgtcaggctccactcttaaggagtcagtgaccatgacctctttgcatatcctggaaaaatgacatcatcaaagtatagttgataatgttataaaggatgattttaaaaatagggtataatcatgactcacaaagatatgaggctgggtgtggtggctcacgcctgtaatcccagctctttgggaggccgaagcgggtggatcatgaggtcagaagatcaagaccatactggctagcacggtggagccccgtctctactaaaaatacaaaaaaaaaaaa

SEQ ID NO: 428148 - DNA, 4500 bp, Homo sapiens
ggactttgggactggacagacctggtcacagtctaggttctacatcttactggtcgagcaactttagagtcaacctatttgatttcttgacaagaccacaatctgatcccaaagatgtgctccacaaatccaggcaaatgggtcacctttgatgatgatcctgctgttcaatcttctcaaaagtcaaagaattttcctctggagaatcaaggtgtctgtagaccaaatggactgaagctgaaccctcctggcctcagggaatttcccagtggatcttcctccaccagcagcactcctctctcctcccccattgtagatttttatttcagtccaggacctccaagtaactctcctctttctacacctaccaaagacttcccaggttttcctggcatccccaaagcagggactcatgtgctttatcctattccagaatcatcttcagacagcccactcgcaatatcaggaggagaatcttccttactgcctaccagaccaacatgtttatcccatgccttgttacccagtgaccactcatgtacacatccaactcccaaagtaggtcttccagatgaagttaatcctcaacaggctgaaagcctaggattccaaagtgatgatctcccccagtttcagtattttcgagaggactgtgctttttcaagtccatttcggaaagatgaaggcagtgattcccatttcacccttgacccaccaggaagcaaaaagatgttctcatcaagaaacaaggagatgcctattgaccaaaaaagcctaaataagtgttcactcaactatatctgtgagaagcttgaacatctccagtcagctgagaaccaagactcacttagaagtttgtctatgcactgtctatgtgctgaagaaaatgcctcttcctttgtcccccacacactcttcaggagtcagccaaaatccggatggtctttcatgctgagaattcctgagaagaagaatatgatgtcttcccggcaatggggaccaatttttctgaaagttttgcctggaggaattttgcagatgtattatgaacagggattagaaaaaccatttaaagagatacagcttgatccatattgtaggctttctgaacccaaggttgagaacttcagtgtagcaggaaaaatccacactgtgaagattgaacatgtgtcttacacagaaaaaaggaaataccattctaagacagaagtagttcatgaacctgacatagagcagatgctgaagttggggtccacatcgtaccatgacttccttgactttctgactactgtggaggaggagctgatgaagttgccagctgtttcaaaaccaaaaaagaactacgaggagcaagaaatttccttggaaattgtggacaacttttggggtaaagtcacaaaagaaggaaaatttgttgaaagtgctgtgataactcaaatttattgcctctgctttgtgaatgggaacctggaatgctttttaaccttgaatgaccttgagttgccgaagcgagatgaatcctattatgagaaggactcagaaaaaaaggggattgatattcttgactaccattttcataagtgtgtgaatgtacaagaatttgagcaatcaagaatcattaagtttgtacctctggatgcctgccggtttgagctgatgcgtttcaagactttgtataatggggataatcttcccttttccttgaagtctgtagtggttgtccagggagcatacgtggaacttcaggcttttgtcaacatggcctcattggcgcagaggtcatcctatgctggttccttaaggtcctgtgacaatataaggatacactttcctgtcccatcgcagtggatcaaggccctttggaccatgaacctccagaggcagaagtctctgaaagctaaaatgaaccgccgagcatgtctggggagtttacaggaacttgaatctgaacctgtcattcaagtcactgtggggtcagcaaaatatgagagtgcctaccaggcagtggtatggaagatagatcggcttccagacaaaaattcaagtctagatcatccccattgtctgtcatacaaattagagcttggatcagaccaagaaattccctctgattggtatccatttgctactgttcagttttccgtgcctgacacctgtgcctcaaggacagaggtcaggtctctgggagtggagagtgatgtccagccacagaaacatgttcagcagcgagcttgctacaacatccaggttgaaatagaaaaaaagtggattaaaatcgatggagaagacccagataaaattggtgactgcataactcagtaggagtagcaagagtttatgatgacagcccacttgtcaaatatgtaattcaccgaaaccacaccaagtcctgctactgtagagtggaaatgacttctgaatagcggttttaggacaggtctgatggctgtgtttagagaagtttagacctaaaaccgaacaatctgtattttttgcttttcatgtgtttttgtcctaggggttcgatctaaaatgtttctataattcgtgtgatgttttgcttcctattgaaactcaaaggcactgttactcgttgtgtgaccccgcagccagtatgatttttgattactcagtggctgactgttttgctctctggattactgaggtgccgtcttcatttcttcccatctcttcttgctgcttagtgtctgtactagagggtaagggaatcaaaggagacataaaccaaaatagttaattttccctctttcttgcctctgaaatgtggctaggtgtagaatgatgttgaaaccacaggctaaaatgtagatctggaagtatctgtgcttttgaattacttatttacctgtcctcttaccgttggtaaataataattggctatatttggtacctgtctctctcctactgtattgtcattttcaaaatgtgtttgttttctggcgcgtgctgcaaagaagctatttctgttgtcctacatattttagtataaatcactaagacatatttcctttcacttggcaggattcctttcaaaatggaatctgagtattagacactagttaacatatttgtgtatattaaatatgaatttttaaaatttataaatactattttccaaaagtacagactctaaggacatattttgataaagtattatttgtaatgaacacaagcctctcttgagtagaagtctaaatcacattatgattattttatactagttctgctatcatgctgttttatgctaattctgcttattttagagtatttttcattaaaaggtgagcaaagtgaaagatacttggtattttacccagatttctaagtggcaacatttttattcttcagagtcaggtaaatgactataatagtttggtttctaatgaaaagtcaatagcattagcagttataattctgtttataatttcctttcagcatttacagtgaaaagtgagaattttaaaatttatgaaatctatattccaggtattgtttttagtctgaaaaacaaactcccccatgtggtattaatataccttcaatttatgttgagtcttaaacataattaggagatatttttctctatttgctagatttgttttgagtcaaaactgatttagtgttcttccaaacaacatttatgtgttggcctacagagtttatttcatgtgttttttttaatatttaatattatattacattcattgaaatctgttcaaaaacagattaagacaaacatttatgatggtctgtatcaatcagcagattttattgcttttcattattttactgtaaaggcaaagaatgcaataggtgatggttggttgaaaggaattgttattgctgtttttattttttactttttttgagacagagtctcactctgttgcccagcctggagtgcagtgtgtcatcttggctcactgcaacctccgcctcctgggttcaagggattctcctgcctcagcctccaactagctgggattacaggcacaagccaccatgcctggctaaaattcttttgtatttttactacagacggagtttccccatgttggccgggctagtctcgaactcctgacctcaggtgatccaccagcctcggcctcccaaagttctgggattaaatgcgtgagccaccatgcccggccgctattgctctttttaacttcatttgatgccttgcttataatatcatatgcttgaggctcactgttgatgtagagtagggcaaatctgtgtgtgtatgtcattaaaaaaattctaccatctttctttatcatctggtgtgggcgcactctacagtgacttcagtctgctcagaacgaatgtggaggccggccgaaactgatgctgcccacagtcccagtgaagttaggtgggttaattactgccattaaaggagctgtggcatgaacatggctcacagcaacctccacctccagggttcaagtgattttcctgccattaaaggagctg

SEQ ID NO: 428149 - DNA, 1661 bp, Homo sapiens
tgcccagtgtttccctccgagggcactgcgtgccgcgcaggcgcaaagggccaggtgctggaggtgctgtcatggcctgcctcaacccggtgcctaaactctacagatctgtaattgaagatgtaattgaaggagttcggaatctatttgctgaagaaggtatagaggaacaagttttaaaagacttgaagcagctctgggaaaccaaggttttgcagtctaaagcaacagaagacttcttcagaaatagcatccaatcacctctgtttactcttcagttgccgcacagcttgcaccaaacattgcaatcgtcaacagcatcattagttattcctgctggtagaactcttccaagttttaccacagcagaactgggcacttcaaactccagtgcaaactttacttttcctggttatcccattcatgtaccagcaggtgtgacactacagactgtatctggtcacctttataaagtcaatgtaccaattatggtgacagagacttctggaagagcaggtattcttcagcatccaattcagcaagtatttcaacagcttggccagccttcagtaatacaaactagtgttccacaattgaatccatggtctcttcaagcaactactgaaaaatcacagagaattgaaaccgtgctacagcaacccgcaattctaccttctgggccagtagataggaaacacttagaaaatgccaccagtgatatacttgtatctcctggaaatgagcataaaatcgtgcctgaagctttgttgtgtcatcaggaaagttctcactatatcagtcttccaggtgttgtattttctccacaggtctctcaaacaaattctgatgtggagtcagtgctcagtggttcagctagcatggctcaaaatctgcatgatgagtccctctccacaagccctcatggggctctccaccagcacgtgactgatattcagcttcatattcttaaaaataggatgtatggatgtgattctgtaaagcaaccaagaaatatagaggaacccagcaacatacctgtatcagagaaggattctaattctcaggtggatttaagcattcgggttactgatgatgatattggtgaaataattcaagtagatggaagcggtgatacatcttccaatgaagaaataggaagtacaagagatgcagatgagaatgaatttctagggaatattgacgggggagatctgaaggtacctgaagaagaagctgacagtatttcaaatgaggattcagccacaaacagtagtgataatgaagaccctcaagtaaacattgtagaagaggaccctttaaattctggagatgatgttagtgaacaggatgtgccagacctgtttgacacggataatgtaattgtctgtcagtatgataaggcattcccaagaaggacatcgtttaacacctaaactcatttaacaaaggatccgagaagaacagggacagtgtgggaagaaatcttcttgtgatggcatatttgcttcctatatttcttctggaatcatgttcgcttggcttcctgattaaaaacacagttttattgctctctgcactgccaaaccaataaatttacagaagagaaagctgtattccactgtaccccttgcagcatcaataaaactgacagccaaaaaaaa

SEQ ID NO: 428150 - DNA, 503 bp, Homo sapiens
ggactttgggactggacagacctggtcacagtctaggttctacatcttactggtcgagcaactttagagtcaacctatttgatttcttgacaagaccacaatctgatcccaaagatgtgctccacaaatccaggcaaatgggtcacctttgatgatgatcctgctgttcaatcttctcaaaagtcaaagaattttcctctggagaatcaaggtgtctgtagaccaaatggactgaagctgaaccctcctggcctcagggaatttcccagtggatcttcctccaccagcagcactcctctctcctcccccattgtagatttttatttcagtccaggacctccaagtaactctcctctttctacacctaccaaagacttcccaggttttcctggcatccccaaagcagggactcatgtgctttatcctattccagaatcatcttcagacagcaccagcacaccagcaccagcacgaattcccttagcaccagcacgaattccatt

SEQ ID NO: 428151 - DNA, 1955 bp, Homo sapiens
attcccgtttggctgagcactctaggcctacatccatgaagctaggagagcgacactcaaagactgcactattgagagaagctaacgttaaaggcagtgaatatattcgggagtccagctccggaacccgggagctcttttagtgggaggggcggcgctgatggcgcttctggcctccgaatgctagggggcgctgtgatcgccgggcggcctcttgggcgctgggagtccaccgcgcaagcgcatcctggcctttcttcagtccccacgtgcgatccttcccggcaactttttcgagaaaaatgcccaaattcaaggcggcccgtggggtggggggtcaggaaaaacatgcgcccctggccgatcagatcctggctgggaatgcggtgcgggcgggggtccgggagaagcggcggggtcgcgggacaggagaagcggaggaagagtatgtggggccccggctgagccgacggattttgcagcaagcacggcagcaacaggaggaactcgaggccgagcatgggactggggacaagcccgcggcgccgcgggaacgcaccacgcggctgggtccaagaatgcctcaggatggatcagatgacgaggacgaggagtggcccaccctggagaaggctgccacaatgacagcagcgggccatcatgcagaggtggttgtggaccctgaggatgagcgtgccatagagatgttcatgaacaagaaccctcctgccaggcgcaccctggctgacatcatcatggagaagctgactgagaagcagacagaggttgagacagtcatgtcagaggtgtcgggcttccctatgccccagctggacccccgggtcctagaagtgtacaggggggtccgggaggtattatctaagtaccgcagtggaaaactgcccaaggcatttaagatcatccctgcactctccaactgggagcaaatcctctacgtcacagagccggaggcctggactgcagctgccatgtaccaggccaccaggatttttgcctctaacctgaaggaacgcatggcccagcgcttctacaaccttgtcctgctccctcgagtacgagatgacgttgctgaatacaaacgactcaacttccatctctacatggctctcaagaaggcccttttcaaacctggagcctggttcaaagggatcctgattccactgtgcgagtctggcacttgtaccctccgggaagccatcattgtgggtagcatcatcaccaagtgctccatccctgtgttgcactccagtgcggccatgctgaaaattgctgagatggaatacagcggtgccaacagcatcttcctgcgactgctgctggataagaagtatgcactgccttaccgggtgctggatgccctagtcttccacttcctggggttccggacagagaagcgtgaactgcctgtgctgtggcaccagtgcctcctgactttggtccagcgctacaaggccgacttggccacagaccagaaagaggccctcttagaactgctccggctgcagccccatccacagctatcgcccgaaatcaggcgtgagcttcagagtgcagtcccccgcgatgtggaagatgttcccatcaccgtggagtgaggaaaacagtcagctgtcctggccaaaggggtttggaaggacaccaagacccccgttggtgactgaagatgacactgagctttaatggctgaagacccagatcagggcagtgacagatcacagggacatctgtggctcccagtccaggacaggaaggactgagggtctggctggttccctcttccattctaggcccttatccctgtttagttctgagagccaacttgagataccatatgctagcattcccagtccccagctggggcttggtgtgagtactttttctatggctattgtgtcaggtcactgtggataaaggcaaagacagatatttattga

SEQ ID NO: 428152 - DNA, 829 bp, Homo sapiens
tggcatgatctcggctcgctgcaacctccgcctccatggttcaagagattctcctgcctcagcctcctgagtagctgggactacaggtgcgtgccaccacgcctggctaatttttgtatttttagtagagacggggtggagaaggggtttcaccaggttggccaggctggtctcaaactcctgacctcaggtgatccacccgcctcggcctcccaaagtgctgggattacaggcatgagccactgcacccagcccaagtgcccatttttgtgtggcccatgagctaagaatgatttttccatttttaaatggggaaaaaattaaaacagtattttgtgataggtaggaattacatgaaattccagtttcagcatccataaatagttttgttggaacagccatgctcacccatttacatgttttctgtggctggttttgtgctacaacagcagagtttaagtataatcctgctataacccttgttatttgctttcgaaattgcgcatttgttccaacccatttaatatatttgggaacagtttgatcataacgcagacttcatgtttgcttgtgtgtgatttcatcctcgagaaatagtaggtgaatatgggaaactgtatctagctgaaccaagcctaagtagtacacaaaactcacacctaaacatgtaccagctacctcactcatctccccacctgtgttgagcaacccttccgacgtccacttccaaaagcaaagtgcatgtcttcaagataaaaggccatatttattgtgatataatttctcaaccatttgacatatgtaaaaaccaagctatccttttttttta

SEQ ID NO: 428153 - DNA, 2866 bp, Homo sapiens
attcccgtttggctgagcactctaggcctacatccatgaagctaggagagcgacactcaaagactgcactattgagagaagctaacgttaaaggcagtgaatatattcgggagtccagctccggaacccgggagctcttttagtgggaggggcggcgctgatggcgcttctggcctccgaatgctagggggcgctgtgatcgccgggcggcctcttgggcgctgggagtccaccgcgcaagcgcatcctggcctttcttcagtccccacgtgcgatccttcccggcaactttttcgagaaaaatgcccaaattcaaggcggcccgtggggtggggggtcaggaaaaacatgcgcccctggccgatcagatcctggctgggaatgcggtgcgggcgggggtccgggagaagcggcggggtcgcgggacaggagaagcggaggaagagtatgtggggccccggctgagccgacggattttgcagcaagcacggcagcaacaggaggaactcgaggccgagcatgggactggggacaagcccgcggcgccgcgggaacgcaccacgcggctgggtccaagaatgcctcaggatggatcagatgacgaggacgaggagtggcccaccctggagaaggctgccacaatgacagcagcgggccatcatgcagaggtggttgtggaccctgaggatgagcgtgccatagagatgttcatgaacaagaaccctcctgccaggcgcaccctggctgacatcatcatggagaagctgactgagaagcagacagaggttgagacagtcatgtcagaggtgtcgggcttccctatgccccagctggacccccgggtcctagaagtgtacaggggggtccgggaggtattatctaagtaccgcagtggaaaactgcccaaggcatttaagatcatccctgcactctccaactgggagcaaatcctctacgtcacagagccggaggcctggactgcagctgccatgtaccaggccaccaggatttttgcctctaacctgaaggaacgcatggcccagcgcttctacaaccttgtcctgctccctcgagtacgagatgacgttgctgaatacaaacgactcaacttccatctctacatggctctcaagaaggcccttttcaaacctggagcctggttcaaagggatcctgattccactgtgcgagtctggcacttgtaccctccgggaagccatcattgtgggtagcatcatcaccaagtgctccatccctgtgttgcactccagtgcggccatgctgaaaattgctgagatggaatacagcggtgccaacagcatcttcctgcgactgctgctggataagaagtatgcactgccttaccgggtgctggatgccctagtcttccacttcctggggttccggacagagaagcgtgaactgcctgtgctgtggcaccagtgcctcctgactttggtccagcgctacaaggccgacttggccacagaccagaaagaggccctcttagaactgctccggctgcagccccatccacagctatcgcccgaaatcaggcgtgagcttcagagtgcagtcccccgcgatgtggaagatgttcccatcaccgtggagtgaggaaaacagtcagctgtcctggccaaaggggtttggaaggacaccaagacccccgttggtgactgaagatgacactgagctttaatggctgaagacccagatcagggcagtgacagatcacagggacatctgtggctcccagtccaggacaggaaggactgagggtctggctggttccctcttccattctaggcccttatccctgtttagttctgagagccaacttgagataccatatgctagcattcccagtccccagctggggcttggtgtgagtactttttctatggctattgtgtcaggtcactgtggataaaggcaaagacagatatttattgaacctctgtgtttggtgtagtcaatggaggtaggcattactcctgttagtatttggaggacggaggacattcttgtcctgtttatataggacccacctcccttgatctccaagcttgtttctccaggctgcactcaccttgttagcccccaggggacacatcctctgccttcccccatcacaggctacagcagccaggagcaggttgtccaaagatggtcgtgtctcagcagtggatgaaaggactacaagagaaaactccttggggaaagcagagataagagtcaagaaaggccagagagggctgggattacaggcatgagccactgcacccagcccaagtgcccatttttgtgtggcccatgagctaagaatgatttttccatttttaaatggggaaaaaattaaaacagtattttgtgataggtaggaattacatgaaattccagtttcagcatccataaatagttttgttggaacagccatgctcacccatttacatgttttctgtggctggttttgtgctacaacagcagagtttaagtataatcctgctataacccttgttatttgctttcgaaattgcgcatttgttccaacccatttaatatatttgggaacagtttgatcataacgcagacttcatgtttgcttgtgtgtgatttcatcctcgagaaatagtaggtgaatatgggaaactgtatctagctgaaccaagcctaagtagtacacaaaactcacacctaaacatgtaccagctacctcactcatctccccacctgtgttgagcaacccttccgacgtccacttccaaaagcaaagtgcatgtcttcaagataaaaggccatatttattgtgatataatttctcaaccatttgacatatgtaaaaaccaagctatccttttttttta

SEQ ID NO: 428154 - DNA, 2778 bp, Homo sapiens
attcccgtttggctgagcactctaggcctacatccatgaagctaggagagcgacactcaaagactgcactattgagagaagctaacgttaaaggcagtgaatatattcgggagtccagctccggaacccgggagctcttttagtgggaggggcggcgctgatggcgcttctggcctccgaatgctagggggcgctgtgatcgccgggcggcctcttgggcgctgggagtccaccgcgcaagcgcatcctggcctttcttcagtccccacgtgcgatccttcccggcaactttttcgagaaaaatgcccaaattcaaggcggcccgtggggtggggggtcaggaaaaacatgcgcccctggccgatcagatcctggctgggaatgcggtgcgggcgggggtccgggagaagcggcggggtcgcgggacaggagaagcggaggaagagtatgtggggccccggctgagccgacggattttgcagcaagcacggcagcaacaggaggaactcgaggccgagcatgggactggggacaagcccgcggcgccgcgggaacgcaccacgcggctgggtccaagaatgcctcaggatggatcagatgacgaggacgaggagtggcccaccctggagaaggctgccacaatgacagcagcgggccatcatgcagaggtggttgtggaccctgaggatgagcgtgccatagagatgttcatgaacaagaaccctcctgccaggcgcaccctggctgacatcatcatggagaagctgactgagaagcagacagaggttgagacagtcatgtcagaggtgtcgggcttccctatgccccagctggacccccgggtcctagaagtgtacaggggggtccgggaggtattatctaagtaccgcagtggaaaactgcccaaggcatttaagatcatccctgcactctccaactgggagcaaatcctctacgtcacagagccggaggcctggactgcagctgccatgtaccaggccaccaggatttttgcctctaacctgaaggaacgcatggcccagcgcttctacaaccttgtcctgctccctcgagtacgagatgacgttgctgaatacaaacgactcaacttccatctctacatggctctcaagaaggcccttttcaaacctggagcctggttcaaagggatcctgattccactgtgcgagtctggcacttgtaccctccgggaagccatcattgtgggtagcatcatcaccaagtgctccatccctgtgttgcactccagtgcggccatgctgaaaattgctgagatggaatacagcggtgccaacagcatcttcctgcgactgctgctggataagaagtatgcactgccttaccgggtgctggatgccctagtcttccacttcctggggttccggacagagaagcgtgaactgcctgtgctgtggcaccagtgcctcctgactttggtccagcgctacaaggccgacttggccacagaccagaaagaggccctcttagaactgctccggctgcagccccatccacagctatcgcccgaaatcaggcgtgagcttcagagtgcagtcccccgcgatgtggaagatgttcccatcaccgtggagtgaggaaaacagtcagctgtcctggccaaaggggtttggaaggacaccaagacccccgttggtgactgaagatgacactgagctttaatggctgaagacccagatcagggcagtgacagatcacagggacatctgtggctcccagtccaggacaggaaggactgagggtctggctggttccctcttccattctaggcccttatccctgtttagttctgagagccaacttgagataccatatgctagcattcccagtccccagctggggcttggtgtgagtactttttctatggctattgtgtcaggtcactgtggataaaggcaaagacagatatttattgaacctctgtgtttggtgtagtcaatggaggtaggcattactcctgttagtatttggaggacggaggacattcttgtcctgtttatataggacccacctcccttgatctccaagcttgtttctccaggctgcactcaccttgttagcccccaggggacacatcctctgccttcccccatcacaggctacagcagccaggagcaggttgtccaaaggctgggattacaggcatgagccactgcacccagcccaagtgcccatttttgtgtggcccatgagctaagaatgatttttccatttttaaatggggaaaaaattaaaacagtattttgtgataggtaggaattacatgaaattccagtttcagcatccataaatagttttgttggaacagccatgctcacccatttacatgttttctgtggctggttttgtgctacaacagcagagtttaagtataatcctgctataacccttgttatttgctttcgaaattgcgcatttgttccaacccatttaatatatttgggaacagtttgatcataacgcagacttcatgtttgcttgtgtgtgatttcatcctcgagaaatagtaggtgaatatgggaaactgtatctagctgaaccaagcctaagtagtacacaaaactcacacctaaacatgtaccagctacctcactcatctccccacctgtgttgagcaacccttccgacgtccacttccaaaagcaaagtgcatgtcttcaagataaaaggccatatttattgtgatataatttctcaaccatttgacatatgtaaaaaccaagctatccttttttttta

SEQ ID NO: 428155 - DNA, 1927 bp, Homo sapiens
attcccgtttggctgagcactctaggcctacatccatgaagctaggagagcgacactcaaagactgcactattgagagaagctaacgttaaaggcagtgaatatattcgggagtccagctccggaacccgggagctcttttagtgggaggggcggcgctgatggcgcttctggcctccgaatgctagggggcgctgtgatcgccgggcggcctcttgggcgctgggagtccaccgcgcaagcgcatcctggcctttcttcagtccccacgtgcgatccttcccggcaactttttcgagaaaaatgcccaaattcaaggcggcccgtggggtggggggtcaggaaaaacatgcgcccctggccgatcagatcctggctgggaatgcggtgcgggcgggggtccgggagaagcggcggggtcgcgggacaggagaagcggaggaagagtatgtggggccccggctgagccgacggattttgcagcaagcacggcagcaacaggaggaactcgaggccgagcatgggactggggacaagcccgcggcgccgcgggaacgcaccacgcggctgggtccaagaatgcctcaggatggatcagatgacgaggacgaggagtggcccaccctggagaaggctgccacaatgacagcagcgggccatcatgcagaggtggttgtggaccctgaggatgagcgtgccatagagatgttcatgaacaagaaccctcctgccaggcgcaccctggctgacatcatcatggagaagctgactgagaagcagacagaggttgagacagtcatgtcagaggtgtcgggcttccctatgccccagctggacccccgggtcctagaagtgtacaggggggtccgggaggtattatctaagtaccgcagtggaaaactgcccaaggcatttaagatcatccctgcactctccaactgggagcaaatcctctacgtcacagagccggaggcctggactgcagctgccatgtaccaggccaccaggatttttgcctctaacctgaaggaacgcatggcccagcgcttctacaaccttgtcctgctccctcgagtacgagatgacgttgctgaatacaaacgactcaacttccatctctacatggctctcaagaaggcccttttcaaacctggagcctggttcaaagggatcctgattccactgtgcgagtctggcacttgtaccctccgggaagccatcattgtgggtagcatcatcaccaagtgctccatccctgtgttgcactccagtgcggccatgctgaaaattgctgagatggaatacagcggtgccaacagcatcttcctgcgactgctgctggataagaagtatgcactgccttaccgggtgctggatgccctagtcttccacttcctggggttccggacagagaagcgtgaactgcctgtgctgtggcaccagtgcctcctgactttggtccagcgctacaaggccgacttggccacagaccagaaagaggccctcttagaactgctccggctgcagccccatccacagctatcgcccgaaatcaggcgtgagcttcagagtgcagtcccccgcgatgtggaagatgttcccatcaccgtggagtgaggaaaacagtcagctgtcctggccaaaggggtttggaaggacaccaagacccccgttggtgactgaagatgacactgagctttaatggctgaagacccagatcagggcagtgacagatcacagggacatctgtggctcccagtccaggacaggaaggactgagggtctggctggttccctcttccattctaggcccttatccacagtgacctgacacaatagccatagaaaaagtactcacaccaagccccagctggggactgggaatgctagcatatggtatctcaagttggcctcgtgccgctcgtgcc

SEQ ID NO: 428156 - DNA, 384 bp, Homo sapiens
tatcgcccgaaatcaggcgtgagcttcagagtgcagtcccccgcgatgtggaagatgttcccatcaccgtggagtgaggaaaacagtcagctgtcctggccaaaggggtttggaaggacaccaagacccccgttggtgactgaagatgacactgagctttaatggctgaagacccagatcagggcagtgacagatcacagggacatctgtggctcccagtccaggacaggaaggactgagggtctggctggttccctcttccattctaggcccttatccctgtttagttctgagagccaacttgagataccatatgctagcattcccagtccccagctggggcttggtgtgagtactttttctatggctattgtgtcaggtcac

SEQ ID NO: 428157 - DNA, 422 bp, Homo sapiens
gccccgaggtttctaaatccagacattcccgtttggctgagcactctaggcctacatccatgaagctaggagagcgacactcaaagactgcactattgagagaagctaacgttaaaggcagtgaatatattcgggagtccagctccggaacccgggagctcttttagtgggaggggcggcgctgatggcgcttctggcctccgaatgctagggggcgctgtgatcgccgggcggcctcttgggcgctgggagtccaccgcgcaagcgcatcctggcctttcttcagtccccacgtgcgatccttcccggcaactttttcgagaaaaatgcccaaattcaaggcggcccgtggggtggggggtcaggaaaaacatgcgcccctggccgatcagatcctggctgggaatgcggtgcgggcgggg

SEQ ID NO: 428158 - DNA, 2710 bp, Homo sapiens
attcccgtttggctgagcactctaggcctacatccatgaagctaggagagcgacactcaaagactgcactattgagagaagctaacgttaaaggcagtgaatatattcgggagtccagctccggaacccgggagctcttttagtgggaggggcggcgctgatggcgcttctggcctccgaatgctagggggcgctgtgatcgccgggcggcctcttgggcgctgggagtccaccgcgcaagcgcatcctggcctttcttcagtccccacgtgcgatccttcccggcaactttttcgagaaaaatgcccaaattcaaggcggcccgtggggtggggggtcaggaaaaacatgcgcccctggccgatcagatcctggctgggaatgcggtgcgggcgggggtccgggagaagcggcggggtcgcgggacaggagaagcggaggaagagtatgtggggccccggctgagccgacggattttgcagcaagcacggcagcaacaggaggaactcgaggccgagcatgggactggggacaagcccgcggcgccgcgggaacgcaccacgcggctgggtccaagaatgcctcaggatggatcagatgacgaggacgaggagtggcccaccctggagaaggctgccacaatgacagcagcgggccatcatgcagaggtggttgtggaccctgaggatgagcgtgccatagagatgttcatgaacaagaaccctcctgccaggcgcaccctggctgacatcatcatggagaagctgactgagaagcagacagaggttgagacagtcatgtcagaggtgtcgggcttccctatgccccagctggacccccgggtcctagaagtgtacaggggggtccgggaggtattatctaagtaccgcagtggaaaactgcccaaggcatttaagatcatccctgcactctccaactgggagcaaatcctctacgtcacagagccggaggcctggactgcagctgccatgtaccaggccaccaggatttttgcctctaacctgaaggaacgcatggcccagcgcttctacaaccttgtcctgctccctcgagtacgagatgacgttgctgaatacaaacgactcaacttccatctctacatggctctcaagaaggcccttttcaaacctggagcctggttcaaagggatcctgattccactgtgcgagtctggcacttgtaccctccgggaagccatcattgtgggtagcatcatcaccaagtgctccatccctgtgttgcactccagtgcggccatgctgaaaattgctgagatggaatacagcggtgccaacagcatcttcctgcgactgctgctggataagaagtatgcactgccttaccgggtgctggatgccctagtcttccacttcctggggttccggacagagaagcgtgaactgcctgtgctgtggcaccagtgcctcctgactttggtccagcgctacaaggccgacttggccacagaccagaaagaggccctcttagaactgctccggctgcagccccatccacagctatcgcccgaaatcaggcgtgagcttcagagtgcagtcccccgcgatgtggaagatgttcccatcaccgtggagtgaggaaaacagtcagctgtcctggccaaaggggtttggaaggacaccaagacccccgttggtgactgaagatgacactgagctttaatggctgaagacccagatcagggcagtgacagatcacagggacatctgtggctcccagtccaggacaggaaggactgagggtctggctggttccctcttccattctaggcccttatccctgtttagttctgagagccaacttgagataccatatgctagcattcccagtccccagctggggcttggtgtgagtactttttctatggctattgtgtcaggtcactgtggataaaggcaaagacagatatttattgaacctctgtgtttggtgtagtcaatggaggtaggcattactcctgttagtatttggaggacggaggacattcttgtcctgtttatataggacccacctcccttgatctccaagcttgtttctccaggctgcactcaccttgttagcccccaggggacacatcctctgccttcccccatcacaggctacagcagccaggagcaggttgtccaaagatggtcgtgtctcagcagtggatgaaaggactacaagagaaaactccttggggaaagcagagataagagtcaagaaaggccagagaggctgggcttggtggctcacgcctgtaatcccagcactttgggaggctgaggtaggtggattacctgagttcaggagttcgagaccagcctggccaacatggtgaaaccccttctctactaaaaatacaaaaattagctgggtgtggtggcgtgtgcttgtaatcccagctacttgggaggctgaggcaggagaatcgcttcaacctgggaggtggaggttgcggtgatccaggattggggccactacactccagcctgggccacggagcaagactgtctcaaaaaaaaaaaaaaaaggccagagaataaggctgggcccaagaatggttagatcagagctagcatcaaacaggctccctttctggcttttcagccaatgaaagctttagactagtgactagtaaactagggccaggtgcccctttttttgttgatttgttttttgagacggagtc

SEQ ID NO: 428159 - DNA, 1979 bp, Homo sapiens
attcccgtttggctgagcactctaggcctacatccatgaagctaggagagcgacactcaaagactgcactattgagagaagctaacgttaaaggcagtgaatatattcgggagtccagctccggaacccgggagctcttttagtgggaggggcggcgctgatggcgcttctggcctccgaatgctagggggcgctgtgatcgccgggcggcctcttgggcgctgggagtccaccgcgcaagcgcatcctggcctttcttcagtccccacgtgcgatccttcccggcaactttttcgagaaaaatgcccaaattcaaggcggcccgtggggtggggggtcaggaaaaacatgcgcccctggccgatcagatcctggctgggaatgcggtgcgggcgggggtccgggagaagcggcggggtcgcgggacaggagaagcggaggaagagtatgtggggccccggctgagccgacggattttgcagcaagcacggcagcaacaggaggaactcgaggccgagcatgggactggggacaagcccgcggcgccgcgggaacgcaccacgcggctgggtccaagaatgcctcaggatggatcagatgacgaggacgaggagtggcccaccctggagaaggctgccacaatgacagcagcgggccatcatgcagaggtggttgtggaccctgaggatgagcgtgccatagagatgttcatgaacaagaaccctcctgccaggcgcaccctggctgacatcatcatggagaagctgactgagaagcagacagaggttgagacagtcatgtcagaggtgtcgggcttccctatgccccagctggacccccgggtcctagaagtgtacaggggggtccgggaggtattatctaagtaccgcagtggaaaactgcccaaggcatttaagatcatccctgcactctccaactgggagcaaatcctctacgtcacagagccggaggcctggactgcagctgccatgtaccaggccaccaggatttttgcctctaacctgaaggaacgcatggcccagcgcttctacaaccttgtcctgctccctcgagtacgagatgacgttgctgaatacaaacgactcaacttccatctctacatggctctcaagaaggcccttttcaaacctggagcctggttcaaagtggctgccctttgactctccctagggatcctgattccactgtgcgagtctggcacttgtaccctccgggaagccatcattgtgggtagcatcatcaccaagtgctccatccctgtgttgcactccagtgcggccatgctgaaaattgctgagatggaatacagcggtgccaacagcatcttcctgcgactgctgctggataagaagtatgcactgccttaccgggtgctggatgccctagtcttccacttcctggggttccggacagagaagcgtgaactgcctgtgctgtggcaccagtgcctcctgactttggtccagcgctacaaggccgacttggccacagaccagaaagaggccctcttagaactgctccggctgcagccccatccacagctatcgcccgaaatcaggcgtgagcttcagagtgcagtcccccgcgatgtggaagatgttcccatcaccgtggagtgaggaaaacagtcagctgtcctggccaaaggggtttggaaggacaccaagacccccgttggtgactgaagatgacactgagctttaatggctgaagacccagatcagggcagtgacagatcacagggacatctgtggctcccagtccaggacaggaaggactgagggtctggctggttccctcttccattctaggcccttatccctgtttagttctgagagccaacttgagataccatatgctagcattcccagtccccagctggggcttggtgtgagtactttttctatggctattgtgtcaggtcactgtggataaaggcaaagacagatatttattga

SEQ ID NO: 428160 - DNA, 1696 bp, Homo sapiens
  misc_feature (194)..(194): n is a, c, g, or t
  misc_feature (306)..(306): n is a, c, g, or t
  misc_feature (462)..(462): n is a, c, g, or t
  misc_feature (472)..(472): n is a, c, g, or t
  misc_feature (554)..(554): n is a, c, g, or t
gcggagccttccctggcaagctgttttcagagcaagaaagtgcccagactacaagggcggaccgatggggtggggggatcaggaaataactatgcgccgccatgggccgtagtcatgactcctggactgcggaatgacggctgacgggcagcggcggtccgcgcgagaatgacggacggggtctcaacgcggancagtgacgcaaagcggataggacatgagctactgcctggggcctccgcgcctgcatgccgcagcggtacattctgggagcagagacacgagcagcaatcacgtgcacggaanctcgacgtgccgacacactgggagctggggaacaaaagaccgcgtgggcagaccagacggaggaaacgcaagcaacgacaggtgtgaggtccgaaggaatgccatcacggatggcatccaccagtgacaggagggacgcaggcacgctggccacanacccatgagnatgacagcgcatgcgcaacacaattgaacagctcagtcgaggctccatcagtgcgaccagtcgctggctctggggcactccntgcaggggatgagccgtgccagtagagatggttcatgaactaaagaaccctcctgccaggtattatctaagtaccgcagtggaaaactgcccaaggcatttaagatcatccctgcactctccaactgggagcaaatcctctacgtcacagagccggaggcctggactgcagctgccatgtaccaggccaccaggatttttgcctctaacctgaaggaacgcatggcccagcgcttctacaaccttgtcctgctccctcgagtacgagatgacgttgctgaatacaaacgactcaacttccatctctacatggctctcaagaaggcccttttcaaacctggagcctggttcaaagggatcctgattccactgtgcgagtctggcacttgtaccctccgggaagccatcattgtgggtagcatcatcaccaagtgctccatccctgtgttgcactccagtgcggccatgctgaaaattgctgagatggaatacagcggtgccaacagcatcttcctgcgactgctgctggataagaagtatgcactgccttaccgggtgctggatgccctagtcttccacttcctggggttccggacagagaagcgtgaactgcctgtgctgtggcaccagtgcctcctgactttggtccagcgctacaaggccgacttggccacagaccagaaagaggccctcttagaactgctccggctgcagccccatccacagctatcgcccgaaatcaggcgtgagcttcagagtgcagtcccccgcgatgtggaagatgttcccatcaccgtggagtgaggaaaacagtcagctgtcctggccaaaggggtttggaaggacaccaagacccccgttggtgactgaagatgacactgagctttaatggctgaagacccagatcagggcagtgacagatcacagggacatctgtggctcccagtccaggacaggaaggactgagggtctggctggttccctcttccattctaggcccttatccctgtttagttctgagagccaacttgagataccatatgctagcattcccagtccccagctggggcttggtgtgagtactttttctatggctattgtgtcaggtcactgtggataaaggcaaagacagatatttattga

SEQ ID NO: 428161 - DNA, 2431 bp, Homo sapiens
agcggggggaagggttctggaagacggcagagctgccgccattttgcgggaagaggaggcgctgtacctgcagtgctgcttttcttgcctagactctaggaactatccgagctccactccccacaacatactcaaaggaacggagagaaccgggacccccctgcggggacccggaactgatctgacaggatggcatctgatgactttgacatagtgattgaggccatgctggaagctccctataaaaaagaagaggatgagcaacaaaggaaagaagttaaaaaggattatcctagcaataccaccagcagcaccagcaacagtggcaatgagaccagtggaagcagcaccatcggggagacaagcaatcgtagtcgagatcgggatcggtatagacggagaaatagtcggagccgaagtccaggtcggcagtgtcgtcaccgtagccgtagctgggatcgtcgacatggtagtgagtcgcgaagtcgggaccatcgtcgtgaggatcgtgtgcattacaggagtcctccacttgccactggttataggtatggacacagtaagagtcctcatttcagagagaagagcccagtcagggagccagttgataatctgagtcctgaggagcgtgatgcccgcacagttttctgtatgcagttagctgcccgaattcggcctcgagatctggaggactttttctctgctgtaggcaaggttcgcgatgtacgtatcatctcagatcggaactcacgtcgttctaagggcattgcctacgtggaattctgtgaaatccagtctgtgccactggccattgggctgactgggcagcggttgctgggagtgcctatcattgtacaggcttcacaggcagagaaaaaccgactggcagccatggccaacaacctgcaaaagggcaatggtggaccaatgcgcctctatgtgggttccctgcacttcaatatcactgaagacatgctccggggcatctttgagccctttggtaaaattgataatattgtcctgatgaaggactcagatacaggccgctctaaaggttatggtttcatcacgttctctgattctgagtgtgcccggcgggccctggaacagttgaatgggtttgagcttgctggtcgacctatgagggttggccatgtgactgagcgactggatggtggcacagacatcacttttcctgatggggaccaggagctggatctgggatcagcaggtggacgttttcagctcatggcaaaactggcagaaggcgctggaatccaactgccaagcactgctgctgctgctgctgccgccgccgccgcccaggctgctgccttgcaactgaatggagcagttcccttgggggccctgaatccagcagctctgactgctctgagtccagccctgaaccttgcctcccagtgtttccagctctccagcctctttaccccccagaccatgtaaatcagtggcacagtatactgcctccttgtgcctctggatcctgccacttcacatctactcttccatggccccatttctccattttgtggaccaagccatcctgagggcatggacattgtctctgaggaaattggggccacccttaagataccaagaaaagctcctgcccatggtcccactggaaatggactctgctgagcaaagccaccagttgaagagaacagaatccacacctgcattgaatacctgtttctccatgtgtatcgtctctgagattaccttcttgccctttccaacaccttagtgattcctcaatttctcccccattgggaaggccatagggcattaactgaaggaactgacctctctccttttcctgtacctttaacctttagtctgtcaaggaaaacccttaggacctctgaatcaagaggactgagtttgtgggtgaaccttgaaggtgctctttctgctacaagggccctgggagatagcatggacgtgcattgagaagccagcctcagaccttagcttgaagcagcttgaggccagacctactgtagcctcagcatcttgctaggaggcatggaagtgatctatcctgccaggaggcctcagagtgatctgtcctgccaggaggtgtgagagtgatctgtcctgtgaggcatttaggggctttcaggaatttagtaaaaggtggagtatgcctttccagtatcttccatcttcctttgtatacttgtccttcctcccatttcctccctttggcccgaggtaggaggatggagggaggctgctactctaccacttcctgtgtgcctctactgtggcctcaaccctggcaattatagctactcccatcccttacctgggcatgtgtgagcccttctcactggattttatacccttgtgtctgtgtacataaatatatatacatatatatatacataaaaactttgtacaaaag

SEQ ID NO: 428162 - DNA, 406 bp, Homo sapiens
aaaagaagaaaaaagaaaaaactaccagcctgaaaatgcatagtgtttgctaccttattgcttttagcacatctagaaagacactaaacccagtgagattgcaagtttcaaaatattgtgttgtatatggctttgcttaaacggatatatttgtttctgagtgaaaactttttacgtagaggtttatttgtagaggcttgtaaacttaagtgtaagttttagtgtgtgtgttaagttgttcttaccccgcattagcactcaacaatgagcagttcttgaaatcaagcatttcatttggaggggaaaaagcagattgtaaaaaatagttcataacagaaaatttgtgtagacttggcagcaaaaatgactgaaacagcttgagtataaaaaacttttctttttaggc

SEQ ID NO: 428163 - DNA, 2377 bp, Homo sapiens
agcggggggaagggttctggaagacggcagagctgccgccattttgcgggaagaggaggcgctgtacctgcagtgctgcttttcttgcctagactctaggaactatccgagctccactccccacaacatactcaaaggaacggagagaaccgggacccccctgcggggacccggaactgatctgacaggatggcatctgatgactttgacatagtgattgaggccatgctggaagctccctataaaaaagaagaggatgagcaacaaaggaaagaagttaaaaaggattatcctagcaataccaccagcagcaccagcaacagtggcaatgagaccagtggaagcagcaccatcggggagacaagcaatcgtagtcgagatcgggatcggtatagacggagaaatagtcggagccgaagtccaggtcggcagtgtcgtcaccgtagccgtagctgggatcgtcgacatggtagtgagtcgcgaagtcgggaccatcgtcgtgaggatcgtgtgcattacaggagtcctccacttgccactggggagccagttgataatctgagtcctgaggagcgtgatgcccgcacagttttctgtatgcagttagctgcccgaattcggcctcgagatctggaggactttttctctgctgtaggcaaggttcgcgatgtacgtatcatctcagatcggaactcacgtcgttctaagggcattgcctacgtggaattctgtgaaatccagtctgtgccactggccattgggctgactgggcagcggttgctgggagtgcctatcattgtacaggcttcacaggcagagaaaaaccgactggcagccatggccaacaacctgcaaaagggcaatggtggaccaatgcgcctctatgtgggttccctgcacttcaatatcactgaagacatgctccggggcatctttgagccctttggtaaaattgataatattgtcctgatgaaggactcagatacaggccgctctaaaggttatggtttcatcacgttctctgattctgagtgtgcccggcgggccctggaacagttgaatgggtttgagcttgctggtcgacctatgagggttggccatgtgactgagcgactggatggtggcacagacatcacttttcctgatggggaccaggagctggatctgggatcagcaggtggacgttttcagctcatggcaaaactggcagaaggcgctggaatccaactgccaagcactgctgctgctgctgctgccgccgccgccgcccaggctgctgccttgcaactgaatggagcagttcccttgggggccctgaatccagcagctctgactgctctgagtccagccctgaaccttgcctcccagtgtttccagctctccagcctctttaccccccagaccatgtaaatcagtggcacagtatactgcctccttgtgcctctggatcctgccacttcacatctactcttccatggccccatttctccattttgtggaccaagccatcctgagggcatggacattgtctctgaggaaattggggccacccttaagataccaagaaaagctcctgcccatggtcccactggaaatggactctgctgagcaaagccaccagttgaagagaacagaatccacacctgcattgaatacctgtttctccatgtgtatcgtctctgagattaccttcttgccctttccaacaccttagtgattcctcaatttctcccccattgggaaggccatagggcattaactgaaggaactgacctctctccttttcctgtacctttaacctttagtctgtcaaggaaaacccttaggacctctgaatcaagaggactgagtttgtgggtgaaccttgaaggtgctctttctgctacaagggccctgggagatagcatggacgtgcattgagaagccagcctcagaccttagcttgaagcagcttgaggccagacctactgtagcctcagcatcttgctaggaggcatggaagtgatctatcctgccaggaggcctcagagtgatctgtcctgccaggaggtgtgagagtgatctgtcctgtgaggcatttaggggctttcaggaatttagtaaaaggtggagtatgcctttccagtatcttccatcttcctttgtatacttgtccttcctcccatttcctccctttggcccgaggtaggaggatggagggaggctgctactctaccacttcctgtgtgcctctactgtggcctcaaccctggcaattatagctactcccatcccttacctgggcatgtgtgagcccttctcactggattttatacccttgtgtctgtgtacataaatatatatacatatatatatacataaaaactttgtacaaaag

SEQ ID NO: 428164 - DNA, 2440 bp, Homo sapiens
  misc_feature (25)..(25): n is a, c, g, or t
  misc_feature (29)..(29): n is a, c, g, or t
aaaaggccggctggtacggtcgggngtanggatcggcagagctgccgccattttgcgggaagaggaggcgctgtacctgcagtgctgcttttcttgcctagactctaggaactatccgagctccactccccacaacatactcaaaggaacggagagaaccgggacccccctgcggggacccggaactgatctgacaggatggcatctgatgactttgacatagtgattgaggccatgctggaagctccctataaaaaagaagaggatgagcaacaaaggaaagaagttaaaaaggattatcctagcaataccaccagcagcaccagcaacagtggcaatgagaccagtggaagcagcaccatcggggagacaagcaatcgtagtcgagatcgggatcggtatagacggagaaatagtcggagccgaagtccaggtcggcagtgtcgtcaccgtagccgtagctgggatcgtcgacatggtagtgagtcgcgaagtcgggaccatcgtcgtgaggatcgtgtgcattacaggagtcctccacttgccactggttataggtatggacacagtaagagtcctcatttcagagagaagagcccagtcagggagccagttgataatctgagtcctgaggagcgtgatgcccgcacagttttctgtatgcagttagctgcccgaattcggcctcgagatctggaggactttttctctgctgtaggcaaggttcgcgatgtacgtatcatctcagatcggaactcacgtcgttctaagggcattgcctacgtggaattctgtgaaatccagtctgtgccactggccattgggctgactgggcagcggttgctgggagtgcctatcattgtacaggcttcacaggcagagaaaaaccgactggcagccatggccaacaacctgcaaaagggcaatggtggaccaatgcgcctctatgtgggttccctgcacttcaatatcactgaagacatgctccggggcatctttgagccctttggtaaaattgataatattgtcctgatgaaggactcagatacaggccgctctaaaggttatggtttcatcacgttctctgattctgagtgtgcccggcgggccctggaacagttgaatgggtttgagcttgctggtcgacctatgagggttggccatgtgactgagcgactggatggtggcacagacatcacttttcctgatggggaccaggagctggatctgggatcagcaggtggacgttttcagctcatggcaaaactggcagaaggcgctggaatccaactgccaagcactgctgctgctgctgctgccgccgccgccgcccaggctgctgccttgcaactgaatggagcagttcccttgggggccctgaatccagcagctctgactgctctgagtccagccctgaaccttgcctcccagtgtttccagctctccagcctctttaccccccagaccatgtaaatcagtggcacagtatactgcctccttgtgcctctggatcctgccacttcacatctactcttccatggccccatttctccattttgtggaccaagccatcctgagggcatggacattgtctctgaggaaattggggccacccttaagataccaagaaaagctcctgcccatggtcccactggaaatggactctgctgagcaaagccaccagttgaagagaacagaatccacacctgcattgaatacctgtttctccatgtgtatcgtctctgagattaccttcttgccctttccaacaccttagtgattcctcaatttctcccccattgggaaggccatagggcattaactgaaggaactgacctctctccttttcctgtacctttaacctttagtctgtcaaggaaaacccttaggacctctgaatcaagaggactgagtttgtgggtgaaccttgaaggtgctctttctgctacaagggccctgggagatagcatggacgtgcattgagaagccagcctcagaccttagcttgaagcagcttgaggccagacctactgtagcctcagcatcttgctaggaggcatggaagtgatctatcctgccaggaggcctcagagtgatctgtcctgccaggaggtgtgagagtgatctgtcctgtgaggcatttaggggctttcaggaatttagtaaaaggtggagtatgcctttccagtatcttccatcttcctttgtatacttgtccttcctcccatttcctccctttggcccgaggtaggaggatggagggaggctgctactctaccacttcctgtgtgcctctactgtggcctcaaccctggcaattatagctactcccatcccttacctgggcatgtgtgagcccttctcactggattttatacccttgtgtctgtgtacataaatatatatacatatatatatacataaaaactttgtacaaaag

SEQ ID NO: 428165 - DNA, 2416 bp, Homo sapiens
  misc_feature (24)..(24): n is a, c, g, or t
gaataggctaggtcgaggccgggngttaatcggccgagaggaggcgctgtacctgcagtgctgcttttcttgcctagactctaggaactatccgagctccactccccacaacatactcaaaggaacggagagaaccgggacccccctgcggggacccggaactgatctgacaggatggcatctgatgactttgacatagtgattgaggccatgctggaagctccctataaaaaagaagaggatgagcaacaaaggaaagaagttaaaaaggattatcctagcaataccaccagcagcaccagcaacagtggcaatgagaccagtggaagcagcaccatcggggagacaagcaatcgtagtcgagatcgggatcggtatagacggagaaatagtcggagccgaagtccaggtcggcagtgtcgtcaccgtagccgtagctgggatcgtcgacatggtagtgagtcgcgaagtcgggaccatcgtcgtgaggatcgtgtgcattacaggagtcctccacttgccactggttataggtatggacacagtaagagtcctcatttcagagagaagagcccagtcagggagccagttgataatctgagtcctgaggagcgtgatgcccgcacagttttctgtatgcagttagctgcccgaattcggcctcgagatctggaggactttttctctgctgtaggcaaggttcgcgatgtacgtatcatctcagatcggaactcacgtcgttctaagggcattgcctacgtggaattctgtgaaatccagtctgtgccactggccattgggctgactgggcagcggttgctgggagtgcctatcattgtacaggcttcacaggcagagaaaaaccgactggcagccatggccaacaacctgcaaaagggcaatggtggaccaatgcgcctctatgtgggttccctgcacttcaatatcactgaagacatgctccggggcatctttgagccctttggtaaaattgataatattgtcctgatgaaggactcagatacaggccgctctaaaggttatggtttcatcacgttctctgattctgagtgtgcccggcgggccctggaacagttgaatgggtttgagcttgctggtcgacctatgagggttggccatgtgactgagcgactggatggtggcacagacatcacttttcctgatggggaccaggagctggatctgggatcagcaggtggacgttttcagctcatggcaaaactggcagaaggcgctggaatccaactgccaagcactgctgctgctgctgctgccgccgccgccgcccaggctgctgccttgcaactgaatggagcagttcccttgggggccctgaatccagcagctctgactgctctgagtccagccctgaaccttgcctcccagtgtttccagctctccagcctctttaccccccagaccatgtaaatcagtggcacagtatactgcctccttgtgcctctggatcctgccacttcacatctactcttccatggccccatttctccattttgtggaccaagccatcctgagggcatggacattgtctctgaggaaattggggccacccttaagataccaagaaaagctcctgcccatggtcccactggaaatggactctgctgagcaaagccaccagttgaagagaacagaatccacacctgcattgaatacctgtttctccatgtgtatcgtctctgagattaccttcttgccctttccaacaccttagtgattcctcaatttctcccccattgggaaggccatagggcattaactgaaggaactgacctctctccttttcctgtacctttaacctttagtctgtcaaggaaaacccttaggacctctgaatcaagaggactgagtttgtgggtgaaccttgaaggtgctctttctgctacaagggccctgggagatagcatggacgtgcattgagaagccagcctcagaccttagcttgaagcagcttgaggccagacctactgtagcctcagcatcttgctaggaggcatggaagtgatctatcctgccaggaggcctcagagtgatctgtcctgccaggaggtgtgagagtgatctgtcctgtgaggcatttaggggctttcaggaatttagtaaaaggtggagtatgcctttccagtatcttccatcttcctttgtatacttgtccttcctcccatttcctccctttggcccgaggtaggaggatggagggaggctgctactctaccacttcctgtgtgcctctactgtggcctcaaccctggcaattatagctactcccatcccttacctgggcatgtgtgagcccttctcactggattttatacccttgtgtctgtgtacataaatatatatacatatatatatacataaaaactttgtacaaaag

SEQ ID NO: 428166 - DNA, 2511 bp, Homo sapiens
agcggggggaagggttctggaagacggcagagctgccgccattttgcgggaagaggaggcgctgtacctgcagtgctgcttttcttgcctagactctaggaactatccgagctccactccccacaacatactcaaaggaacggagagaaccgggacccccctgcggggacccggaactgatctgacaggatggcatctgatgactttgacatagtgattgaggccatgctggaagctccctataaaaaagaagaggatgagcaacaaaggaaagaagttaaaaaggattatcctagcaataccaccagcagcaccagcaacagtggcaatgagaccagtggaagcagcaccatcggggagacaagcaatcgtagtcgagatcgggatcggtatagacggagaaatagtcggagccgaagtccaggtcggcagtgtcgtcaccgtagccgtagctgggatcgtcgacatggtagtgagtcgcgaagtcgggaccatcgtcgtgaggatcgtgtgcattacaggagtcctccacttgccactggttataggtatggacacagtaagagtcctcatttcagagagaagagcccagtcagggagccagttgataatctgagtcctgaggagcgtgatgcccgcacagttttctgtatgcagttagctgcccgaattcggcctcgagatctggaggactttttctctgctgtaggcaaggttcgcgatgtacgtatcatctcagatcggaactcacgtcgttctaagggcattgcctacgtggaattctgtgaaatccagtctgtgccactggccattgggctgactgggcagcggttgctgggagtgcctatcattgtacaggcttcacaggcagagaaaaaccgactggcagccatggccaacaacctgcaaaagggcaatggtggaccaatgcgcctctatgtgggttccctgcacttcaatatcactgaagacatgctccggggcatctttgagccctttggtaaaattgataatattgtcctgatgaaggactcagatacaggccgctctaaaggttatggtttcatcacgttctctgattctgagtgtgcccggcgggccctggaacagttgaatgggtttgagcttgctggtcgacctatgagggttggccatgtgactgagcgactggatggtggcacagacatcacttttcctgatggggaccaggagctggatctgggatcagcaggtggacgttttcagctcatggcaaaactggcagaaggcgctggaatccaactgccaagcactgctgctgctgctgctgccgccgccgccgcccaggctgctgccttgcaactgaatggagcagttcccttgggggccctgaatccagcagctctgactgctctgagtccagccctgaaccttgcctcccagtgtttccagctctccagcctctttaccccccagaccatgtgagtctcagggtctagctcattctagcctttgattattctctttcctttggcttcccatttacctcttctttccacaggtaaatcagtggcacagtatactgcctccttgtgcctctggatcctgccacttcacatctactcttccatggccccatttctccattttgtggaccaagccatcctgagggcatggacattgtctctgaggaaattggggccacccttaagataccaagaaaagctcctgcccatggtcccactggaaatggactctgctgagcaaagccaccagttgaagagaacagaatccacacctgcattgaatacctgtttctccatgtgtatcgtctctgagattaccttcttgccctttccaacaccttagtgattcctcaatttctcccccattgggaaggccatagggcattaactgaaggaactgacctctctccttttcctgtacctttaacctttagtctgtcaaggaaaacccttaggacctctgaatcaagaggactgagtttgtgggtgaaccttgaaggtgctctttctgctacaagggccctgggagatagcatggacgtgcattgagaagccagcctcagaccttagcttgaagcagcttgaggccagacctactgtagcctcagcatcttgctaggaggcatggaagtgatctatcctgccaggaggcctcagagtgatctgtcctgccaggaggtgtgagagtgatctgtcctgtgaggcatttaggggctttcaggaatttagtaaaaggtggagtatgcctttccagtatcttccatcttcctttgtatacttgtccttcctcccatttcctccctttggcccgaggtaggaggatggagggaggctgctactctaccacttcctgtgtgcctctactgtggcctcaaccctggcaattatagctactcccatcccttacctgggcatgtgtgagcccttctcactggattttatacccttgtgtctgtgtacataaatatatatacatatatatatacataaaaactttgtacaaaag

SEQ ID NO: 428167 - DNA, 2479 bp, Homo sapiens
agcggggggaagggttctggaagacggcagagctgccgccattttgcgggaagaggaggcgctgtacctgcagtgctgcttttcttgcctagactctaggaactatccgagctccactccccacaacatactcaaaggaacggagagaaccgggacccccctgcggggacccggaactgatctgacaggatggcatctgatgactttgacatagtgattgaggccatgctggaagctccctataaaaaagaagaggatgagcaacaaaggaaagaagttaaaaaggattatcctagcaataccaccagcagcaccagcaacagtggcaatgagaccagtggaagcagcaccatcggggagacaagcaagaagaagaggagtcggagccataataaaagcagggatagaaagcgcagtcgtagtcgagatcgggatcggtatagacggagaaatagtcggagccgaagtccaggtcggcagtgtcgtcaccgtagccgtagctgggatcgtcgacatggtagtgagtcgcgaagtcgggaccatcgtcgtgaggatcgtgtgcattacaggagtcctccacttgccactggttataggtatggacacagtaagagtcctcatttcagagagaagagcccagtcagggagccagttgataatctgagtcctgaggagcgtgatgcccgcacagttttctgtatgcagttagctgcccgaattcggcctcgagatctggaggactttttctctgctgtaggcaaggttcgcgatgtacgtatcatctcagatcggaactcacgtcgttctaagggcattgcctacgtggaattctgtgaaatccagtctgtgccactggccattgggctgactgggcagcggttgctgggagtgcctatcattgtacaggcttcacaggcagagaaaaaccgactggcagccatggccaacaacctgcaaaagggcaatggtggaccaatgcgcctctatgtgggttccctgcacttcaatatcactgaagacatgctccggggcatctttgagccctttggtaaaattgataatattgtcctgatgaaggactcagatacaggccgctctaaaggttatggtttcatcacgttctctgattctgagtgtgcccggcgggccctggaacagttgaatgggtttgagcttgctggtcgacctatgagggttggccatgtgactgagcgactggatggtggcacagacatcacttttcctgatggggaccaggagctggatctgggatcagcaggtggacgttttcagctcatggcaaaactggcagaaggcgctggaatccaactgccaagcactgctgctgctgctgctgccgccgccgccgcccaggctgctgccttgcaactgaatggagcagttcccttgggggccctgaatccagcagctctgactgctctgagtccagccctgaaccttgcctcccagtgtttccagctctccagcctctttaccccccagaccatgtaaatcagtggcacagtatactgcctccttgtgcctctggatcctgccacttcacatctactcttccatggccccatttctccattttgtggaccaagccatcctgagggcatggacattgtctctgaggaaattggggccacccttaagataccaagaaaagctcctgcccatggtcccactggaaatggactctgctgagcaaagccaccagttgaagagaacagaatccacacctgcattgaatacctgtttctccatgtgtatcgtctctgagattaccttcttgccctttccaacaccttagtgattcctcaatttctcccccattgggaaggccatagggcattaactgaaggaactgacctctctccttttcctgtacctttaacctttagtctgtcaaggaaaacccttaggacctctgaatcaagaggactgagtttgtgggtgaaccttgaaggtgctctttctgctacaagggccctgggagatagcatggacgtgcattgagaagccagcctcagaccttagcttgaagcagcttgaggccagacctactgtagcctcagcatcttgctaggaggcatggaagtgatctatcctgccaggaggcctcagagtgatctgtcctgccaggaggtgtgagagtgatctgtcctgtgaggcatttaggggctttcaggaatttagtaaaaggtggagtatgcctttccagtatcttccatcttcctttgtatacttgtccttcctcccatttcctccctttggcccgaggtaggaggatggagggaggctgctactctaccacttcctgtgtgcctctactgtggcctcaaccctggcaattatagctactcccatcccttacctgggcatgtgtgagcccttctcactggattttatacccttgtgtctgtgtacataaatatatatacatatatatatacataaaaactttgtacaaaag

SEQ ID NO: 428168 - DNA, 2387 bp, Homo sapiens
tggtgctgctgctgtcctggtggtgctgctgctgcttttcttgcctagactctaggaactatccgagctccactccccacaacatactcaaaggaacggagagaaccgggacccccctgcggggacccggaactgatctgacaggatggcatctgatgactttgacatagtgattgaggccatgctggaagctccctataaaaaagaagaggatgagcaacaaaggaaagaagttaaaaaggattatcctagcaataccaccagcagcaccagcaacagtggcaatgagaccagtggaagcagcaccatcggggagacaagcaatcgtagtcgagatcgggatcggtatagacggagaaatagtcggagccgaagtccaggtcggcagtgtcgtcaccgtagccgtagctgggatcgtcgacatggtagtgagtcgcgaagtcgggaccatcgtcgtgaggatcgtgtgcattacaggagtcctccacttgccactggttataggtatggacacagtaagagtcctcatttcagagagaagagcccagtcagggagccagttgataatctgagtcctgaggagcgtgatgcccgcacagttttctgtatgcagttagctgcccgaattcggcctcgagatctggaggactttttctctgctgtaggcaaggttcgcgatgtacgtatcatctcagatcggaactcacgtcgttctaagggcattgcctacgtggaattctgtgaaatccagtctgtgccactggccattgggctgactgggcagcggttgctgggagtgcctatcattgtacaggcttcacaggcagagaaaaaccgactggcagccatggccaacaacctgcaaaagggcaatggtggaccaatgcgcctctatgtgggttccctgcacttcaatatcactgaagacatgctccggggcatctttgagccctttggtaaaattgataatattgtcctgatgaaggactcagatacaggccgctctaaaggttatggtttcatcacgttctctgattctgagtgtgcccggcgggccctggaacagttgaatgggtttgagcttgctggtcgacctatgagggttggccatgtgactgagcgactggatggtggcacagacatcacttttcctgatggggaccaggagctggatctgggatcagcaggtggacgttttcagctcatggcaaaactggcagaaggcgctggaatccaactgccaagcactgctgctgctgctgctgccgccgccgccgcccaggctgctgccttgcaactgaatggagcagttcccttgggggccctgaatccagcagctctgactgctctgagtccagccctgaaccttgcctcccagtgtttccagctctccagcctctttaccccccagaccatgtaaatcagtggcacagtatactgcctccttgtgcctctggatcctgccacttcacatctactcttccatggccccatttctccattttgtggaccaagccatcctgagggcatggacattgtctctgaggaaattggggccacccttaagataccaagaaaagctcctgcccatggtcccactggaaatggactctgctgagcaaagccaccagttgaagagaacagaatccacacctgcattgaatacctgtttctccatgtgtatcgtctctgagattaccttcttgccctttccaacaccttagtgattcctcaatttctcccccattgggaaggccatagggcattaactgaaggaactgacctctctccttttcctgtacctttaacctttagtctgtcaaggaaaacccttaggacctctgaatcaagaggactgagtttgtgggtgaaccttgaaggtgctctttctgctacaagggccctgggagatagcatggacgtgcattgagaagccagcctcagaccttagcttgaagcagcttgaggccagacctactgtagcctcagcatcttgctaggaggcatggaagtgatctatcctgccaggaggcctcagagtgatctgtcctgccaggaggtgtgagagtgatctgtcctgtgaggcatttaggggctttcaggaatttagtaaaaggtggagtatgcctttccagtatcttccatcttcctttgtatacttgtccttcctcccatttcctccctttggcccgaggtaggaggatggagggaggctgctactctaccacttcctgtgtgcctctactgtggcctcaaccctggcaattatagctactcccatcccttacctgggcatgtgtgagcccttctcactggattttatacccttgtgtctgtgtacataaatatatatacatatatatatacataaaaactttgtacaaaag

SEQ ID NO: 428169 - DNA, 2344 bp, Homo sapiens
aaaagaagaaaaaagaaaaaactaccagcctgaaaatgcatagtgtttgctaccttattgcttttagcacatctagaaagacactaaacccaatctgacaggatggcatctgatgactttgacatagtgattgaggccatgctggaagctccctataaaaaagaagaggatgagcaacaaaggaaagaagttaaaaaggattatcctagcaataccaccagcagcaccagcaacagtggcaatgagaccagtggaagcagcaccatcggggagacaagcaatcgtagtcgagatcgggatcggtatagacggagaaatagtcggagccgaagtccaggtcggcagtgtcgtcaccgtagccgtagctgggatcgtcgacatggtagtgagtcgcgaagtcgggaccatcgtcgtgaggatcgtgtgcattacaggagtcctccacttgccactggttataggtatggacacagtaagagtcctcatttcagagagaagagcccagtcagggagccagttgataatctgagtcctgaggagcgtgatgcccgcacagttttctgtatgcagttagctgcccgaattcggcctcgagatctggaggactttttctctgctgtaggcaaggttcgcgatgtacgtatcatctcagatcggaactcacgtcgttctaagggcattgcctacgtggaattctgtgaaatccagtctgtgccactggccattgggctgactgggcagcggttgctgggagtgcctatcattgtacaggcttcacaggcagagaaaaaccgactggcagccatggccaacaacctgcaaaagggcaatggtggaccaatgcgcctctatgtgggttccctgcacttcaatatcactgaagacatgctccggggcatctttgagccctttggtaaaattgataatattgtcctgatgaaggactcagatacaggccgctctaaaggttatggtttcatcacgttctctgattctgagtgtgcccggcgggccctggaacagttgaatgggtttgagcttgctggtcgacctatgagggttggccatgtgactgagcgactggatggtggcacagacatcacttttcctgatggggaccaggagctggatctgggatcagcaggtggacgttttcagctcatggcaaaactggcagaaggcgctggaatccaactgccaagcactgctgctgctgctgctgccgccgccgccgcccaggctgctgccttgcaactgaatggagcagttcccttgggggccctgaatccagcagctctgactgctctgagtccagccctgaaccttgcctcccagtgtttccagctctccagcctctttaccccccagaccatgtaaatcagtggcacagtatactgcctccttgtgcctctggatcctgccacttcacatctactcttccatggccccatttctccattttgtggaccaagccatcctgagggcatggacattgtctctgaggaaattggggccacccttaagataccaagaaaagctcctgcccatggtcccactggaaatggactctgctgagcaaagccaccagttgaagagaacagaatccacacctgcattgaatacctgtttctccatgtgtatcgtctctgagattaccttcttgccctttccaacaccttagtgattcctcaatttctcccccattgggaaggccatagggcattaactgaaggaactgacctctctccttttcctgtacctttaacctttagtctgtcaaggaaaacccttaggacctctgaatcaagaggactgagtttgtgggtgaaccttgaaggtgctctttctgctacaagggccctgggagatagcatggacgtgcattgagaagccagcctcagaccttagcttgaagcagcttgaggccagacctactgtagcctcagcatcttgctaggaggcatggaagtgatctatcctgccaggaggcctcagagtgatctgtcctgccaggaggtgtgagagtgatctgtcctgtgaggcatttaggggctttcaggaatttagtaaaaggtggagtatgcctttccagtatcttccatcttcctttgtatacttgtccttcctcccatttcctccctttggcccgaggtaggaggatggagggaggctgctactctaccacttcctgtgtgcctctactgtggcctcaaccctggcaattatagctactcccatcccttacctgggcatgtgtgagcccttctcactggattttatacccttgtgtctgtgtacataaatatatatacatatatatatacataaaaactttgtacaaaag

SEQ ID NO: 428170 - DNA, 2375 bp, Homo sapiens
  misc_feature (25)..(25): n is a, c, g, or t
  misc_feature (29)..(29): n is a, c, g, or t
aaaaggccggctggtacggtcgggngtanggatcggcagagctgccgccattttgcgggaagaggaggcgctgtacctgcagtgctgcttttcttgcctagactctaggaactatccgagctccactccccacaacatactcaaaggaacggagagaaccgggacccccctgcggggacccggaactgatctgacaggatggcatctgatgactttgacatagtgattgaggccatgctggaagctccctataaaaaagaagaggaagaagaggagtcggagccataataaaagcagggatagaaagcgcagtcgtagtcgagatcgggatcggtatagacggagaaatagtcggagccgaagtccaggtcggcagtgtcgtcaccgtagccgtagctgggatcgtcgacatggtagtgagtcgcgaagtcgggaccatcgtcgtgaggatcgtgtgcattacaggagtcctccacttgccactggttataggtatggacacagtaagagtcctcatttcagagagaagagcccagtcagggagccagttgataatctgagtcctgaggagcgtgatgcccgcacagttttctgtatgcagttagctgcccgaattcggcctcgagatctggaggactttttctctgctgtaggcaaggttcgcgatgtacgtatcatctcagatcggaactcacgtcgttctaagggcattgcctacgtggaattctgtgaaatccagtctgtgccactggccattgggctgactgggcagcggttgctgggagtgcctatcattgtacaggcttcacaggcagagaaaaaccgactggcagccatggccaacaacctgcaaaagggcaatggtggaccaatgcgcctctatgtgggttccctgcacttcaatatcactgaagacatgctccggggcatctttgagccctttggtaaaattgataatattgtcctgatgaaggactcagatacaggccgctctaaaggttatggtttcatcacgttctctgattctgagtgtgcccggcgggccctggaacagttgaatgggtttgagcttgctggtcgacctatgagggttggccatgtgactgagcgactggatggtggcacagacatcacttttcctgatggggaccaggagctggatctgggatcagcaggtggacgttttcagctcatggcaaaactggcagaaggcgctggaatccaactgccaagcactgctgctgctgctgctgccgccgccgccgcccaggctgctgccttgcaactgaatggagcagttcccttgggggccctgaatccagcagctctgactgctctgagtccagccctgaaccttgcctcccagtgtttccagctctccagcctctttaccccccagaccatgtaaatcagtggcacagtatactgcctccttgtgcctctggatcctgccacttcacatctactcttccatggccccatttctccattttgtggaccaagccatcctgagggcatggacattgtctctgaggaaattggggccacccttaagataccaagaaaagctcctgcccatggtcccactggaaatggactctgctgagcaaagccaccagttgaagagaacagaatccacacctgcattgaatacctgtttctccatgtgtatcgtctctgagattaccttcttgccctttccaacaccttagtgattcctcaatttctcccccattgggaaggccatagggcattaactgaaggaactgacctctctccttttcctgtacctttaacctttagtctgtcaaggaaaacccttaggacctctgaatcaagaggactgagtttgtgggtgaaccttgaaggtgctctttctgctacaagggccctgggagatagcatggacgtgcattgagaagccagcctcagaccttagcttgaagcagcttgaggccagacctactgtagcctcagcatcttgctaggaggcatggaagtgatctatcctgccaggaggcctcagagtgatctgtcctgccaggaggtgtgagagtgatctgtcctgtgaggcatttaggggctttcaggaatttagtaaaaggtggagtatgcctttccagtatcttccatcttcctttgtatacttgtccttcctcccatttcctccctttggcccgaggtaggaggatggagggaggctgctactctaccacttcctgtgtgcctctactgtggcctcaaccctggcaattatagctactcccatcccttacctgggcatgtgtgagcccttctcactggattttatacccttgtgtctgtgtacataaatatatatacatatatatatacataaaaactttgtacaaaag

SEQ ID NO: 428171 - DNA, 2597 bp, Homo sapiens
cgtgcctggtctaattttgtgtttttagtagagacggagtttctccatgttggtcaggctggtctcgaactctcgacctcaggtgatctgcccgccttggcctcccaaagtgctgggattacaggcgtgagccaccgcgcccagccctgggtcttattttttctattaaatgacatatttgtatccattcatctacttctgttcattccacccacagccgccatccttccatccttccatccttcccagcctctagtaaacactagtctttctatcttcatgagattcactttgtacataattggatgtgctgtatttttatacaactgggagtgcagtaggtaatagtttggtttacaccagtatcaccacaaacacataagtaatacattacgacattacagtggctgtaacatcactaggttatacgaacttctcagcaccgttataatcttatgggaccactgttgtatatgcacttggttgttggcctaaacatgatgtgggcatgactgtagttgtttccctctgtagtcgtagtcgagatcgggatcggtatagacggagaaatagtcggagccgaagtccaggtcggcagtgtcgtcaccgtagccgtagctgggatcgtcgacatggtagtgagtcgcgaagtcgggaccatcgtcgtgaggatcgtgtgcattacaggagtcctccacttgccactggttataggtatggacacagtaagagtcctcatttcagagagaagagcccagtcagggagccagttgataatctgagtcctgaggagcgtgatgcccgcacagttttctgtatgcagttagctgcccgaattcggcctcgagatctggaggactttttctctgctgtaggcaaggttcgcgatgtacgtatcatctcagatcggaactcacgtcgttctaagggcattgcctacgtggaattctgtgaaatccagtctgtgccactggccattgggctgactgggcagcggttgctgggagtgcctatcattgtacaggcttcacaggcagagaaaaaccgactggcagccatggccaacaacctgcaaaagggcaatggtggaccaatgcgcctctatgtgggttccctgcacttcaatatcactgaagacatgctccggggcatctttgagccctttggtaaaattgataatattgtcctgatgaaggactcagatacaggccgctctaaaggttatggtttcatcacgttctctgattctgagtgtgcccggcgggccctggaacagttgaatgggtttgagcttgctggtcgacctatgagggttggccatgtgactgagcgactggatggtggcacagacatcacttttcctgatggggaccaggagctggatctgggatcagcaggtggacgttttcagctcatggcaaaactggcagaaggcgctggaatccaactgccaagcactgctgctgctgctgctgccgccgccgccgcccaggctgctgccttgcaactgaatggagcagttcccttgggggccctgaatccagcagctctgactgctctgagtccagccctgaaccttgcctcccagtgtttccagctctccagcctctttaccccccagaccatgtaaatcagtggcacagtatactgcctccttgtgcctctggatcctgccacttcacatctactcttccatggccccatttctccattttgtggaccaagccatcctgagggcatggacattgtctctgaggaaattggggccacccttaagataccaagaaaagctcctgcccatggtcccactggaaatggactctgctgagcaaagccaccagttgaagagaacagaatccacacctgcattgaatacctgtttctccatgtgtatcgtctctgagattaccttcttgccctttccaacaccttagtgattcctcaatttctcccccattgggaaggccatagggcattaactgaaggaactgacctctctccttttcctgtacctttaacctttagtctgtcaaggaaaacccttaggacctctgaatcaagaggactgagtttgtgggtgaaccttgaaggtgctctttctgctacaagggccctgggagatagcatggacgtgcattgagaagccagcctcagaccttagcttgaagcagcttgaggccagacctactgtagcctcagcatcttgctaggaggcatggaagtgatctatcctgccaggaggcctcagagtgatctgtcctgccaggaggtgtgagagtgatctgtcctgtgaggcatttaggggctttcaggaatttagtaaaaggtggagtatgcctttccagtatcttccatcttcctttgtatacttgtccttcctcccatttcctccctttggcccgaggtaggaggatggagggaggctgctactctaccacttcctgtgtgcctctactgtggcctcaaccctggcaattatagctactcccatcccttacctgggcatgtgtgagcccttctcactggattttatacccttgtgtctgtgtacataaatatatatacatatatatatacataaaaactttgtacaaaag

SEQ ID NO: 428172 - DNA, 2251 bp, Homo sapiens
  misc_feature (25)..(25): n is a, c, g, or t
  misc_feature (29)..(29): n is a, c, g, or t
aaaaggccggctggtacggtcgggngtanggatcggcagagctgccgccattttgcgggaagaggaggcgctgtacctgcagtgctgcttttcttgcctagactctaggaactatccgagctccactccccacaacatactcaaaggaacggagagaaccgggacccccctgcggggacccggaactgtcgtagtcgagatcgggatcggtatagacggagaaatagtcggagccgaagtccaggtcggcagtgtcgtcaccgtagccgtagctgggatcgtcgacatggtagtgagtcgcgaagtcgggaccatcgtcgtgaggatcgtgtgcattacaggagtcctccacttgccactggttataggtatggacacagtaagagtcctcatttcagagagaagagcccagtcagggagccagttgataatctgagtcctgaggagcgtgatgcccgcacagttttctgtatgcagttagctgcccgaattcggcctcgagatctggaggactttttctctgctgtaggcaaggttcgcgatgtacgtatcatctcagatcggaactcacgtcgttctaagggcattgcctacgtggaattctgtgaaatccagtctgtgccactggccattgggctgactgggcagcggttgctgggagtgcctatcattgtacaggcttcacaggcagagaaaaaccgactggcagccatggccaacaacctgcaaaagggcaatggtggaccaatgcgcctctatgtgggttccctgcacttcaatatcactgaagacatgctccggggcatctttgagccctttggtaaaattgataatattgtcctgatgaaggactcagatacaggccgctctaaaggttatggtttcatcacgttctctgattctgagtgtgcccggcgggccctggaacagttgaatgggtttgagcttgctggtcgacctatgagggttggccatgtgactgagcgactggatggtggcacagacatcacttttcctgatggggaccaggagctggatctgggatcagcaggtggacgttttcagctcatggcaaaactggcagaaggcgctggaatccaactgccaagcactgctgctgctgctgctgccgccgccgccgcccaggctgctgccttgcaactgaatggagcagttcccttgggggccctgaatccagcagctctgactgctctgagtccagccctgaaccttgcctcccagtgtttccagctctccagcctctttaccccccagaccatgtaaatcagtggcacagtatactgcctccttgtgcctctggatcctgccacttcacatctactcttccatggccccatttctccattttgtggaccaagccatcctgagggcatggacattgtctctgaggaaattggggccacccttaagataccaagaaaagctcctgcccatggtcccactggaaatggactctgctgagcaaagccaccagttgaagagaacagaatccacacctgcattgaatacctgtttctccatgtgtatcgtctctgagattaccttcttgccctttccaacaccttagtgattcctcaatttctcccccattgggaaggccatagggcattaactgaaggaactgacctctctccttttcctgtacctttaacctttagtctgtcaaggaaaacccttaggacctctgaatcaagaggactgagtttgtgggtgaaccttgaaggtgctctttctgctacaagggccctgggagatagcatggacgtgcattgagaagccagcctcagaccttagcttgaagcagcttgaggccagacctactgtagcctcagcatcttgctaggaggcatggaagtgatctatcctgccaggaggcctcagagtgatctgtcctgccaggaggtgtgagagtgatctgtcctgtgaggcatttaggggctttcaggaatttagtaaaaggtggagtatgcctttccagtatcttccatcttcctttgtatacttgtccttcctcccatttcctccctttggcccgaggtaggaggatggagggaggctgctactctaccacttcctgtgtgcctctactgtggcctcaaccctggcaattatagctactcccatcccttacctgggcatgtgtgagcccttctcactggattttatacccttgtgtctgtgtacataaatatatatacatatatatatacataaaaactttgtacaaaag

SEQ ID NO: 428173 - DNA, 2434 bp, Homo sapiens
  misc_feature (25)..(25): n is a, c, g, or t
  misc_feature (29)..(29): n is a, c, g, or t
aaaaggccggctggtacggtcgggngtanggatcggcagagctgccgccattttgcgggaagaggaggcgctgtacctgcagtgctgcttttcttgcctagactctaggaactatccgagctccactccccacaacatactcaaaggaacggagagaaccgggacccccctgcggggacccggaactgatctgacaggatggcatctgatgactttgacatagtgattgaggccatgctggaagctccctataaaaaagaagaggatgagcaacaaaggaaagaagttaaaaaggattatcctagcaataccaccagcagcaccagcaacagtggcaatgagaccagtggaagcagcaccatcggggagacaagcaagaagaagaggagtcggagccataataaaagcagggatagaaagcgcagtcgtagtcgagatcgggatcggtatagacggagaaatagtcggagccgaagtccaggtcggcagtgtcgtcaccgtagccgtagctgggatcgtcgacatggtagtgagtcgcgaagtcgggaccatcgtcgtgaggatcgtgtgcattacaggagtcctccacttgccactggggagccagttgataatctgagtcctgaggagcgtgatgcccgcacagttttctgtatgcagttagctgcccgaattcggcctcgagatctggaggactttttctctgctgtaggcaaggttcgcgatgtacgtatcatctcagatcggaactcacgtcgttctaagggcattgcctacgtggaattctgtgaaatccagtctgtgccactggccattgggctgactgggcagcggttgctgggagtgcctatcattgtacaggcttcacaggcagagaaaaaccgactggcagccatggccaacaacctgcaaaagggcaatggtggaccaatgcgcctctatgtgggttccctgcacttcaatatcactgaagacatgctccggggcatctttgagccctttggtaaaattgataatattgtcctgatgaaggactcagatacaggccgctctaaaggttatggtttcatcacgttctctgattctgagtgtgcccggcgggccctggaacagttgaatgggtttgagcttgctggtcgacctatgagggttggccatgtgactgagcgactggatggtggcacagacatcacttttcctgatggggaccaggagctggatctgggatcagcaggtggacgttttcagctcatggcaaaactggcagaaggcgctggaatccaactgccaagcactgctgctgctgctgctgccgccgccgccgcccaggctgctgccttgcaactgaatggagcagttcccttgggggccctgaatccagcagctctgactgctctgagtccagccctgaaccttgcctcccagtgtttccagctctccagcctctttaccccccagaccatgtaaatcagtggcacagtatactgcctccttgtgcctctggatcctgccacttcacatctactcttccatggccccatttctccattttgtggaccaagccatcctgagggcatggacattgtctctgaggaaattggggccacccttaagataccaagaaaagctcctgcccatggtcccactggaaatggactctgctgagcaaagccaccagttgaagagaacagaatccacacctgcattgaatacctgtttctccatgtgtatcgtctctgagattaccttcttgccctttccaacaccttagtgattcctcaatttctcccccattgggaaggccatagggcattaactgaaggaactgacctctctccttttcctgtacctttaacctttagtctgtcaaggaaaacccttaggacctctgaatcaagaggactgagtttgtgggtgaaccttgaaggtgctctttctgctacaagggccctgggagatagcatggacgtgcattgagaagccagcctcagaccttagcttgaagcagcttgaggccagacctactgtagcctcagcatcttgctaggaggcatggaagtgatctatcctgccaggaggcctcagagtgatctgtcctgccaggaggtgtgagagtgatctgtcctgtgaggcatttaggggctttcaggaatttagtaaaaggtggagtatgcctttccagtatcttccatcttcctttgtatacttgtccttcctcccatttcctccctttggcccgaggtaggaggatggagggaggctgctactctaccacttcctgtgtgcctctactgtggcctcaaccctggcaattatagctactcccatcccttacctgggcatgtgtgagcccttctcactggattttatacccttgtgtctgtgtacataaatatatatacatatatatatacataaaaactttgtacaaaag

SEQ ID NO: 428174 - DNA, 2371 bp, Homo sapiens
caaatgcactatgaaccctgcttgagggtgcttattataacacattgtgattggcaggatactcaggcacagaaagggttggtattcaaaatttactggcgtggtggctcatgcctgtaatcccagcactttgggagactgaggccagaagatcacttgggctcaggaattcaagaccagccaggacaacatggcgaaaccctggttctacaaaaaatgcaaaaatgagctagatatggtcatgtgtgtctgtaatcctagccacacaaggaggctgaggtgggaggattgcttgagcctgggaggcaaaggttgcagtgacccgagatggcgccactgcactccagcctgggtgacagcggaaaccctgtcttaaaaaaacaatgagatgaagtactggaatctggttttctcaccatggaagacccagcattggaccaatgagaataaggtttcaccttttgtttttctctattctttagttataggtatggacacagtaagagtcctcatttcagagagaagagcccagtcagggagccagttgataatctgagtcctgaggagcgtgatgcccgcacagttttctgtatgcagttagctgcccgaattcggcctcgagatctggaggactttttctctgctgtaggcaaggttcgcgatgtacgtatcatctcagatcggaactcacgtcgttctaagggcattgcctacgtggaattctgtgaaatccagtctgtgccactggccattgggctgactgggcagcggttgctgggagtgcctatcattgtacaggcttcacaggcagagaaaaaccgactggcagccatggccaacaacctgcaaaagggcaatggtggaccaatgcgcctctatgtgggttccctgcacttcaatatcactgaagacatgctccggggcatctttgagccctttggtaaaattgataatattgtcctgatgaaggactcagatacaggccgctctaaaggttatggtttcatcacgttctctgattctgagtgtgcccggcgggccctggaacagttgaatgggtttgagcttgctggtcgacctatgagggttggccatgtgactgagcgactggatggtggcacagacatcacttttcctgatggggaccaggagctggatctgggatcagcaggtggacgttttcagctcatggcaaaactggcagaaggcgctggaatccaactgccaagcactgctgctgctgctgctgccgccgccgccgcccaggctgctgccttgcaactgaatggagcagttcccttgggggccctgaatccagcagctctgactgctctgagtccagccctgaaccttgcctcccagtgtttccagctctccagcctctttaccccccagaccatgtaaatcagtggcacagtatactgcctccttgtgcctctggatcctgccacttcacatctactcttccatggccccatttctccattttgtggaccaagccatcctgagggcatggacattgtctctgaggaaattggggccacccttaagataccaagaaaagctcctgcccatggtcccactggaaatggactctgctgagcaaagccaccagttgaagagaacagaatccacacctgcattgaatacctgtttctccatgtgtatcgtctctgagattaccttcttgccctttccaacaccttagtgattcctcaatttctcccccattgggaaggccatagggcattaactgaaggaactgacctctctccttttcctgtacctttaacctttagtctgtcaaggaaaacccttaggacctctgaatcaagaggactgagtttgtgggtgaaccttgaaggtgctctttctgctacaagggccctgggagatagcatggacgtgcattgagaagccagcctcagaccttagcttgaagcagcttgaggccagacctactgtagcctcagcatcttgctaggaggcatggaagtgatctatcctgccaggaggcctcagagtgatctgtcctgccaggaggtgtgagagtgatctgtcctgtgaggcatttaggggctttcaggaatttagtaaaaggtggagtatgcctttccagtatcttccatcttcctttgtatacttgtccttcctcccatttcctccctttggcccgaggtaggaggatggagggaggctgctactctaccacttcctgtgtgcctctactgtggcctcaaccctggcaattatagctactcccatcccttacctgggcatgtgtgagcccttctcactggattttatacccttgtgtctgtgtacataaatatatatacatatatatatacataaaaactttgtacaaaag

SEQ ID NO: 428175 - DNA, 2273 bp, Homo sapiens
  misc_feature (25)..(25): n is a, c, g, or t
  misc_feature (29)..(29): n is a, c, g, or t
aaaaggccggctggtacggtcgggngtanggatcggcagagctgccgccattttgcgggaagaggaggcgctgtacctgcagtgctgcttttcttgcctagactctaggaactatccgagctccactccccacaacatactcaaaggaacggagagaaccgggacccccctgcggggacccggaactgatctgacaggatggcatctgatgactttgacatagtgattgaggccatgctggaagctccctataaaaaagaagagtcgtagtcgagatcgggatcggtatagacggagaaatagtcggagccgaagtccaggtcggcagtgtcgtcaccgtagccgtagctgggatcgtcgacatggtagtgagtcgcgaagtcgggaccatcgtcgtgaggatcgtgtgcattacaggagtcctccacttgccactggggagccagttgataatctgagtcctgaggagcgtgatgcccgcacagttttctgtatgcagttagctgcccgaattcggcctcgagatctggaggactttttctctgctgtaggcaaggttcgcgatgtacgtatcatctcagatcggaactcacgtcgttctaagggcattgcctacgtggaattctgtgaaatccagtctgtgccactggccattgggctgactgggcagcggttgctgggagtgcctatcattgtacaggcttcacaggcagagaaaaaccgactggcagccatggccaacaacctgcaaaagggcaatggtggaccaatgcgcctctatgtgggttccctgcacttcaatatcactgaagacatgctccggggcatctttgagccctttggtaaaattgataatattgtcctgatgaaggactcagatacaggccgctctaaaggttatggtttcatcacgttctctgattctgagtgtgcccggcgggccctggaacagttgaatgggtttgagcttgctggtcgacctatgagggttggccatgtgactgagcgactggatggtggcacagacatcacttttcctgatggggaccaggagctggatctgggatcagcaggtggacgttttcagctcatggcaaaactggcagaaggcgctggaatccaactgccaagcactgctgctgctgctgctgccgccgccgccgcccaggctgctgccttgcaactgaatggagcagttcccttgggggccctgaatccagcagctctgactgctctgagtccagccctgaaccttgcctcccagtgtttccagctctccagcctctttaccccccagaccatgtaaatcagtggcacagtatactgcctccttgtgcctctggatcctgccacttcacatctactcttccatggccccatttctccattttgtggaccaagccatcctgagggcatggacattgtctctgaggaaattggggccacccttaagataccaagaaaagctcctgcccatggtcccactggaaatggactctgctgagcaaagccaccagttgaagagaacagaatccacacctgcattgaatacctgtttctccatgtgtatcgtctctgagattaccttcttgccctttccaacaccttagtgattcctcaatttctcccccattgggaaggccatagggcattaactgaaggaactgacctctctccttttcctgtacctttaacctttagtctgtcaaggaaaacccttaggacctctgaatcaagaggactgagtttgtgggtgaaccttgaaggtgctctttctgctacaagggccctgggagatagcatggacgtgcattgagaagccagcctcagaccttagcttgaagcagcttgaggccagacctactgtagcctcagcatcttgctaggaggcatggaagtgatctatcctgccaggaggcctcagagtgatctgtcctgccaggaggtgtgagagtgatctgtcctgtgaggcatttaggggctttcaggaatttagtaaaaggtggagtatgcctttccagtatcttccatcttcctttgtatacttgtccttcctcccatttcctccctttggcccgaggtaggaggatggagggaggctgctactctaccacttcctgtgtgcctctactgtggcctcaaccctggcaattatagctactcccatcccttacctgggcatgtgtgagcccttctcactggattttatacccttgtgtctgtgtacataaatatatatacatatatatatacataaaaactttgtacaaaag

SEQ ID NO: 428176 - DNA, 2310 bp, Homo sapiens
  misc_feature (25)..(25): n is a, c, g, or t
  misc_feature (29)..(29): n is a, c, g, or t
aaaaggccggctggtacggtcgggngtanggatcggcagagctgccgccattttgcgggaagaggaggcgctgtacctgcagtgctgcttttcttgcctagactctaggaactatccgagctccactccccacaacatactcaaaggaacggagagaaccgggacccccctgcggggacccggaactggatgagcaacaaaggaaagaagttaaaaaggattatcctagcaataccaccagcagcaccagcaacagtggcaatgagaccagtggaagcagcaccatcggggagacaagcaatcgtagtcgagatcgggatcggtatagacggagaaatagtcggagccgaagtccaggtcggcagtgtcgtcaccgtagccgtagctgggatcgtcgacatggtagtgagtcgcgaagtcgggaccatcgtcgtgaggatcgtgtgcattacaggagtcctccacttgccactggggagccagttgataatctgagtcctgaggagcgtgatgcccgcacagttttctgtatgcagttagctgcccgaattcggcctcgagatctggaggactttttctctgctgtaggcaaggttcgcgatgtacgtatcatctcagatcggaactcacgtcgttctaagggcattgcctacgtggaattctgtgaaatccagtctgtgccactggccattgggctgactgggcagcggttgctgggagtgcctatcattgtacaggcttcacaggcagagaaaaaccgactggcagccatggccaacaacctgcaaaagggcaatggtggaccaatgcgcctctatgtgggttccctgcacttcaatatcactgaagacatgctccggggcatctttgagccctttggtaaaattgataatattgtcctgatgaaggactcagatacaggccgctctaaaggttatggtttcatcacgttctctgattctgagtgtgcccggcgggccctggaacagttgaatgggtttgagcttgctggtcgacctatgagggttggccatgtgactgagcgactggatggtggcacagacatcacttttcctgatggggaccaggagctggatctgggatcagcaggtggacgttttcagctcatggcaaaactggcagaaggcgctggaatccaactgccaagcactgctgctgctgctgctgccgccgccgccgcccaggctgctgccttgcaactgaatggagcagttcccttgggggccctgaatccagcagctctgactgctctgagtccagccctgaaccttgcctcccagtgtttccagctctccagcctctttaccccccagaccatgtaaatcagtggcacagtatactgcctccttgtgcctctggatcctgccacttcacatctactcttccatggccccatttctccattttgtggaccaagccatcctgagggcatggacattgtctctgaggaaattggggccacccttaagataccaagaaaagctcctgcccatggtcccactggaaatggactctgctgagcaaagccaccagttgaagagaacagaatccacacctgcattgaatacctgtttctccatgtgtatcgtctctgagattaccttcttgccctttccaacaccttagtgattcctcaatttctcccccattgggaaggccatagggcattaactgaaggaactgacctctctccttttcctgtacctttaacctttagtctgtcaaggaaaacccttaggacctctgaatcaagaggactgagtttgtgggtgaaccttgaaggtgctctttctgctacaagggccctgggagatagcatggacgtgcattgagaagccagcctcagaccttagcttgaagcagcttgaggccagacctactgtagcctcagcatcttgctaggaggcatggaagtgatctatcctgccaggaggcctcagagtgatctgtcctgccaggaggtgtgagagtgatctgtcctgtgaggcatttaggggctttcaggaatttagtaaaaggtggagtatgcctttccagtatcttccatcttcctttgtatacttgtccttcctcccatttcctccctttggcccgaggtaggaggatggagggaggctgctactctaccacttcctgtgtgcctctactgtggcctcaaccctggcaattatagctactcccatcccttacctgggcatgtgtgagcccttctcactggattttatacccttgtgtctgtgtacataaatatatatacatatatatatacataaaaactttgtacaaaag

SEQ ID NO: 428177 - DNA, 1948 bp, Homo sapiens
atgaataaaaggttatttgagccaaattacaggaatgtgtaatacttgagggttagctggagaacaatgaccaggtattgggagggctggtctcaacacatttcactcttcagggagccagttgataatctgagtcctgaggagcgtgatgcccgcacagttttctgtatgcagttagctgcccgaattcggcctcgagatctggaggactttttctctgctgtaggcaaggttcgcgatgtacgtatcatctcagatcggaactcacgtcgttctaagggcattgcctacgtggaattctgtgaaatccagtctgtgccactggccattgggctgactgggcagcggttgctgggagtgcctatcattgtacaggcttcacaggcagagaaaaaccgactggcagccatggccaacaacctgcaaaagggcaatggtggaccaatgcgcctctatgtgggttccctgcacttcaatatcactgaagacatgctccggggcatctttgagccctttggtaaaattgataatattgtcctgatgaaggactcagatacaggccgctctaaaggttatggtttcatcacgttctctgattctgagtgtgcccggcgggccctggaacagttgaatgggtttgagcttgctggtcgacctatgagggttggccatgtgactgagcgactggatggtggcacagacatcacttttcctgatggggaccaggagctggatctgggatcagcaggtggacgttttcagctcatggcaaaactggcagaaggcgctggaatccaactgccaagcactgctgctgctgctgctgccgccgccgccgcccaggctgctgccttgcaactgaatggagcagttcccttgggggccctgaatccagcagctctgactgctctgagtccagccctgaaccttgcctcccagtgtttccagctctccagcctctttaccccccagaccatgtaaatcagtggcacagtatactgcctccttgtgcctctggatcctgccacttcacatctactcttccatggccccatttctccattttgtggaccaagccatcctgagggcatggacattgtctctgaggaaattggggccacccttaagataccaagaaaagctcctgcccatggtcccactggaaatggactctgctgagcaaagccaccagttgaagagaacagaatccacacctgcattgaatacctgtttctccatgtgtatcgtctctgagattaccttcttgccctttccaacaccttagtgattcctcaatttctcccccattgggaaggccatagggcattaactgaaggaactgacctctctccttttcctgtacctttaacctttagtctgtcaaggaaaacccttaggacctctgaatcaagaggactgagtttgtgggtgaaccttgaaggtgctctttctgctacaagggccctgggagatagcatggacgtgcattgagaagccagcctcagaccttagcttgaagcagcttgaggccagacctactgtagcctcagcatcttgctaggaggcatggaagtgatctatcctgccaggaggcctcagagtgatctgtcctgccaggaggtgtgagagtgatctgtcctgtgaggcatttaggggctttcaggaatttagtaaaaggtggagtatgcctttccagtatcttccatcttcctttgtatacttgtccttcctcccatttcctccctttggcccgaggtaggaggatggagggaggctgctactctaccacttcctgtgtgcctctactgtggcctcaaccctggcaattatagctactcccatcccttacctgggcatgtgtgagcccttctcactggattttatacccttgtgtctgtgtacataaatatatatacatatatatatacataaaaactttgtacaaaag

SEQ ID NO: 428178 - DNA, 1784 bp, Homo sapiens
aagctagtaagctcggtgaatcggcagaggtggctcagattgaggacttttctctgctgtaggcaaggttcgcgatgtacgtatcatctcagatcggaactcacgtcgttctaagggcattgcctacgtggaattctgtgaaatccagtctgtgccactggccattgggctgactgggcagcggttgctgggagtgcctatcattgtacaggcttcacaggcagagaaaaaccgactggcagccatggccaacaacctgcaaaagggcaatggtggaccaatgcgcctctatgtgggttccctgcacttcaatatcactgaagacatgctccggggcatctttgagccctttggtaaaattgataatattgtcctgatgaaggactcagatacaggccgctctaaaggttatggtttcatcacgttctctgattctgagtgtgcccggcgggccctggaacagttgaatgggtttgagcttgctggtcgacctatgagggttggccatgtgactgagcgactggatggtggcacagacatcacttttcctgatggggaccaggagctggatctgggatcagcaggtggacgttttcagctcatggcaaaactggcagaaggcgctggaatccaactgccaagcactgctgctgctgctgctgccgccgccgccgcccaggctgctgccttgcaactgaatggagcagttcccttgggggccctgaatccagcagctctgactgctctgagtccagccctgaaccttgcctcccagtgtttccagctctccagcctctttaccccccagaccatgtaaatcagtggcacagtatactgcctccttgtgcctctggatcctgccacttcacatctactcttccatggccccatttctccattttgtggaccaagccatcctgagggcatggacattgtctctgaggaaattggggccacccttaagataccaagaaaagctcctgcccatggtcccactggaaatggactctgctgagcaaagccaccagttgaagagaacagaatccacacctgcattgaatacctgtttctccatgtgtatcgtctctgagattaccttcttgccctttccaacaccttagtgattcctcaatttctcccccattgggaaggccatagggcattaactgaaggaactgacctctctccttttcctgtacctttaacctttagtctgtcaaggaaaacccttaggacctctgaatcaagaggactgagtttgtgggtgaaccttgaaggtgctctttctgctacaagggccctgggagatagcatggacgtgcattgagaagccagcctcagaccttagcttgaagcagcttgaggccagacctactgtagcctcagcatcttgctaggaggcatggaagtgatctatcctgccaggaggcctcagagtgatctgtcctgccaggaggtgtgagagtgatctgtcctgtgaggcatttaggggctttcaggaatttagtaaaaggtggagtatgcctttccagtatcttccatcttcctttgtatacttgtccttcctcccatttcctccctttggcccgaggtaggaggatggagggaggctgctactctaccacttcctgtgtgcctctactgtggcctcaaccctggcaattatagctactcccatcccttacctgggcatgtgtgagcccttctcactggattttatacccttgtgtctgtgtacataaatatatatacatatatatatacataaaaactttgtacaaaag

SEQ ID NO: 428179 - DNA, 1648 bp, Homo sapiens
  misc_feature (24)..(24): n is a, c, g, or t
gaataggctaggtcgaggccgggngttaatcggccgagtgggcagcggttgctgggagtgcctatcattgtacaggcttcacaggcagagaaaaaccgactggcagccatggccaacaacctgcaaaagggcaatggtggaccaatgcgcctctatgtgggttccctgcacttcaatatcactgaagacatgctccggggcatctttgagccctttggtaaaattgataatattgtcctgatgaaggactcagatacaggccgctctaaaggttatggtttcatcacgttctctgattctgagtgtgcccggcgggccctggaacagttgaatgggtttgagcttgctggtcgacctatgagggttggccatgtgactgagcgactggatggtggcacagacatcacttttcctgatggggaccaggagctggatctgggatcagcaggtggacgttttcagctcatggcaaaactggcagaaggcgctggaatccaactgccaagcactgctgctgctgctgctgccgccgccgccgcccaggctgctgccttgcaactgaatggagcagttcccttgggggccctgaatccagcagctctgactgctctgagtccagccctgaaccttgcctcccagtgtttccagctctccagcctctttaccccccagaccatgtaaatcagtggcacagtatactgcctccttgtgcctctggatcctgccacttcacatctactcttccatggccccatttctccattttgtggaccaagccatcctgagggcatggacattgtctctgaggaaattggggccacccttaagataccaagaaaagctcctgcccatggtcccactggaaatggactctgctgagcaaagccaccagttgaagagaacagaatccacacctgcattgaatacctgtttctccatgtgtatcgtctctgagattaccttcttgccctttccaacaccttagtgattcctcaatttctcccccattgggaaggccatagggcattaactgaaggaactgacctctctccttttcctgtacctttaacctttagtctgtcaaggaaaacccttaggacctctgaatcaagaggactgagtttgtgggtgaaccttgaaggtgctctttctgctacaagggccctgggagatagcatggacgtgcattgagaagccagcctcagaccttagcttgaagcagcttgaggccagacctactgtagcctcagcatcttgctaggaggcatggaagtgatctatcctgccaggaggcctcagagtgatctgtcctgccaggaggtgtgagagtgatctgtcctgtgaggcatttaggggctttcaggaatttagtaaaaggtggagtatgcctttccagtatcttccatcttcctttgtatacttgtccttcctcccatttcctccctttggcccgaggtaggaggatggagggaggctgctactctaccacttcctgtgtgcctctactgtggcctcaaccctggcaattatagctactcccatcccttacctgggcatgtgtgagcccttctcactggattttatacccttgtgtctgtgtacataaatatatatacatatatatatacataaaaactttgtacaaaag

SEQ ID NO: 428180 - DNA, 2561 bp, Homo sapiens
agcggggggaagggttctggaagacggcagagctgccgccattttgcgggaagaggaggcgctgtacctgcagtgctgcttttcttgcctagactctaggaactatccgagctccactccccacaacatactcaaaggaacggagagaaccgggacccccctgcggggacccggaactgatctgacaggatggcatctgatgactttgacatagtgattgaggccatgctggaagctccctataaaaaagaagaggatgagcaacaaaggaaagaagttaaaaaggattatcctagcaataccaccagcagcaccagcaacagtggcaatgagaccagtggaagcagcaccatcggggagacaagcaatcgtagtcgagatcgggatcggtatagacggagaaatagtcggagccgaagtccaggtcggcagtgtcgtcaccgtagccgtagctgggatcgtcgacatggtagtgagtcgcgaagtcgggaccatcgtcgtgaggatcgtgtgcattacaggagtcctccacttgccactggttataggtatggacacagtaagagtcctcatttcagagagaagagcccagtcagggagccagttgataatctgagtcctgaggagcgtgatgcccgcacagttttctgtatgcagttagctgcccgaattcggcctcgagatctggaggactttttctctgctgtaggcaaggttcgcgatgtacgtatcatctcagatcggaactcacgtcgttctaagggcattgcctacgtggaattctgtgaaatccagtctgtgccactggccattgggctgactgggcagcggttgctgggagtgcctatcattgtacaggcttcacaggcagagaaaaaccgactggcagccatggccaacaacctgcaaaagggcaatggtggaccaatgcgcctctatgtgggttccctgcacttcaatatcactgaagacatgctccggggcatctttgagccctttggtaaaattgataatattgtcctgatgaaggactcagatacaggccgctctaaaggttatggtttcatcacgttctctgattctgagtgtgcccggcgggccctggaacagttgaatgggtttgagcttgctggtcgacctatgagggttggccatgtgactgagcgactggatggtggcacagacatcacttttcctgatggggaccaggagctggatctgggatcagcaggtggacgttttcagctcatggcaaaactggcagaaggcgctggaatccaactgccaagcactgctgctgctgctgctgccgccgccgccgcccaggctgctgccttgcaactgaatggagcagttcccttgggggccctgaatccagcagctctgactgctctgagtccagccctgaaccttgcctcccagtgtttccagctctccagcctctttaccccccagaccatgtaaatcagtggcacagtatactgcctccttgtgcctctggatcctgccacttcacatctactcttccatggccccatttctccattttgtggaccaagccatcctgagggcatggacattgtctctgaggaaattggggccacccttaagataccaagaaaagctcctgcccatggtcccactggaaatggactctgctgagcaaagccaccagttgaagagaacagaatccacacctgcattgaatacctgtttctccatgtgtatcgtctctgagattaccttcttgccctttccaacaccttagtgattcctcaatttctcccccattgggaaggccatagggcattaactgaaggaactgacctctctccttttcctgtacctttaacctttagtctgtcaaggaaaacccttaggacctctgaatcaagaggactgagtttgtgggtgaaccttgaaggtgctctttctgctacaagggccctgggagatagcatggacgtgcattgagaagccagcctcagaccttagcttgaagcagcttgaggccagacctactgtagcctcagcatcttgctaggaggcatggaagtgatctatcctgccaggaggcctcagagtgatctgtcctgccaggaggtgtgagagtgatctgtcctgtgaggcatttaggggctttcaggaatttagtaaaaggtggagtatgcctttccagtatcttccatcttcctttgtatacttgtccttcctcccatttcctccctttggcccgaggtaggaggatggagggaggctgctactctaccacttcctgtgtgcctctactgtggcctcaaccctggcaattatagctactcccatcccttacctgggcatgtgtgagcccttctcactggattttatacccttgtgtctgtgtacataaatatatatacatatatatatacataaaaactttgtacaaaaggcaagcctcctccttgtggcagctgttgcccatttgtgtgtggtctttgttgtgtgtctgacaacttctcattagcccaacttatgatgtttctagggatataaaacattagtaacatcaagagaaaatt

SEQ ID NO: 428181 - DNA, 1319 bp, Homo sapiens
aagtgtgctgggtgatctagaggatcccggtattgagtggcatgtgactgagcgactggatggtggcacagacatcacttttcctgatggggaccaggagctggatctgggatcagcaggtggacgttttcagctcatggcaaaactggcagaaggcgctggaatccaactgccaagcactgctgctgctgctgctgccgccgccgccgcccaggctgctgccttgcaactgaatggagcagttcccttgggggccctgaatccagcagctctgactgctctgagtccagccctgaaccttgcctcccagtgtttccagctctccagcctctttaccccccagaccatgtaaatcagtggcacagtatactgcctccttgtgcctctggatcctgccacttcacatctactcttccatggccccatttctccattttgtggaccaagccatcctgagggcatggacattgtctctgaggaaattggggccacccttaagataccaagaaaagctcctgcccatggtcccactggaaatggactctgctgagcaaagccaccagttgaagagaacagaatccacacctgcattgaatacctgtttctccatgtgtatcgtctctgagattaccttcttgccctttccaacaccttagtgattcctcaatttctcccccattgggaaggccatagggcattaactgaaggaactgacctctctccttttcctgtacctttaacctttagtctgtcaaggaaaacccttaggacctctgaatcaagaggactgagtttgtgggtgaaccttgaaggtgctctttctgctacaagggccctgggagatagcatggacgtgcattgagaagccagcctcagaccttagcttgaagcagcttgaggccagacctactgtagcctcagcatcttgctaggaggcatggaagtgatctatcctgccaggaggcctcagagtgatctgtcctgccaggaggtgtgagagtgatctgtcctgtgaggcatttaggggctttcaggaatttagtaaaaggtggagtatgcctttccagtatcttccatcttcctttgtatacttgtccttcctcccatttcctccctttggcccgaggtaggaggatggagggaggctgctactctaccacttcctgtgtgcctctactgtggcctcaaccctggcaattatagctactcccatcccttacctgggcatgtgtgagcccttctcactggattttatacccttgtgtctgtgtacataaatatatatacatatatatatacataaaaactttgtacaaaag

SEQ ID NO: 428182 - DNA, 2517 bp, Homo sapiens
  misc_feature (2508)..(2508): n is a, c, g, or t
agcggggggaagggttctggaagacggcagagctgccgccattttgcgggaagaggaggcgctgtacctgcagtgctgcttttcttgcctagactctaggaactatccgagctccactccccacaacatactcaaaggaacggagagaaccgggacccccctgcggggacccggaactgatctgacaggatggcatctgatgactttgacatagtgattgaggccatgctggaagctccctataaaaaagaagaggatgagcaacaaaggaaagaagttaaaaaggattatcctagcaataccaccagcagcaccagcaacagtggcaatgagaccagtggaagcagcaccatcggggagacaagcaatcgtagtcgagatcgggatcggtatagacggagaaatagtcggagccgaagtccaggtcggcagtgtcgtcaccgtagccgtagctgggatcgtcgacatggtagtgagtcgcgaagtcgggaccatcgtcgtgaggatcgtgtgcattacaggagtcctccacttgccactggttataggtatggacacagtaagagtcctcatttcagagagaagagcccagtcagggagccagttgataatctgagtcctgaggagcgtgatgcccgcacagttttctgtatgcagttagctgcccgaattcggcctcgagatctggaggactttttctctgctgtaggcaaggttcgcgatgtacgtatcatctcagatcggaactcacgtcgttctaagggcattgcctacgtggaattctgtgaaatccagtctgtgccactggccattgggctgactgggcagcggttgctgggagtgcctatcattgtacaggcttcacaggcagagaaaaaccgactggcagccatggccaacaacctgcaaaagggcaatggtggaccaatgcgcctctatgtgggttccctgcacttcaatatcactgaagacatgctccggggcatctttgagccctttggtaaaattgataatattgtcctgatgaaggactcagatacaggccgctctaaaggttatggtttcatcacgttctctgattctgagtgtgcccggcgggccctggaacagttgaatgggtttgagcttgctggtcgacctatgagggttggccatgtgactgagcgactggatggtggcacagacatcacttttcctgatggggaccaggagctggatctgggatcagcaggtggacgttttcagctcatggcaaaactggcagaaggcgctggaatccaactgccaagcactgctgctgctgctgctgccgccgccgccgcccaggctgctgccttgcaactgaatggagcagttcccttgggggccctgaatccagcagctctgactgctctgagtccagccctgaaccttgcctcccagtgtttccagctctccagcctctttaccccccagaccatgtaaatcagtggcacagtatactgcctccttgtgcctctggatcctgccacttcacatctactcttccatggccccatttctccattttgtggaccaagccatcctgagggcatggacattgtctctgaggaaattggggccacccttaagataccaagaaaagctcctgcccatggtcccactggaaatggactctgctgagcaaagccaccagttgaagagaacagaatccacacctgcattgaatacctgtttctccatgtgtatcgtctctgagattaccttcttgccctttccaacaccttagtgattcctcaatttctcccccattgggaaggccatagggcattaactgaaggaactgacctctctccttttcctgtacctttaacctttagtctgtcaaggaaaacccttaggacctctgaatcaagaggactgagtttgtgggtgaaccttgaaggtgctctttctgctacaagggccctgggagatagcatggacgtgcattgagaagccagcctcagaccttagcttgaagcagcttgaggccagacctactgtagcctcagcatcttgctaggaggcatggaagtgatctatcctgccaggaggcctcagagtgatctgtcctgccaggaggtgtgagagtgatctgtcctgtgaggcatttaggggctttcaggaatttagtaaaaggtggagtatgcctttccagtatcttccatcttcctttgtatacttgtccttcctcccatttcctccctttggcccgaggtaggaggatggagggaggctgctactctaccacttcctgtgtgcctctactgtggcctcaaccctggcaattatagctactcccatcccttacctgggcatgtgtgagcccttctcactggattttatacccttgtgtctgtgtacataaatatatatacatatatatatacataaaaactttgtacaaaagaaataaaaaaaataaacgggcggccgctttctagagatatgccctcgaagggcccaagcatatacgcggtacccagnctttctatg

SEQ ID NO: 428183 - DNA, 1361 bp, Homo sapiens
agagccaacaactgcctgcgagcagccttggaggcgtcacagtaaggcatgaatgttgggtgacagggcctcacgtcgttgcacaggctggtttgagtacctggggtcaagcaatccttctgctgtggccgccgggccagtactggatctgggatcagcaggtggacgttttcagctcatggcaaaactggcagaaggcgctggaatccaactgccaagcactgctgctgctgctgctgccgccgccgccgcccaggctgctgccttgcaactgaatggagcagttcccttgggggccctgaatccagcagctctgactgctctgagtccagccctgaaccttgcctcccagtgtttccagctctccagcctctttaccccccagaccatgtaaatcagtggcacagtatactgcctccttgtgcctctggatcctgccacttcacatctactcttccatggccccatttctccattttgtggaccaagccatcctgagggcatggacattgtctctgaggaaattggggccacccttaagataccaagaaaagctcctgcccatggtcccactggaaatggactctgctgagcaaagccaccagttgaagagaacagaatccacacctgcattgaatacctgtttctccatgtgtatcgtctctgagattaccttcttgccctttccaacaccttagtgattcctcaatttctcccccattgggaaggccatagggcattaactgaaggaactgacctctctccttttcctgtacctttaacctttagtctgtcaaggaaaacccttaggacctctgaatcaagaggactgagtttgtgggtgaaccttgaaggtgctctttctgctacaagggccctgggagatagcatggacgtgcattgagaagccagcctcagaccttagcttgaagcagcttgaggccagacctactgtagcctcagcatcttgctaggaggcatggaagtgatctatcctgccaggaggcctcagagtgatctgtcctgccaggaggtgtgagagtgatctgtcctgtgaggcatttaggggctttcaggaatttagtaaaaggtggagtatgcctttccagtatcttccatcttcctttgtatacttgtccttcctcccatttcctccctttggcccgaggtaggaggatggagggaggctgctactctaccacttcctgtgtgcctctactgtggcctcaaccctggcaattatagctactcccatcccttacctgggcatgtgtgagcccttctcactggattttatacccttgtgtctgtgtacataaatatatatacatatatatatacataaaaactttgtacaaaag

SEQ ID NO: 428184 - DNA, 1273 bp, Homo sapiens
atggtgacacgtgattagctggaagctcgcacgtccgtactggcccggccagtactggatctgggatcagcaggtggacgttttcagctcatggcaaaactggcagaaggcgctggaatccaactgccaagcactgctgctgctgctgctgccgccgccgccgcccaggctgctgccttgcaactgaatggagcagttcccttgggggccctgaatccagcagctctgactgctctgagtccagccctgaaccttgcctcccagtgtttccagctctccagcctctttaccccccagaccatgtaaatcagtggcacagtatactgcctccttgtgcctctggatcctgccacttcacatctactcttccatggccccatttctccattttgtggaccaagccatcctgagggcatggacattgtctctgaggaaattggggccacccttaagataccaagaaaagctcctgcccatggtcccactggaaatggactctgctgagcaaagccaccagttgaagagaacagaatccacacctgcattgaatacctgtttctccatgtgtatcgtctctgagattaccttcttgccctttccaacaccttagtgattcctcaatttctcccccattgggaaggccatagggcattaactgaaggaactgacctctctccttttcctgtacctttaacctttagtctgtcaaggaaaacccttaggacctctgaatcaagaggactgagtttgtgggtgaaccttgaaggtgctctttctgctacaagggccctgggagatagcatggacgtgcattgagaagccagcctcagaccttagcttgaagcagcttgaggccagacctactgtagcctcagcatcttgctaggaggcatggaagtgatctatcctgccaggaggcctcagagtgatctgtcctgccaggaggtgtgagagtgatctgtcctgtgaggcatttaggggctttcaggaatttagtaaaaggtggagtatgcctttccagtatcttccatcttcctttgtatacttgtccttcctcccatttcctccctttggcccgaggtaggaggatggagggaggctgctactctaccacttcctgtgtgcctctactgtggcctcaaccctggcaattatagctactcccatcccttacctgggcatgtgtgagcccttctcactggattttatacccttgtgtctgtgtacataaatatatatacatatatatatacataaaaactttgtacaaaag

SEQ ID NO: 428185 - DNA, 1637 bp, Homo sapiens
agcggggggaagggttctggaagacggcagagctgccgccattttgcgggaagaggaggcgctgtacctgcagtgctgcttttcttgcctagactctaggaactatccgagctccactccccacaacatactcaaaggaacggagagaaccgggacccccctgcggggacccggaactgatctgacaggatggcatctgatgactttgacatagtgattgaggccatgctggaagctccctataaaaaagaagaggatgagcaacaaaggaaagaagttaaaaaggattatcctagcaataccaccagcagcaccagcaacagtggcaatgagaccagtggaagcagcaccatcggggagacaagcaatcgtagtcgagatcgggatcggtatagacggagaaatagtcggagccgaagtccaggtcggcagtgtcgtcaccgtagccgtagctgggatcgtcgacatggtagtgagtcgcgaagtcgggaccatcgtcgtgaggatcgtgtgcattacaggagtcctccacttgccactggttataggtatggacacagtaagagtcctcatttcagagagaagagcccagtcagctctgagtccagccctgaaccttgcctcccagtgtttccagctctccagcctctttaccccccagaccatgtaaatcagtggcacagtatactgcctccttgtgcctctggatcctgccacttcacatctactcttccatggccccatttctccattttgtggaccaagccatcctgagggcatggacattgtctctgaggaaattggggccacccttaagataccaagaaaagctcctgcccatggtcccactggaaatggactctgctgagcaaagccaccagttgaagagaacagaatccacacctgcattgaatacctgtttctccatgtgtatcgtctctgagattaccttcttgccctttccaacaccttagtgattcctcaatttctcccccattgggaaggccatagggcattaactgaaggaactgacctctctccttttcctgtacctttaacctttagtctgtcaaggaaaacccttaggacctctgaatcaagaggactgagtttgtgggtgaaccttgaaggtgctctttctgctacaagggccctgggagatagcatggacgtgcattgagaagccagcctcagaccttagcttgaagcagcttgaggccagacctactgtagcctcagcatcttgctaggaggcatggaagtgatctatcctgccaggaggcctcagagtgatctgtcctgccaggaggtgtgagagtgatctgtcctgtgaggcatttaggggctttcaggaatttagtaaaaggtggagtatgcctttccagtatcttccatcttcctttgtatacttgtccttcctcccatttcctccctttggcccgaggtaggaggatggagggaggctgctactctaccacttcctgtgtgcctctactgtggcctcaaccctggcaattatagctactcccatcccttacctgggcatgtgtgagcccttctcactggattttatacccttgtgtctgtgtacataaatatatatacatatatatatacataaaaactttgtacaaaag

SEQ ID NO: 428186 - DNA, 2404 bp, Homo sapiens
agcggggggaagggttctggaagacggcagagctgccgccattttgcgggaagaggaggcgctgtacctgcagtgctgcttttcttgcctagactctaggaactatccgagctccactccccacaacatactcaaaggaacggagagaaccgggacccccctgcggggacccggaactgatctgacaggatggcatctgatgactttgacatagtgattgaggccatgctggaagctccctataaaaaagaagaggatgagcaacaaaggaaagaagttaaaaaggattatcctagcaataccaccagcagcaccagcaacagtggcaatgagaccagtggaagcagcaccatcggggagacaagcaatcgtagtcgagatcgggatcggtatagacggagaaatagtcggagccgaagtccaggtcggcagtgtcgtcaccgtagccgtagctgggatcgtcgacatggtagtgagtcgcgaagtcgggaccatcgtcgtgaggatcgtgtgcattacaggagtcctccacttgccactggttataggtatggacacagtaagagtcctcatttcagagagaagagcccagtcagggagccagttgataatctgagtcctgaggagcgtgatgcccgcacagttttctgtatgcagttagctgcccgaattcggcctcgagatctggaggactttttctctgctgtaggcaaggttcgcgatgtacgtatcatctcagatcggaactcacgtcgttctaagggcattgcctacgtggaattctgtgaaatccagtctgtgccactggccattgggctgactgggcagcggttgctgggagtgcctatcattgtacaggcttcacaggcagagaaaaaccgactggcagccatggccaacaacctgcaaaagggcaatggtggaccaatgcgcctctatgtgggttccctgcacttcaatatcactgaagacatgctccggggcatctttgagccctttggtaaaattgataatattgtcctgatgaaggactcagatacaggccgctctaaaggttatggtttcatcacgttctctgattctgagtgtgcccggcgggccctggaacagttgaatgggtttgagcttgctggtcgacctatgagggttggccatgtgactgagcgactggatggtggcacagacatcacttttcctgatggggaccaggagctggatctgggatcagcaggtggacgttttcagctcatggcaaaactggcagaaggcgctggaatccaactgccaagcactgctgctgctgctgctgccgccgccgccgcccaggctgctgccttgcaactgaatggagcagttcccttgggggccctgaatccagcagctctgactgctctgagtccagccctgaaccttgcctcccagtgtttccagctctccagcctctttaccccccagaccatgtaaatcagtggcacagtatactgcctccttgtgcctctggatcctgccacttcacatctactcttccatggccccatttctccattttgtggaccaagccatcctgagggcatggacattgtctctgaggaaattggggccacccttaagataccaagaaaagctcctgcccatggtcccactggaaatggactctgctgagcaaagccaccagttgaagagaacagaatccacacctgcattgaatacctgtttctccatgtgtatcgtctctgagattaccttcttgccctttccaacaccttagtgattcctcaatttctcccccattgggaaggccatagggcattaactgaaggaactgacctctctccttttcctgtacctttaacctttagtctgtcaaggaaaacccttaggacctctgaatcaagaggactgagtttgtgggtgaaccttgaaggtgctctttctgctacaagggccctgggagatagcatggacgtgcattgagaagccagcctcagaccttagcttgaagcagcttgaggccagacctactgtagcctcagcatcttgctaggaggcatggaagtgatctatcctgccaggaggcctcagaagtgatctgtcctgtgaggcatttaggggctttcaggaatttagtaaaaggtggagtatgcctttccagtatcttccatcttcctttgtatacttgtccttcctcccatttcctccctttggcccgaggtaggaggatggagggaggctgctactctaccacttcctgtgtgcctctactgtggcctcaaccctggcaattatagctactcccatcccttacctgggcatgtgtgagcccttctcactggattttatacccttgtgtctgtgtacataaatatatatacatatatatatacataaaaactttgtacaaaag

SEQ ID NO: 428187 - DNA, 2377 bp, Homo sapiens
agcggggggaagggttctggaagacggcagagctgccgccattttgcgggaagaggaggcgctgtacctgcagtgctgcttttcttgcctagactctaggaactatccgagctccactccccacaacatactcaaaggaacggagagaaccgggacccccctgcggggacccggaactgatctgacaggatggcatctgatgactttgacatagtgattgaggccatgctggaagctccctataaaaaagaagaggatgagcaacaaaggaaagaagttaaaaaggattatcctagcaataccaccagcagcaccagcaacagtggcaatgagaccagtggaagcagcaccatcggggagacaagcaatcgtagtcgagatcgggatcggtatagacggagaaatagtcggagccgaagtccaggtcggcagtgtcgtcaccgtagccgtagctgggatcgtcgacatggtagtgagtcgcgaagtcgggaccatcgtcgtgaggatcgtgtgcattacaggagtcctccacttgccactggttataggtatggacacagtaagagtcctcatttcagagagaagagcccagtcagggagccagttgataatctgagtcctgaggagcgtgatgcccgcacagttttctgtatgcagttagctgcccgaattcggcctcgagatctggaggactttttctctgctgtaggcaaggttcgcgatgtacgtatcatctcagatcggaactcacgtcgttctaagggcattgcctacgtggaattctgtgaaatccagtctgtgccactggccattgggctgactgggcagcggttgctgggagtgcctatcattgtacaggcttcacaggcagagaaaaaccgactggcagccatggccaacaacctgcaaaagggcaatggtggaccaatgcgcctctatgtgggttccctgcacttcaatatcactgaagacatgctccggggcatctttgagccctttggtaaaattgataatattgtcctgatgaaggactcagatacaggccgctctaaaggttatggtttcatcacgttctctgattctgagtgtgcccggcgggccctggaacagttgaatgggtttgagcttgctggtcgacctatgagggttggccatgtgactgagcgactggatggtggcacagacatcacttttcctgatggggaccaggagctggatctgggatcagcaggtggacgttttcagctcatggcaaaactggcagaaggcgctggaatccaactgccaagcactgctgctgctgctgctgccgccgccgccgcccaggctgctgccttgcaactgaatggagcagttcccttgggggccctgaatccagcagctctgactgctctgagtccagccctgaaccttgcctcccagtgtttccagctctccagcctctttaccccccagaccatgtaaatcagtggcacagtatactgcctccttgtgcctctggatcctgccacttcacatctactcttccatggccccatttctccattttgtggaccaagccatcctgagggcatggacattgtctctgaggaaattggggccacccttaagataccaagaaaagctcctgcccatggtcccactggaaatggactctgctgagcaaagccaccagttgaagagaacagaatccacacctgcattgaatacctgtttctccatgtgtatcgtctctgagattaccttcttgccctttccaacaccttagtgattcctcaatttctcccccattgggaaggccatagggcattaactgaaggaactgacctctctccttttcctgtacctttaacctttagtctgtcaaggaaaacccttaggacctctgaatcaagaggactgagtttgtgggtgaaccttgaaggtgctctttctgctacaagggccctgggagatagcatggacgtgcattgagaagccagcctcagaccttagcttgaagcagcttgaggccagacctactgtagcctcagcatcttgctaggaggcatggaagtgatctatcctgccaggaggcctcagagtgatctgtcctgccaggaggtgtgagagtgatctgtcctgtgaggcatttaggggctttcaggaatttagtttcctcccatttcctccctttggcccgaggtaggaggatggagggaggctgctactctaccacttcctgtgtgcctctactgtggcctcaaccctggcaattatagctactcccatcccttacctgggcatgtgtgagcccttctcactggattttatacccttgtgtctgtgtacataaatatatatacatatatatatacataaaaactttgtacaaaag

SEQ ID NO: 428188 - DNA, 1635 bp, Homo sapiens
agcggggggaagggttctggaagacggcagagctgccgccattttgcgggaagaggaggcgctgtacctgcagtgctgcttttcttgcctagactctaggaactatccgagctccactccccacaacatactcaaaggaacggagagaaccgggacccccctgcggggacccggaactgatctgacaggatggcatctgatgactttgacatagtgattgaggccatgctggaagctccctataaaaaagaagaggatgagcaacaaaggaaagaagttaaaaaggattatcctagcaataccaccagcagcaccagcaacagtggcaatgagaccagtggaagcagcaccatcggggagacaagcaatcgtagtcgagatcgggatcggtatagacggagaaatagtcggagccgaagtccaggtcggcagtgtcgtcaccgtagccgtagctgggatcgtcgacatggtagtgagtcgcgaagtcgggaccatcgtcgtgaggatcgtgtgcattacaggagtcctccacttgccactggttataggtatggacacagtaagagtcctcatttcagagagaagagcccagtcagggagccagttgataatctgagtcctgaggagcgtgatgcccgcacagttttctgtatgcagttagctgcccgaattcggcctcgagatctggaggactttttctctgctgtaggcaaggttcgcgatgtacgtatcatctcagatcggaactcacgtcgttctaagggcattgcctacgtggaattctgtgaaatccagtctgtgccactggccattgggctgactgggcagcggttgctgggagtgcctatcattgtacaggcttcacaggcagagaaaaaccgactggcagccatggccaacaacctgcaaaagggcaatggtggaccaatgcgcctctatgtgggttccctgcacttcaatatcactgaagacatgctccggggcatctttgagccctttggtaaaattgataatattgtcctgatgaaggactcagatacaggccgctctaaaggttatggtttcatcacgttctctgattctgagtgtgcccggcgggccctggaacagttgaatgggtttgagcttgctggtcgacctatgagggttggccatgtgactgagcgactggatggtggcacagacatcacttttcctgatggggaccaggagctggatctgggatcagcaggtggacgttttcagctcatggcaaaactggcagaaggcgctggaatccaactgccaagcactgctgctgctgctgctgccgccgccgccgcccaggctgctgccttgcaactgaatggagcagttcccttgggggccctgaatccagcagctctgactgctctgagtccagccctgaaccttgcctcccagtgtttccagctctccagcctctttaccccccagaccatgtaaatcagtggcacagtatactgcctccttgtgcctctggatcctgccacttcacatctactcttccatggccccatttctccattttgtggaccaagccatcctgagggtggcttgtccgggggattgggggccccttagtacagaaagtcctcggctggcctgggaggactg

SEQ ID NO: 428189 - DNA, 1553 bp, Homo sapiens
agcggggggaagggttctggaagacggcagagctgccgccattttgcgggaagaggaggcgctgtacctgcagtgctgcttttcttgcctagactctaggaactatccgagctccactccccacaacatactcaaaggaacggagagaaccgggacccccctgcggggacccggaactgatctgacaggatggcatctgatgactttgacatagtgattgaggccatgctggaagctccctataaaaaagaagaggatgagcaacaaaggaaagaagttaaaaaggattatcctagcaataccaccagcagcaccagcaacagtggcaatgagaccagtggaagcagcaccatcggggagacaagcaatcgtagtcgagatcgggatcggtatagacggagaaatagtcggagccgaagtccaggtcggcagtgtcgtcaccgtagccgtagctgggatcgtcgacatggtagtgagtcgcgaagtcgggaccatcgtcgtgaggatcgtgtgcattacaggagtcctccacttgccactggttataggtatggacacagtaagagtcctcatttcagagagaagagcccagtcagggagccagttgataatctgagtcctgaggagcgtgatgcccgcacagttttctgtatgcagttagctgcccgaattcggcctcgagatctggaggactttttctctgctgtaggcaaggttcgcgatgtacgtatcatctcagatcggaactcacgtcgttctaagggcattgcctacgtggaattctgtgaaatccagtctgtgccactggccattgggctgactgggcagcggttgctgggagtgcctatcattgtacaggcttcacaggcagagaaaaaccgactggcagccatggccaacaacctgcaaaagggcaatggtggaccaatgcgcctctatgtgggttccctgcacttcaatatcactgaagacatgctccggggcatctttgagccctttggtaaaattgataatattgtcctgatgaaggactcagatacaggccgctctaaaggttatggtttcatcacgttctctgattctgagtgtgcccggcgggccctggaacagttgaatgggtttgagcttgctggtcgacctatgagggttggccatgtgactgagcgactggatggtggcacagacatcacttttcctgatggggaccaggagctggatctgggatcagcaggtggacgttttcagctcatggcaaaactggcagaaggcgctggaatccaactgccaagcactgctgctgctgctgctgccgccgccgccgcccaggctgctgccttgcaactgaatggagcagttcccttgggggccctgaatccagcagctctgactgctctgagtccagccctgaaccttgcctcccagtgtttccagctctccagcctctttaccccccagaccatgtaaatcagtggcacagtatactgcctccttgtgcctctggatcctgccacttcacatgccactcaataccgggatcctctaggtacctcagc

SEQ ID NO: 428190 - DNA, 665 bp, Homo sapiens
tggtgctgctgctgtcctggtggtgctgctgctgcttttcttgcctagactctaggaactatccgagctccactccccacaacatactcaaaggaacggagagaaccgggacccccctgcggggacccggaactgatctgacaggatggcatctgatgactttgacatagtgattgaggccatgctggaagctccctataaaaaagaagaggatgagcaacaaaggaaagaagttaaaaaggattatcctagcaataccaccagcagcaccagcaacagtggcaatgagaccagtggaagcagcaccatcggggagacaagcaagaagaagaggagtcggagccataataaaagcagggatagaaagcgcaggtcagtaattctgggccaggcacagtggctcgtatctttaatcctagcactttggaagccaaggcgggaggatcacttcaggccaggagttcaaaaccagcctgggcaacatagcaaaatcctgtctctacaaaaaatttaaaaattacccaggtgtagtagtacatgtttgtactcccagctacttgggaggctaaggctggaggattgcttgggcccaggagttcgaggttgcagtgagccgagattgcagcactaaactcctgcctgggcaacagatggagaacctgtct

SEQ ID NO: 428191 - DNA, 408 bp, Homo sapiens
  misc_feature (25)..(25): n is a, c, g, or t
  misc_feature (29)..(29): n is a, c, g, or t
aaaaggccggctggtacggtcgggngtanggatcggcagagctgccgccattttgcgggaagaggaggcgctgtacctgcagtgctgcttttcttgcctagactctaggaactatccgagctccactccccacaacatactcaaaggaacggagagaaccgggacccccctgcggggacccggaactggatggaagaaaacatactctatgtggatgagattgagtggaccttgacccataagttgggacatgaagagagcgtttgaaaactaccaacctgggccgggtgcagtggctcacgcctgtaatcccagcactttgggtggccgaggcgggcggatcacgaggtcaggagatcgcgaccatcctggctaacacggcgaaaccccgtctctactaaaaataca

SEQ ID NO: 428192 - DNA, 247 bp, Homo sapiens
aaggtttgggggtctggaaagaaggagtgcgcggtgcttgctcactcactctgcctgtctttgttctagctctgagtccagccctgaaccttgcctcccagtgtttccagctctccagcctctttaccccccagaccatgtgagtctcagggtctagctcattctagcctttgattattctctttcctttggcttcccatttacctcttctttccacaggtaaatcagtggcacagtatactgcctc

SEQ ID NO: 428193 - DNA, 480 bp, Homo sapiens
atggcatctgatgactttgacatagtgattgaggccatgctggaagctccctataaaaaagaagaggtaatattttccacctcactcctggaattgggttaatgagaaagagtagttgtcgatcatcactttcaactttcaacattttatgaatcctctttccctgcttatttattatgtagaataactaatcataaaaggcatagtcttagtaagctttgctggagactatggttaagagccatacttttagagacaacctcagaaaccggagtgggcacataatgtggtgttggtaatctgtgctttgctcaaaactcgaagtgacacagtagaaagtcactgtacctcagacctagcaccaatttcttttttttttcttttgagacagagtctcgctctgttgccaggctggagtgcagtggcacaatcttggctcactgcaacctccgcctcctgggttcaagccattctcatgcc

SEQ ID NO: 428194 - DNA, 161 bp, Homo sapiens
acttttcctgatggggaccaggagctggatctgggatcagcaggtggacgttttcagctcatggcaaaactggcagaaggtaaaatatctccgcaaggtgaagattatggggttgaattttagatgaagggttggggcttaatcccaccttttcttttcct

SEQ ID NO: 428195 - DNA, 437 bp, Homo sapiens
ggatttcttttgcgtcctggataggttcgcgatgtacgtatcatctcagatcggaactcacgtcgttctaagggcattgcctacgtggaattctgtgaaatccagtctgtgccactggccattgggctgactgggcagcggttgctgggagtgcctatcattgtacaggcttcacaggtgagcaggctgagaaacagacataagattttaaggggagagggaatgtgggacatgacccatcatttcctccttcacaggcagagaaaaaccgactggcagccatggccaacaacctgcaaaagggcaatggtggaccaatgcgcctctatgtgggttccctgcacttcaatatcactgaagacatgctccggggcatctttgagccctttggtaaagtgagtagaagtgagagaaacctctgaagggaattggaagaa

SEQ ID NO: 428196 - DNA, 1351 bp, Homo sapiens
agcggggggaagggttctggaagacggcagagctgccgccattttgcgggaagaggaggcgctgtacctgcagtgctgcttttcttgcctagactctaggaactatccgagctccactccccacaacatactcaaaggaacggagagaaccgggacccccctgcggggacccggaactgatctgacaggatggcatctgatgactttgacatagtgattgaggccatgctggaagctccctataaaaaagaagaggatgagcaacaaaggaaagaagttaaaaaggattatcctagcaataccaccagcagcaccagcaacagtggcaatgagaccagtggaagcagcaccatcggggagacaagcaatcgtagtcgagatcgggatcggtatagacggagaaatagtcggagccgaagtccaggtcggcagtgtcgtcaccgtagccgtagctgggatcgtcgacatggtagtgagtcgcgaagtcgggaccatcgtcgtgaggatcgtgtgcattacaggagtcctccacttgccactggttataggtatggacacagtaagagtcctcatttcagagagaagagcccagtcagggagccagttgataatctgagtcctgaggagcgtgatgcccgcacagttttctgtatgcagttagctgcccgaattcggcctcgagatctggaggactttttctctgctgtaggcaaggttcgcgatgtacgtatcatctcagatcggaactcacgtcgttctaagggcattgcctacgtggaattctgtgaaatccagtctgtgccactggccattgggctgactgggcagcggttgctgggagtgcctatcattgtacaggcttcacaggcagagaaaaaccgactggcagccatggccaacaacctgcaaaagggcaatggtggaccaatgcgcctctatgtgggttccctgcacttcaatatcactgaagacatgctccggggcatctttgagccctttggtaaagtgagtagaagtgagagaaacctctgaagggaattggaagaagtggggagggtgagtgtttgagtgtacttctctgttgtgcctggccgtgattaacttgctgcatacgtcatagtgggcatatgagtctatgctgtgaaagtttggctccatctctgttcatgtgcttggtggacaaataagttagacacaaatcaaataataggccaggttaagaaagattaaaaaatacaaaaattagccaatgtggtggtgcacgcctatagtcccaactagtcgagaggctgaggtgggagggtcacttgagcctgggaggtcaaggctgtagtgagcctcggaaaaaaaa

SEQ ID NO: 428197 - DNA, 447 bp, Homo sapiens
tagcttagcttgtatctccctttatgcctaactcaggatttcttttgcgtcctggataggttcgcgatgtacgtatcatctcagatcggaactcacgtcgttctaagggcattgcctacgtggaattctgtgaaatccagtctgtgccactggccattgggctgactgggcagcggttgctgggagtgcctatcattgtacaggcttcacaggtgagcaggctgagaaacagacataagattttaaggggagagggaatgtgggacatgacccatcatttcctccttcacaggcagagaaaaaccgactggcagccatggccaacaacctgcaaaagggcaatggtggaccaatgcgcctctatgtgggttccctgcacttcaatatcactgaagacatgctccggggcatctttgagccctttggtaaagtgagtagaagtgagag

SEQ ID NO: 428198 - DNA, 516 bp, Homo sapiens
tgtctcatgcacaagccccaggctggtgtggagggcacagaagccatgcatctgcggaagtccctccgccagagcccaggcagcctgaaggccgtcctgaagacaatggaggagaagcagatcccggatgtggaaaccttcaggaatcttctgcccttgatgctccagatcgacccctcggatcgaataacgataaagtgagctcagggtcggggtttattttaacctgtggatttatctttcaacatctctccaccctaatacaagcacagctagttggctttgtaacgcctcaaagaactccatcacagatgccctgattatccctgcacagctgggctttgcccagttctggctctcccaaaccgtgctgcggcgagtaatcccgaatgtacggtggagtgagcagactgacccccaggaggcacaggaggcgtagcccccaggacccacgacacttttagggttccagaaaaaagttttcattctacataaaaaaaaaaattcctaaagaca

SEQ ID NO: 428199 - DNA, 1231 bp, Homo sapiens
tggatggatggatggggtgtgcgtggatggatgggtggacagacgggcagatggttggttctattggaggtgtagatggcatgcgtccttggagtccagccctttactgttgggctggggaatggaggtccagagaaggaggggctgcctgaagccaaccagggactgatggactcagaggagtctgctcttttgcctccctgtctggggttccagttgagaaagtagggcagagcaactgtaactttgcccccaaggtcctgacatttagaaggggcaagaagtttagaggggtgcacagtttcttggcacgtgcctcttccaactccttctacagccatccagggcacacagacacaccacctatatgggccagcctggtgggcacccaccaagatggacagcttcagtggctccagatcaacacaaagctcccgctgattggggcctcttcctccccacagttaatattctccacctcttctgagaagaggacctgcagggcttgtgtttcaagctgcttgcggggggccaccaaaggggatacagtgctgggcagggtgactctgtcaagcccctgcccccagggagcaaaggactcagggatcccaccttgcttttaccaacagacccctttcgtaagtcctggatggcccctgaagccctcaacttctccttcagccagaaatcagacatctggtccctgggctgcatcattctggacatgaccagctgctccttcatggatggcacagaagccatgcatctgcggaagtccctccgccagagcccaggcagcctgaaggccgtcctgaagacaatggaggagaagcagatcccggatgtggaaaccttcaggaatcttctgcccttgatgctccagatcgacccctcggatcgaataacgataaagtgagctcagggtcggggtttattttaacctgtggatttatctttcaacatctctccaccctaatacaagcacagctagttggctttgtaacgcctcaaagaactccatcacagatgccctgattatccctgcacagctgggctttgcccagttctggctctcccaaaccgtgctgcggcgagtaatcccgaatgtacggtggagtgagcagactgacccccaggaggcacaggaggcgtagcccccaggacccacgacacttttagggttccagaaaaaagttttcattctacataaaaaaaaaaattcctaaagaca

SEQ ID NO: 428200 - DNA, 487 bp, Homo sapiens
gagctaggattgcaccactgcattccagcctgggtgacagagtaagaccctgtctcttaaaaaaaaaaaaaaatcaccttaccagaaagacttttctatatgaaatattttatataaaacaaaagaccattctatatgaaatattttgtataaaataaaatcctgttcctccctatcctctttgccctgctttagttttcttcttactgctcatttatttgcttatttattgaccgtctcccctgcttagaatgtcagctccagcagggaagggatttttttttctctctctttttttttttcagacgggatttcgctatgttgcctcggctagcctcgaactcctggactcaagtagtccggcctgccttgtcttcccaaagtgctgtggttgtagatatgagccactgcgccctccggtgctagaatagtacccggcacacagtagaagcttattaaatatttgctaaatgaatgaattaattaa

SEQ ID NO: 428201 - DNA, 641 bp, Homo sapiens
cggcgtgcggccgctgactcggcgcagtggctctcggtgaaggaagagaccatcttcctgcacgacgggctgatccgggtcaccgacctggccgagctgcccagcgagatcctcggggccccagaggccgcggacaccgacctggagattttaacctttgagaccaagaacccgtcggaattagcagaacgtttgcgctctgtttgtgggaatcagagcaatgcctatgcccggctgctggaataccgcctgaatgccttgcgaggactgtggaatgcccagcgccagctggccttagaagaacagcatgaaagggaaagttcaggtggtatttaaatttttcttcagcccacaaactgaaaggaatcgagacatcattcgacggtcgggattgcttctttggcagttgttgatggctccaaaagatcaaatttgccctgaaattcagaaggaagtctgccttgccatcagctctggtttaaatatcttgtacccaggtgaaactgaaatcaataacttacttaaactggtcttaacagaaggagagagaaacagtggactctcccagctacgggatgtgatcctaaccaacctggctgaacagctccaaaacaaccgatttggcagtgatgaggatgatc

SEQ ID NO: 428202 - DNA, 1446 bp, Homo sapiens
cggcgtgcggccgctgactcggcgcagtggctctcggtgaaggaagagaccatcttcctgcacgacgggctgatccgggtcaccgacctggccgagctgcccagcgagatcctcggggccccagaggccgcggacaccgacctggagattttaacctttgagaccaagaacccgtcggaattagcagaacgtttgcgctctgtttgtgggaatcagagcaatgcctatgcccggctgctggaataccgcctgaatgccttgcgaggactgtggaatgcccagcgccagctggccttagaagaacagcatgaaagggaaagttcaggtgatgaggaaactttggccctgctcaaacgccagggcttgttgcagcaacctgagcaagcgcccttcacatcgaggatggggctcctgctggtcttcccccttattcagtcccagagtagaacagacccctctctctgtaacataactgctgaggtgctattgaactgccttcgtgactgccagcctttgagcttgaccaaggagcctgctgactgtctcaatggaattgaaactttgctgtgctcttggctagaggagacttctgacacaggccgacacatcccacataagcaaaaagaaaatgctgctgctgccctggtggctttggcttgtgccaggggatcattgaaaactttcgtccacacagtccatctattacagaaacagacggatctagggtccctgcctgtagctgatgtgctatataggctgttgcttttggaaggggggcctggatctccctcctgtttgcttgggggcaaacacatagtatcatggggttatgaagacatgttgcctgcgccggatagcaacactggctccagttctgaaaataaagatgctgacttgggacgctgtctcacggcagatggtctttacctgtatactactaactcagttggaagaggagtaagcaaattgggatctggattacatggtactctcagaggttttgtgtactgccggaacgaggagttggaaccaggatgggtggcttttggcagcggcagtcttctccaccggcctgtctctttcgataataaacctcactcccttttccaggtcattgaccagaacacccttcaggtgtgccaggtggtgccaatgccagccaatcacctccccattggcagcaccatgagcactgtgcacctgtcttcagatggcacttacttctattggatctggtctcctgccagcctgaatgagaaaacaccgaagggacattctgtcttcatggacatttttgaacttgtggttgaaaatggtgtatttgtagccaacccacttcaggaacgtacaattctaatgagaaaagagggcgaatctgccaaaagcattaatgagatgcttctaagtagactttctcggtatagagcctccccgtcagcaacgctt

SEQ ID NO: 428203 - DNA, 1487 bp, Homo sapiens
cggcgtgcggccgctgactcggcgcagtggctctcggtgaaggaagagaccatcttcctgcacgacgggctgatccgggtcaccgacctggccgagctgcccagcgagatcctcggggccccagaggccgcggacaccgacctggagattttaacctttgagaccaagaacccgtcggaattagcagaacgtttgcgctctgtttgtgggaatcagagcaatgcctatgcccggctgctggaataccgcctgaatgccttgcgaggactgtggaatgcccagcgccagctggccttagaagaacagcatgaaagggaaagttcaggtgatgaggaaactttggccctgctcaaacgccagggcttgttgcagcaacctgagcaagcgcccttcacatcgaggatggggctcctgctggtcttcccccttattcagtcccagagtagaacagacccctctctctgtaacataactgctgaggtgctattgaactgccttcgtgactgccagcctttgagcttgaccaaggagcctgctgactgtctcaatggaattgaaactttgctgtgctcttggctagaggagacttctgacacaggccgacacatcccacataagcaaaaagaaaatgctgctgctgccctggtggctttggcttgtgccaggggatcattgaaaactttcgtccacacagtccatctattacagaaacagacggatctagggtccctgcctgtagctgatgtgctatataggctgttgcttttggaaggggggcctggatctccctcctgtttgcttgggggcaaacacatagtatcatggggttatgaagacatgttgcctgcgccggatagcaacactggctccagttctgaaaataaagatgctgacttgggacgctgtctcacggcagatggtctttacctgtatactactaactcagttggaagaggagtaagcaaattgggatctggattacatggtactctcagaggttttgtgtactgccggaacgaggagttggaaccaggatgggtggcttttggcagcggcagtcttctccaccggcctgtctctttcgataataaacctcactcccttttccaggtcattgaccagaacacccttcaggtgtgccaggtggtgccaatgccagccaatcacctccccattggcagcaccatgagcactgtgcacctgtcttcagatggcacttacttctattggatctggtctcctgccagcctgaatgagaaaacaccgaagggacattctgtcttcatggacatttttgaacttgtgacgggatttcgctatgttgcctcggctagcctcgaactcctggactcaagtagtccggcctgccttgtcttcccaaagtgctgtggttgtagatatgagccactgcgccctccggtgctagaatagtacccggcacacagtagaagcttattaaatatttgctaaatgaatgaattaattaa

SEQ ID NO: 428204 - DNA, 690 bp, Homo sapiens
gagcgtgttatgacacagtgaacaacatgctatggacatgctcaaatgactatatcgatcagtggtgtaaccctgggaatcaagccttccattatgtctgccagagacttggagtcagtcacattatcactgagcccaaagaagaggctataaccacgaatgaggttataaaccaattattgcaccacgttggtgcgatgtgcatacaccaactcaatcttcttgccaccaaccccaatcttccaatcacaagtgtcttgggcaagcagcatccaattgaagcacatcatcttagcagtatttgtgacattatggagaaggccatggttaatggagatacctgtattatacgctgcattctcgttgtctttcaggtggtatttaaatttttcttcagcccacaaactgaaaggaatcgagacatcattcgacggtcgggattgcttctttggcagttgttgatggctccaaaagatcaaatttgccctgaaattcagaaggaagtctgccttgccatcagctctggtttaaatatcttgtacccaggtgaaactgaaatcaataacttacttaaactggtcttaacagaaggagagagaaacagtggactctcccagctacgggatgtgatcctaaccaacctggctgaacagctccaaaacaaccgatttggcagtgatgaggatgatc

SEQ ID NO: 428205 - DNA, 619 bp, Homo sapiens
  misc_feature (605)..(605): n is a, c, g, or t
  misc_feature (619)..(619): n is a, c, g, or t
ctttcacagaattttctccagaccatattacatttaatttcctgggactcctacagttacagtgatatagtagtggactggggaactcaaacttaaagacctaaaggggccaagcagtgtctttacatccaaaatgcaaagcagacaaatgggcatatcagggaagaacatgacaaaaagcaccagcatcagtggagacatgtgctcactggagaagaatgatggcagccagtctgacactgcagtgggcaccttgggcaccagtggcaaaaagcggcgctctagccttggtgccaaaatggtagctatcgttggtctgtcacggaaaagtcgcagtgcttctcagctcagccaaacgggtactatggatatagaggagagaaatcgccaaatgttaacaaatacaaacaggtagccggatcagatcccagactggaacaagattaccattcgaagtatcgatcaggatgggatcctcatagaggggcagataatgtttctacttcttcggacagtgatgtaagtgatatatctgcggttcaaggactagtagtgcttctcgtttcagcagcacagctcatgtctgtccaatcagaacgcccagnaggacaggtcagcn

SEQ ID NO: 428206 - DNA, 4610 bp, Homo sapiens
agaattcttgctacagtcaggagaaagccgaaagctgcacgggtactgaatcttctacgactgaattagaagaataatgactgtacaattaactatcaacctctgttcatttaagcacagtttttacagagctcaggagaaatatggaacttgattggcgtgtttttatttgatggtgtcagcaaatagatgattttaaagacaggtggtagggaaaaataagagaaggggaaaaaaaaagaaagaaaatgcaatttgagacattgcgccaggtctgcaattctgttttatctcattttcatggggttttttcatccccaccaaatatcttacaaaatgagctttttggacaaacactgaacaatgcaaggaaaagaagcccatctgtgtccagagatcagaatagaagatacgaccaaagggaagaaagagaggaatattcacagtatgctacttcggataccgcaatgcctagatctccatcagattatgctgataggcgatctcaacatgaacctcagttttatgaagactctgatcatttaagttatagggactccaacaggagaagtcataggcattccaaagaatatattgtagatgatgaggatgtggaaagcagagatgaatacgaaaggcaaaggagagaggaagagtaccagtcacgctaccgaagtgatccgaatttggcccgttatccagtaaagccacaaccctatgaagaacaaatgcggatccatgctgaagtgtcccgagcacggcatgagagaaggcatagtgatgtttctttggcaaatgctgatctggaagattccaggatttctatgctaaggatggatcgaccatcaaggcaaagatctatatcagaacgtagagctgccatggaaaatcagcgatcttattcaatggaaagaactcgagaggctcagggaccaagttcttatgcacaaaggaccacaaaccatagtcctcctacccccaggaggagtccactacccatagatagaccagacttgaggcgtactgactcactacggaaacagcaccacttagatcctagctctgctgtaagaaaaacaaaacgggaaaaaatggaaacaatgttaaggaatgattctctcagttcagaccagtcagagtcagtgagacctccaccaccaaagcctcataaatcaaagaaaggcggtaaaatgcgccagatttcgttgagcagttcagaggaggaattggcttccacgcctgaatatacaagttgtgatgatgttgagattgaaagtgagagtgtaagtgaaaaaggggacagtcaaaagggaaaaagaaaaactagtgagcaggcagttttgtcggactctaacaccaggtctgagagacaaaaggaaatgatgtactttggtggccactctttggaagaggatttggaatggtctgaacctcagattaaggactctggggtagatacgtgtagtagcacaacccttaacgaggagcatagccatagtgataagcaccctgtaacctggcaaccatctaaagatggagatcgtttaattggtcgcattttattaaataagcgtctaaaagatggaagtgtacctcgagattcaggagcaatgcttggcttgaaggttgtaggaggaaagatgactgaatcaggtcggctttgtgcatttattactaaagtaaaaaaaggaagtttagctgatactgtaggacatcttagaccaggtgatgaagtattagaatggaatggaagactactgcaaggagccacatttgaggaagtgtacaacatcattctagaatccaaacctgaaccacaagtagaacttgtagtttcaaggcctattggagatataccgcgaatacctgatagcacacatgcacaactggagtccagttctagctcctttgaatctcaaaaaatggatcgtccttctatttctgttacctctcccatgagtcctggaatgttgagggatgtcccacagttcttatcaggacaactttcaataaaactatggtttgacaaggttggtcaccaattaatagttacaattttgggagcaaaagatctcccttccagggaagatgggaggccaaggaatccttatgttaaaatttactttcttccagacagaagtgataaaaacaagagaagaactaaaacagtaaagaaaacattggaacccaaatggaaccaaacattcatttattctccagtccaccgaagagaatttcgggaacgaatgctagagattaccctttgggatcaagctcgtgttcgagaggaagaaagtgaattcttaggcgagattttaattgaattagaaacagcattattagatgatgagccacattggtacaaacttcagacgcatgatgtctcttcattgccacttccccacccttctccatatatgccacgaagacagctccatggagagagcccaacacggaggttgcaaaggtcaaagagaataagtgatagtgaagtctctgactatgactgtgatgatggaattggtgtagtatcagattatcgacatgatggtcgagatcttcaaagctcaacattatcagtgccagaacaagtaatgtcatcaaaccactgttcaccatcagggtctcctcatcgagtagatgttataggaaggactagatcatggtcacccagtgtccctcctccacaaagtcggaatgtggaacaggggcttcgagggacccgcactatgaccggacattataatacaattagccgaatggacagacatcgtgtcatggatgaccattattctccagatagagacaggattgtgaagcagcagatagacagccatatcacagatccagatcaacagaacaacggcctctccttgagcggaccaccacccgctccagatccactgaacgtcctgatacaaacctcatgaggtcgatgccttcattaatgactggaagatctgcccctccttcacctgccttatcgaggtctcatcctcgtactgggtctgtccagacaagcccatcaagtactccagtcgcaggacgaaggggccgacagcttccacagcttccaccaaagggaacgttggatagaaaagcaggaggtaaaaaactaaggagcactgtccaaagaagtacagaaacaggcctggccgtggaaatgaggaactggatgactcgacaggcaagccgagagtctacagatggtagcatgaacagctacagctcagaaggaaatctgattttccctggtgttcgcttggcctctgatagccagttcagtgatttcctggatggccttggccctgctcagctagtgggacgccagactctggcaacacctgcaatgggtgacattcaggtaggaatgatggacaaaaagggacagctggaggtagaaatcatccgggcccgtggccttgttgtaaaaccaggttccaagacactgccagcaccgtatgtaaaagtgtatctattagataacggagtctgcatagccaaaaagaaaacaaaagtggcaagaaaaacgctggaacccctttaccagcagctattatctttcgaagagagtccacaaggaaaagttttacagatcatcgtctggggagattatggccgcatggatcacaaatcttttatgggagtggcccagatacttttagatgaactagagctatccaatatggtgatcggatggttcaaacttttcccaccttcctccctagtagatccaaccttggctcctctgacaagaagagcttcccaatcatctctggaaagttcaactggaccttcttactctcgttcatagcagctgtaaaaaaattgttgtcacagcaaccagcgttacaaaaaaaaaaaaaaaaatcacaggttgcaaaccctggtaacactgcatgcttaatgttgtgtcttctgagcctgtttctagggatacaaagcaatcctgtgttctcagaggaagttgcacacattgtgccctaaagaaggccctcaggtgaaagagcagagctgtgaagaactatcagatttggaattcaatgacactcgagttctggtccaatctgaagccatggattaatctcaaagaatcagtcagtttcatgcaacagaagcccttttcaatggcacctttatatttttatcattcctttttcttcatttatctaaccccaaagccctgatatgccacagaaatggagctatacagccatgaagcggtgttacaggtgaggagtgtaatcctaggaagcatcaggtgaaaagcaggagaccaaagaagtggtcaggaacaatcatcagccctcctctgggcgggaatcagagcagtcagtccagcaggaagagtggcagactttgtagctccatgggcacgtcatttactaatgctaagatgtgttggactctgaaaaacaaaattctgtggctacactgtactgaatgaaattaaagaaactttttttgcatggacacagattagctgaatacttaaattattttcttggggctgcaacttgcaaaaaaaaaaaaaagaataaaaatcagccattttcaacaatttatattatttttaaaaataaatttcactagtgcatggttttaaaaag

SEQ ID NO: 428207 - DNA, 4556 bp, Homo sapiens
agaattcttgctacagtcaggagaaagccgaaagctgcacgggtactgaatcttctacgactgaattagaagaataatgactgtacaattaactatcaacctctgttcatttaagcacagtttttacagagctcaggagaaatatggaacttgattggcgtgtttttatttgatggtgtcagcaaatagatgattttaaagacaggtggtagggaaaaataagagaaggggaaaaaaaaagaaagaaaatgcaatttgagacattgcgccaggtctgcaattctgttttatctcattttcatggggttttttcatccccaccaaatatcttacaaaatgagctttttggacaaacactgaacaatgcaaggaaaagaagcccatctgtgtccagagatcagaatagaagatacgaccaaagggaagaaagagaggaatattcacagtatgctacttcggataccgcaatgcctagatctccatcagattatgctgataggcgatctcaacatgaacctcagttttatgaagactctgatcatttaagttatagggactccaacaggagaagtcataggcattccaaagaatatattgtagatgatgaggatgtggaaagcagagatgaatacgaaaggcaaaggagagaggaagagtaccagtcacgctaccgaagtgatccgaatttggcccgttatccagtaaagccacaaccctatgaagaacaaatgcggatccatgctgaagtgtcccgagcacggcatgagagaaggcatagtgatgtttctttggcaaatgctgatctggaagattccaggatttctatgctaaggatggatcgaccatcaaggcaaagatctatatcagaacgtagagctgccatggaaaatcagcgatcttattcaatggaaagaactcgagaggctcagggaccaagttcttatgcacaaaggaccacaaaccatagtcctcctacccccaggaggagtccactacccatagatagaccagacttgaggcgtactgactcactacggaaacagcaccacttagatcctagctctgctgtaagaaaaacaaaacgggaaaaaatggaaacaatgttaaggaatgattctctcagttcagaccagtcagagtcagtgagacctccaccaccaaagcctcataaatcaaagaaaggcggtaaaatgcgccagatttcgttgagcagttcagaggaggaattggcttccacgcctgaatatacaagttgtgatgatgttgagattgaaagtgagagtgtaagtgaaaaaggggacagtcaaaagggaaaaagaaaaactagtgagcaggcagttttgtcggactctaacaccaggtctgagagacaaaaggaaatgatgtactttggtggccactctttggaagaggatttggaatggtctgaacctcagattaaggactctggggtagatacgtgtagtagcacaacccttaacgaggagcatagccatagtgataagcaccctgtaacctggcaaccatctaaagatggagatcgtttaattggtcgcattttattaaataagcgtctaaaagatggaagtgtacctcgagattcaggagcaatgcttggcttgaaggttgtaggaggaaagatgactgaatcaggtcggctttgtgcatttattactaaagtaaaaaaaggaagtttagctgatactgtaggacatcttagaccaggtgatgaagtattagaatggaatggaagactactgcaaggagccacatttgaggaagtgtacaacatcattctagaatccaaacctgaaccacaagtagaacttgtagtttcaaggcctattggagatataccgcgaatacctgatagcacacatgcacaactggagtccagttctagctcctttgaatctcaaaaaatggatcgtccttctatttctgttacctctcccatgagtcctggaatgttgagggatgtcccacagttcttatcaggacaactttcaataaaactatggtttgacaaggttggtcaccaattaatagttacaattttgggagcaaaagatctcccttccagggaagatgggaggccaaggaatccttatgttaaaatttactttcttccagacagaagtgataaaaacaagagaagaactaaaacagtaaagaaaacattggaacccaaatggaaccaaacattcatttattctccagtccaccgaagagaatttcgggaacgaatgctagagattaccctttgggatcaagctcgtgttcgagaggaagaaagtgaattcttaggcgagattttaattgaattagaaacagcattattagatgatgagccacattggtacaaacttcagacgcatgatgtctcttcattgccacttccccacccttctccatatatgccacgaagacagctccatggagagagcccaacacggaggttgcaaaggtcaaagagaataagtgatagtgaagtctctgactatgactgtgatgatggaattggtgtagtatcagattatcgacatgatggtcgagatcttcaaagctcaacattatcagtgccagaacaagtaatgtcatcaaaccactgttcaccatcagggtctcctcatcgagtagatgttataggaaggactagatcatggtcacccagtgtccctcctccacaaagtcggaatgtggaacaggggcttcgagggacccgcactatgaccggacattataatacaattagccgaatggacagacatcgtgtcatggatgaccattattctccagatagagacaggattgtgaagcagcagatagacagccatatcacagatccagatcaacagaacaacggcctctccttgagcggaccaccacccgctccagatccactgaacgtcctgatacaaacctcatgaggtcgatgccttcattaatgactggaagatctgcccctccttcacctgccttatcgaggtctcatcctcgtactgggtctgtccagacaagcccatcaagtactccagtcgcaggacgaaggggccgacagcttccacagcttccaccaaagggaacgttggatagaaaagcaggaggtaaaaaactaaggagcactgtccaaagaagtacagaaacaggcctggccgtggaaatgaggaactggatgactcgacaggcaagccgagagtctacagatggtagcatgaacagctacagctcagaaggaaatctgattttccctggtgttcgcttggcctctgatagccagttcagtgatttcctggatggccttggccctgctcagctagtgggacgccagactctggcaacacctgcaatgggtgacattcaggtaggaatgatggacaaaaagggacagctggaggtagaaatcatccgggcccgtggccttgttgtaaaaccaggttccaagacactgccagcaccgtatgtaaaagtgtatctattagataacggagtctgcatagccaaaaagaaaacaaaagtggcaagaaaaacgctggaacccctttaccagcagctattatctttcgaagagagtccacaaggaaaagttttacagatcatcgtctggggagattatggccgcatggatcacaaatcttttatgggagtggcccagatacttttagatgaactagagctatccaatatggtgatcggatggttcaaacttttcccaccttcctccctagtagatccaaccttggctcctctgacaagaagagcttcccaatcatctctggaaagttcaactggaccttcttactctcgttcatagcagctgtaaaaaaattgttgtcacagcaaccagcgttacaaaaaaaaaaaaaaaaatcacaggttgcaaaccctggtaacactgcatgcttaatgttgtgtcttctgagcctgtttctagggatacaaagcaatcctgtgttctcagaggaagttgcacacattgtgccctaaagaaggccctcaggtgaaagagcagagctgtgaagaactatcagatttggaattcaatgacactcgagttctggtccaatctgaagccatggattaatctcaaagaatcagtcagtttcatgcaacagaagcccttttcaatggcacctttatatttttatcattcctttttcttcatttatctaaccccaaagccctgatatgccacagaaatggagctatacagccatgaagcggtgttacaggtgaggagtgtaatcctaggaagcatcaggtggggaatcagagcagtcagtccagcaggaagagtggcagactttgtagctccatgggcacgtcatttactaatgctaagatgtgttggactctgaaaaacaaaattctgtggctacactgtactgaatgaaattaaagaaactttttttgcatggacacagattagctgaatacttaaattattttcttggggctgcaacttgcaaaaaaaaaaaaaagaataaaaatcagccattttcaacaatttatattatttttaaaaataaatttcactagtgcatggttttaaaaag

SEQ ID NO: 428208 - DNA, 4677 bp, Homo sapiens
agaattcttgctacagtcaggagaaagccgaaagctgcacgggtactgaatcttctacgactgaattagaagaataatgactgtacaattaactatcaacctctgttcatttaagcacagtttttacagagctcaggagaaatatggaacttgattggcgtgtttttatttgatggtgtcagcaaatagatgattttaaagacaggtggtagggaaaaataagagaaggggaaaaaaaaagaaagaaaatgcaatttgagacattgcgccaggtctgcaattctgttttatctcattttcatggggttttttcatccccaccaaatatcttacaaaatgagctttttggacaaacactgaacaatgcaaggaaaagaagcccatctgtgtccagagatcagaatagaagatacgaccaaagggaagaaagagaggaatattcacagtatgctacttcggataccgcaatgcctagatctccatcagattatgctgataggcgatctcaacatgaacctcagttttatgaagactctgatcatttaagttatagggactccaacaggagaagtcataggcattccaaagaatatattgtagatgatgaggatgtggaaagcagagatgaatacgaaaggcaaaggagagaggaagagtaccagtcacgctaccgaagtgatccgaatttggcccgttatccagtaaagccacaaccctatgaagaacaaatgcggatccatgctgaagtgtcccgagcacggcatgagagaaggcatagtgatgtttctttggcaaatgctgatctggaagattccaggatttctatgctaaggatggatcgaccatcaaggcaaagatctatatcagaacgtagagctgccatggaaaatcagcgatcttattcaatggaaagaactcgagaggctcagggaccaagttcttatgcacaaaggaccacaaaccatagtcctcctacccccaggaggagtccactacccatagatagaccagacttgaggcgtactgactcactacggaaacagcaccacttagatcctagctctgctgtaagaaaaacaaaacgggaaaaaatggaaacaatgttaaggaatgattctctcagttcagaccagtcagagtcagtgagacctccaccaccaaagcctcataaatcaaagaaaggcggtaaaatgcgccagatttcgttgagcagttcagaggaggaattggcttccacgcctgaatatacaagttgtgatgatgttgagattgaaagtgagagtgtaagtgaaaaaggggacagtcaaaagggaaaaagaaaaactagtgagcaggcagttttgtcggactctaacaccaggtctgagagacaaaaggaaatgatgtactttggtggccactctttggaagaggatttggaatggtctgaacctcagattaaggactctggggtagatacgtgtagtagcacaacccttaacgaggagcatagccatagtgataagcaccctgtaacctggcaaccatctaaagatggagatcgtttaattggtcgcattttattaaataagcgtctaaaagatggaagtgtacctcgagattcaggagcaatgcttggcttgaaggttgtaggaggaaagatgactgaatcaggtcggctttgtgcatttattactaaagtaaaaaaaggaagtttagctgatactgtaggacatcttagaccaggtgatgaagtattagaatggaatggaagactactgcaaggagccacatttgaggaagtgtacaacatcattctagaatccaaacctgaaccacaagtagaacttgtagtttcaaggcctattggagatataccgcgaatacctgatagcacacatgcacaactggagtccagttctagctcctttgaatctcaaaaaatggatcgtccttctatttctgttacctctcccatgagtcctggaatgttgagggatgtcccacagttcttatcaggacaactttcaataaaactatggtttgacaaggttggtcaccaattaatagttacaattttgggagcaaaagatctcccttccagggaagatgggaggccaaggaatccttatgttaaaatttactttcttccagacagaagtgataaaaacaagagaagaactaaaacagtaaagaaaacattggaacccaaatggaaccaaacattcatttattctccagtccaccgaagagaatttcgggaacgaatgctagagattaccctttgggatcaagctcgtgttcgagaggaagaaagtgaattcttaggcgagattttaattgaattagaaacagcattattagatgatgagccacattggtacaaacttcagacgcatgatgtctcttcattgccacttccccacccttctccatatatgccacgaagacagctccatggagagagcccaacacggaggttgcaaaggtcaaagagaataagtgatagtgaagtctctgactatgactgtgatgatggaattggtgtagtatcagattatcgacatgatggtcgagatcttcaaagctcaacattatcagtgccagaacaagtaatgtcatcaaaccactgttcaccatcagggtctcctcatcgagtagatgttataggaaggactagatcatggtcacccagtgtccctcctccacaaagtcggaatgtggaacaggggcttcgagggacccgcactatgaccggacattataatacaattagccgaatggacagacatcgtgtcatggatgaccattattctccagatagagacagtcattttcttactctacctcgctccagatacagtcagaccattgaccatcatcacagggatggcagggattgtgaagcagcagatagacagccatatcacagatccagatcaacagaacaacggcctctccttgagcggaccaccacccgctccagatccactgaacgtcctgatacaaacctcatgaggtcgatgccttcattaatgactggaagatctgcccctccttcacctgccttatcgaggtctcatcctcgtactgggtctgtccagacaagcccatcaagtactccagtcgcaggacgaaggggccgacagcttccacagcttccaccaaagggaacgttggatagaaaagcaggaggtaaaaaactaaggagcactgtccaaagaagtacagaaacaggcctggccgtggaaatgaggaactggatgactcgacaggcaagccgagagtctacagatggtagcatgaacagctacagctcagaaggaaatctgattttccctggtgttcgcttggcctctgatagccagttcagtgatttcctggatggccttggccctgctcagctagtgggacgccagactctggcaacacctgcaatgggtgacattcaggtaggaatgatggacaaaaagggacagctggaggtagaaatcatccgggcccgtggccttgttgtaaaaccaggttccaagacactgccagcaccgtatgtaaaagtgtatctattagataacggagtctgcatagccaaaaagaaaacaaaagtggcaagaaaaacgctggaacccctttaccagcagctattatctttcgaagagagtccacaaggaaaagttttacagatcatcgtctggggagattatggccgcatggatcacaaatcttttatgggagtggcccagatacttttagatgaactagagctatccaatatggtgatcggatggttcaaacttttcccaccttcctccctagtagatccaaccttggctcctctgacaagaagagcttcccaatcatctctggaaagttcaactggaccttcttactctcgttcatagcagctgtaaaaaaattgttgtcacagcaaccagcgttacaaaaaaaaaaaaaaaaatcacaggttgcaaaccctggtaacactgcatgcttaatgttgtgtcttctgagcctgtttctagggatacaaagcaatcctgtgttctcagaggaagttgcacacattgtgccctaaagaaggccctcaggtgaaagagcagagctgtgaagaactatcagatttggaattcaatgacactcgagttctggtccaatctgaagccatggattaatctcaaagaatcagtcagtttcatgcaacagaagcccttttcaatggcacctttatatttttatcattcctttttcttcatttatctaaccccaaagccctgatatgccacagaaatggagctatacagccatgaagcggtgttacaggtgaggagtgtaatcctaggaagcatcaggtgaaaagcaggagaccaaagaagtggtcaggaacaatcatcagccctcctctgggcgggaatcagagcagtcagtccagcaggaagagtggcagactttgtagctccatgggcacgtcatttactaatgctaagatgtgttggactctgaaaaacaaaattctgtggctacactgtactgaatgaaattaaagaaactttttttgcatggacacagattagctgaatacttaaattattttcttggggctgcaacttgcaaaaaaaaaaaaaagaataaaaatcagccattttcaacaatttatattatttttaaaaataaatttcactagtgcatggttttaaaaag

SEQ ID NO: 428209 - DNA, 1874 bp, Homo sapiens
ctttcacagaattttctccagaccatattacatttaatttcctgggactcctacagttacagtgatatagtagtggactggggaactcaaacttaaagacctaaaggggccaagcagtgtctttacatccaaaatgcaaagcagacaaatgggcatatcagggaagaacatgacaaaaagcaccagcatcagtggagacatgtgctcactggagaagaatgatggcagccagtctgacactgcagtgggcaccttgggcaccagtggcaaaaagcggcgctctagccttggtgccaaaatggtagctatcgttggtctgtcacggaaaagtcgcagtgcttctcagctcagccaaacgggtaaagcaggaggtaaaaaactaaggagcactgtccaaagaagtacagaaacaggcctggccgtggaaatgaggaactggatgactcgacaggcaagccgagagtctacagatggtagcatgaacagctacagctcagaaggaaatctgattttccctggtgttcgcttggcctctgatagccagttcagtgatttcctggatggccttggccctgctcagctagtgggacgccagactctggcaacacctgcaatgggtgacattcaggtaggaatgatggacaaaaagggacagctggaggtagaaatcatccgggcccgtggccttgttgtaaaaccaggttccaagacactgccagcaccgtatgtaaaagtgtatctattagataacggagtctgcatagccaaaaagaaaacaaaagtggcaagaaaaacgctggaacccctttaccagcagctattatctttcgaagagagtccacaaggaaaagttttacagatcatcgtctggggagattatggccgcatggatcacaaatcttttatgggagtggcccagatacttttagatgaactagagctatccaatatggtgatcggatggttcaaacttttcccaccttcctccctagtagatccaaccttggctcctctgacaagaagagcttcccaatcatctctggaaagttcaactggaccttcttactctcgttcatagcagctgtaaaaaaattgttgtcacagcaaccagcgttacaaaaaaaaaaaaaaaaatcacaggttgcaaaccctggtaacactgcatgcttaatgttgtgtcttctgagcctgtttctagggatacaaagcaatcctgtgttctcagaggaagttgcacacattgtgccctaaagaaggccctcaggtgaaagagcagagctgtgaagaactatcagatttggaattcaatgacactcgagttctggtccaatctgaagccatggattaatctcaaagaatcagtcagtttcatgcaacagaagcccttttcaatggcacctttatatttttatcattcctttttcttcatttatctaaccccaaagccctgatatgccacagaaatggagctatacagccatgaagcggtgttacaggtgaggagtgtaatcctaggaagcatcaggtgaaaagcaggagaccaaagaagtggtcaggaacaatcatcagccctcctctgggcgggaatcagagcagtcagtccagcaggaagagtggcagactttgtagctccatgggcacgtcatttactaatgctaagatgtgttggactctgaaaaacaaaattctgtggctacactgtactgaatgaaattaaagaaactttttttgcatggacacagattagctgaatacttaaattattttcttggggctgcaacttgcaaaaaaaaaaaaaagaataaaaatcagccattttcaacaatttatattatttttaaaaataaatttcactagtgcatggttttaaaaag

SEQ ID NO: 428210 - DNA, 566 bp, Homo sapiens
  misc_feature (552)..(552): n is a, c, g, or t
  misc_feature (566)..(566): n is a, c, g, or t
ctttcacagaattttctccagaccatattacatttaatttcctgggactcctacagttacagtgatatagtagtggactggggaactcaaacttaaagacctaaaggggccaagcagtgtctttacatccaaaatgcaaagcagacaaatgggcatatcagggaagaacatgacaaaaagcaccagcatcagtggagacatgtgctcactggagaagaatgatggcagccagtctgacactgcagtgggcaccttgggcaccagtggcaaaaagcggcgctctagccttggtgccaaaatggtagctatcgttggtctgtcacggaaaagtcgcagtgcttctcagctcagccaaacgggtaccggatcagatcccagactggaacaagattaccattcgaagtatcgatcaggatgggatcctcatagaggggcagataatgtttctacttcttcggacagtgatgtaagtgatatatctgcggttcaaggactagtagtgcttctcgtttcagcagcacagctcatgtctgtccaatcagaacgcccagnaggacaggtcagcn

SEQ ID NO: 428211 - DNA, 4552 bp, Homo sapiens
agaattcttgctacagtcaggagaaagccgaaagctgcacgggtactgaatcttctacgactgaattagaagaataatgactgtacaattaactatcaacctctgttcatttaagcacagtttttacagagctcaggagaaatatggaacttgattggcgtgtttttatttgatggtgtcagcaaatagatgattttaaagacaggtggtagggaaaaataagagaaggggaaaaaaaaagaaagaaaatgcaatttgagacattgcgccaggtctgcaattctgttttatctcattttcatggggttttttcatccccaccaaatatcttacaaaatgagctttttggacaaacactgaacaatgcaaggaaaagaagcccatctgtgtccagagatcagaatagaagatacgaccaaagggaagaaagagaggaatattcacagtatgctacttcggataccgcaatgcctagatctccatcagattatgctgataggcgatctcaacatgaacctcagttttatgaagactctgatcatttaagttatagggactccaacaggagaagtcataggcattccaaagaatatattgtagatgatgaggatgtggaaagcagagatgaatacgaaaggcaaaggagagaggaagagtaccagtcacgctaccgaagtgatccgaatttggcccgttatccagtaaagccacaaccctatgaagaacaaatgcggatccatgctgaagtgtcccgagcacggcatgagagaaggcatagtgatgtttctttggcaaatgctgatctggaagattccaggatttctatgctaaggatggatcgaccatcaaggcaaagatctatatcagaacgtagagctgccatggaaaatcagcgatcttattcaatggaaagaactcgagaggctcagggaccaagttcttatgcacaaaggaccacaaaccatagtcctcctacccccaggaggagtccactacccatagatagaccagacttgaggcgtactgactcactacggaaacagcaccacttagatcctagctctgctgtaagaaaaacaaaacgggaaaaaatggaaacaatgttaaggaatgattctctcagttcagaccagtcagagtcagtgagacctccaccaccaaagcctcataaatcaaagaaaggcggtaaaatgcgccagatttcgttgagcagttcagaggaggaattggcttccacgcctgaatatacaagttgtgatgatgttgagattgaaagtgagagtgtaagtgaaaaaggggacagtcaaaagggaaaaagaaaaactagtgagcaggcagttttgtcggactctaacaccaggtctgagagacaaaaggaaatgatgtactttggtggccactctttggaagaggatttggaatggtctgaacctcagattaaggactctggggtagatacgtgtagtagcacaacccttaacgaggagcatagccatagtgataagcaccctgtaacctggcaaccatctaaagatggagatcgtttaattggtcgcattttattaaataagcgtctaaaagatggaagtgtacctcgagattcaggagcaatgcttggcttgaaggttgtaggaggaaagatgactgaatcaggtcggctttgtgcatttattactaaagtaaaaaaaggaagtttagctgatactgtaggacatcttagaccaggtgatgaagtattagaatggaatggaagactactgcaaggagccacatttgaggaagtgtacaacatcattctagaatccaaacctgaaccacaagtagaacttgtagtttcaaggcctattggagatataccgcgaatacctgatagcacacatgcacaactggagtccagttctagctcctttgaatctcaaaaaatggatcgtccttctatttctgttacctctcccatgagtcctggaatgttgagggatgtcccacagttcttatcaggacaactttcaataaaactatggtttgacaaggttggtcaccaattaatagttacaattttgggagcaaaagatctcccttccagggaagatgggaggccaaggaatccttatgttaaaatttactttcttccagacagaagtgataaaaacaagagaagaactaaaacagtaaagaaaacattggaacccaaatggaaccaaacattcatttattctccagtccaccgaagagaatttcgggaacgaatgctagagattaccctttgggatcaagctcgtgttcgagaggaagaaagtgaattcttaggcgagattttaattgaattagaaacagcattattagatgatgagccacattggtacaaacttcagacgcatgatgtctcttcattgccacttccccacccttctccatatatgccacgaagacagctccatggagagagcccaacacggaggttgcaaaggtcaaagagaataagtgatagtgaagtctctgactatgactgtgatgatggaattggtgtagtatcagattatcgacatgatggtcgagatcttcaaagctcaacattatcagtgccagaacaagtaatgtcatcaaaccactgttcaccatcagggtctcctcatcgagtagatgttataggaaggactagatcatggtcacccagtgtccctcctccacaaagtcggaatgtggaacaggggcttcgagggacccgcactatgaccggacattataatacaattagccgaatggacagacatcgtgtcatggatgaccattattctccagatagagacaggattgtgaagcagcagatagacagccatatcacagatccagatcaacagaacaacggcctctccttgagcggaccaccacccgctccagatccactgaacgtcctgatacaaacctcatgaggtcgatgccttcattaatgactggaagatctgcccctccttcacctgccttatcgaggtctcatcctcgtactgggtctgtccagacaagcccatcaagtactccagtcgcaggacgaaggggccgacagcttccacagcttccaccaaagggaacgttggatagaaaagcaggaggtaaaaaactaaggagcactgtccaaagaagtacagaaacaggcctggccgtggaaatgaggaactggatgactcgacaggcaagccgagagtctacagatggtagcatgaacagctacagctcagaaggaaatctgattttccctggtgttcgcttggcctctgatagccagttcagtgatttcctggatggccttggccctgctcagctagtgggacgccagactctggcaacacctgcaatgggtgacattcaggtaggaatgatggacaaaaagggacagctggaggtagaaatcatccgggcccgtggccttgttgtaaaaccaggttccaagacactgccagcaccgtatgtaaaagtgtatctattagataacggagtctgcatagccaaaaagaaaacaaaagtggcaagaaaaacgctggaacccctttaccagcagctattatctttcgaagagagtccacaaggaaaagttttacagatcatcgtctggggagattatggccgcatggatcacaaatcttttatgggagtggcccagatacttttagatgaactagagctatccaatatggtgatcggatggttcaaacttttcccaccttcctccctagtagatccaaccttggctcctctgacaagaagagcttcccaatcatctctggaaagttcaactggaccttcttactctcgttcatagcagctgtaaaaaaattgttgtcacagcaaccagcgttacaaaaaaaaaaaacctgtttctagggatacaaagcaatcctgtgttctcagaggaagttgcacacattgtgccctaaagaaggccctcaggtgaaagagcagagctgtgaagaactatcagatttggaattcaatgacactcgagttctggtccaatctgaagccatggattaatctcaaagaatcagtcagtttcatgcaacagaagcccttttcaatggcacctttatatttttatcattcctttttcttcatttatctaaccccaaagccctgatatgccacagaaatggagctatacagccatgaagcggtgttacaggtgaggagtgtaatcctaggaagcatcaggtgaaaagcaggagaccaaagaagtggtcaggaacaatcatcagccctcctctgggcgggaatcagagcagtcagtccagcaggaagagtggcagactttgtagctccatgggcacgtcatttactaatgctaagatgtgttggactctgaaaaacaaaattctgtggctacactgtactgaatgaaattaaagaaactttttttgcatggacacagattagctgaatacttaaattattttcttggggctgcaacttgcaaaaaaaaaaaaaagaataaaaatcagccattttcaacaatttatattatttttaaaaataaatttcactagtgcatggttttaaaaag

SEQ ID NO: 428212 - DNA, 3443 bp, Homo sapiens
  misc_feature (2729)..(2729): n is a, c, g, or t
  misc_feature (2781)..(2781): n is a, c, g, or t
agaattcttgctacagtcaggagaaagccgaaagctgcacgggtactgaatcttctacgactgaattagaagaataatgactgtacaattaactatcaacctctgttcatttaagcacagtttttacagagctcaggagaaatatggaacttgattggcgtgtttttatttgatggtgtcagcaaatagatgattttaaagacaggtggtagggaaaaataagagaaggggaaaaaaaaagaaagaaaatgcaatttgagacattgcgccaggtctgcaattctgttttatctcattttcatggggttttttcatccccaccaaatatcttacaaaatgagctttttggacaaacactgaacaatgcaaggaaaagaagcccatctgtgtccagagatcagaatagaagatacgaccaaagggaagaaagagaggaatattcacagtatgctacttcggataccgcaatgcctagatctccatcagattatgctgataggcgatctcaacatgaacctcagttttatgaagactctgatcatttaagttatagggactccaacaggagaagtcataggcattccaaagaatatattgtagatgatgaggatgtggaaagcagagatgaatacgaaaggcaaaggagagaggaagagtaccagtcacgctaccgaagtgatccgaatttggcccgttatccagtaaagccacaaccctatgaagaacaaatgcggatccatgctgaagtgtcccgagcacggcatgagagaaggcatagtgatgtttctttggcaaatgctgatctggaagattccaggatttctatgctaaggatggatcgaccatcaaggcaaagatctatatcagaacgtagagctgccatggaaaatcagcgatcttattcaatggaaagaactcgagaggctcagggaccaagttcttatgcacaaaggaccacaaaccatagtcctcctacccccaggaggagtccactacccatagatagaccagacttgaggcgtactgactcactacggaaacagcaccacttagatcctagctctgctgtaagaaaaacaaaacgggaaaaaatggaaacaatgttaaggaatgattctctcagttcagaccagtcagagtcagtgagacctccaccaccaaagcctcataaatcaaagaaaggcggtaaaatgcgccagatttcgttgagcagttcagaggaggaattggcttccacgcctgaatatacaagttgtgatgatgttgagattgaaagtgagagtgtaagtgaaaaaggggacagtcaaaagggaaaaagaaaaactagtgagcaggcagttttgtcggactctaacaccaggtctgagagacaaaaggaaatgatgtactttggtggccactctttggaagaggatttggaatggtctgaacctcagattaaggactctggggtagatacgtgtagtagcacaacccttaacgaggagcatagccatagtgataagcaccctgtaacctggcaaccatctaaagatggagatcgtttaattggtcgcattttattaaataagcgtctaaaagatggaagtgtacctcgagattcaggagcaatgcttggcttgaaggttgtaggaggaaagatgactgaatcaggtcggctttgtgcatttattactaaagtaaaaaaaggaagtttagctgatactgtaggacatcttagaccaggtgatgaagtattagaatggaatggaagactactgcaaggagccacatttgaggaagtgtacaacatcattctagaatccaaacctgaaccacaagtagaacttgtagtttcaaggcctattggagatataccgcgaatacctgatagcacacatgcacaactggagtccagttctagctcctttgaatctcaaaaaatggatcgtccttctatttctgttacctctcccatgagtcctggaatgttgagggatgtcccacagttcttatcaggacaactttcaataaaactatggtttgacaaggttggtcaccaattaatagttacaattttgggagcaaaagatctcccttccagggaagatgggaggccaaggaatccttatgttaaaatttactttcttccagacagaagtgataaaaacaagagaagaactaaaacagtaaagaaaacattggaacccaaatggaaccaaacattcatttattctccagtccaccgaagagaatttcgggaacgaatgctagagattaccctttgggatcaagctcgtgttcgagaggaagaaagtgaattcttaggcgagattttaattgaattagaaacagcattattagatgatgagccacattggtacaaacttcagacgcatgatgtctcttcattgccacttccccacccttctccatatatgccacgaagacagctccatggagagagcccaacacggaggttgcaaaggtcaaagagaataagtgatagtgaagtctctgactatgactgtgatgatggaattggtgtagtatcagattatcgacatgatggtcgagatcttcaaagctcaacattatcagtgccagaacaagtaatgtcatcaaaccactgttcaccatcagggtctcctcatcgagtagatgttataggaaggactagatcatggtcacccagtgtccctcctccacaaaggtaagatagactacttattttatttgtagggtggctntattagtcagtgttctccagagggacaaaactaataggatatatgtatatangaaagggagtttattagggagaattggctcatatgattataagacaaagtcccaccatagaatttctgcaagctggggaagggagaagccagtagtggcttagtccaagtgtgagtccattttgaaaggcttaaaaccagggaagctgacaggacaggcttcagtctgtggtcaaaggcctgagagccaccagcaagccactggtgcaagttccagagtccaaaggccaaagaacctagtgttggatgtccaagggcaggaagagtgaaagggaatcatcccagcacaggaaaaagaaagaagcccagaaaacttagcaagcaaggttatccccaccttcttcacccgctttgttcccagctgcattggcagccgactggatggtggattgggtgagtcttcctctcctagtccacatattcaaatgtcagtctcctctggcaacaccttacagacacatctagaaacaatactttaccagcctaggcttccttcattccattcaagttgacacgtaatgttaaccatcaaaatggcattacagacctatttatcacatatcggtaataatctctaaagataagagattcttgtggaaaaagaatttaaggaaagcaagatggttttgtttatttaaggaaaaacaaaatgctattcaagga

SEQ ID NO: 428213 - DNA, 3389 bp, Homo sapiens
gttcagtcccgccccgcagcgtccgacgggaaaggaaagggggaggacgccatgttggacggaaccatctgctgccacacatggggtggtcaatgctcccatgagtttactgatgcacagaaacaaccttgctgaatggaattaagcactttcttgtcacaaatatatcagtttgatgattttcgggcgcggtcttgtggatgcgagtcctctcagggtcgttcgtgaggccccagggcgtgggtgcgccccccgccccgcggccttggtgcggcctccccgtcgcacgcacatggctgggctgtagccgtcgcggcgcgcggtgcggcctgggagagtcggaagcgcggcggccgcggagccctgcgagtaggcagcgttgggcccatgcaggacgcggagaacgtggcggtgcccgaggcggccgaggagcgcgccgagcccggccagcagcagccggccgccgagccgccgccagccgaggggctgctgcggcccgcggggcccggcgctccggaggccgcggggaccgaggcctccagtgaggaggtggggatcgcggaggccgggccggagcccgaggtgaggaccgagccggcggccgaggcagaggcggcctccggcccgtccgagtcgccctcgccgccggccgccgaggagctgcccgggtcgcatgctgagccccctgtcccggcacagggcgaggccccaggagagcaggctcgggacgagcgctccgacagccgggcccaggcggtgtccgaggacgcgggaggaaacgagggcagagcggccgaggccgaaccccgggcgctggagaacggcgacgcggacgagccctccttcagcgaccccgaggacttcgtggacgacgtgagcgaggaagaattactgggagatgtactcaaagatcggccccaggaagcagatggaatcgattcggtgattgtagtggacaatgtccctcaggtgggacccgaccgacttgagaaactcaaaaatgtcatccacaagatcttttccaagtttgggaaaatcacaaatgatttttatcctgaagaggatgggaagacaaaagggtatattttcctggagtacgcgtcccctgcccacgctgtggatgctgtgaagaacgccgacggctacaagcttgacaagcagcacacattccgggtcaacctctttacggattttgacaagtatatgacgatcagtgacgagtgggatattccagagaaacagcctttcaaagacctggggaacttacgttactggcttgaagaggcagaatgcagagatcagtacagtgtgatttttgagagtggagaccgcacttccatattctggaatgacgtaaaagaccctgtctcaattgaagaaagagcgagatggacagagacgtatgtgcgttggtctcctaagggcacctacctggctacctttcatcaaagaggcattgctctatgggggggagagaaattcaagcaaattcagagattcagccaccaaggggttcagcttattgacttctcaccttgtgaaaggtacctggtgacctttagccccctgatggacacgcaggatgaccctcaggccataatcatctgggacatccttacggggcacaagaagaggggttttcactgtgagagctcagcccattggcctatttttaagtggagccatgatggcaaattctttgccagaatgaccctggatacgcttagcatctatgaaactccttctatgggtcttttggacaagaagagtttgaagatctctgggataaaagacttttcttggtctcctggtggtaacataatcgccttctgggtgcctgaagacaaagatattccagccagggtaaccctgatgcagctccctaccaggcaagagatccgagtgaggaacctgttcaatgtggtggactgcaagctccattggcagaagaacggagactacttgtgtgtgaaagtagataggactccgaaaggcacccagggtgttgtcacaaattttgaaattttccgaatgagggagaaacaggtacctgtggatgtggtcgagatgaaagaaaccatcatagcctttgcctgggaaccaaatggaagtaagtttgctgtgctgcacggagaggctccgcggatatctgtgtctttctaccacgtcaaaaacaacgggaagattgaactcatcaagatgttcgacaagcagcaggcgaacaccatcttctggagcccccaaggacagttcgtggtgttggcgggcctgaggagtatgaacggtgccttagcgtttgtggacacttcggactgcacggtcatgaacatcgcagagcactacatggcttccgacgtcgaatgggatcctactgggcgctacgtcgtcacctctgtgtcctggtggagccataaggtggacaacgcgtactggctgtggactttccagggacgcctcctgcagaagaacaacaaggaccgcttctgccagctgctgtggcggccccggcctcccacactcctgagccaggaacagatcaagcaaattaaaaaggatctgaagaaatactctaagatctttgaacagaaggatcgtttgagtcagtccaaagcctcaaaggaattggtggagagaaggcgcaccatgatggaagatttccggaagtaccggaaaatggcccaggagctctatatggagcagaaaaacgagcgcctggagttgcgaggaggggtggacactgacgagctggacagcaacgtggacgactgggaagaggagaccattgagttcttcgtcactgaagaaatcattcccctcgggaatcaggagtgacctggagcactgtggggacggactccgcctgctgttcccgcgctgagctacaggactcccgagtgtgagccgcggttcctctgttgcagcgcagccgtgtgtgctgtggagccgaggccgtcctgcaggaagccgcgtgactcccgcctcctccctgtgctctctggctctggactgtgactgcgcctggattctgccattgcgacacatttttgtgcctttcagcccctggtgtctgcagtgggggatttaaggcacccgcttccacttctttcttgtttggagttttctgttggaaccgccggcgttggctccgaagacttagcgacgccactggcggcaccttctcctgcgcccagtgatgtttccacggtgcctgtacacagccgagcagcatttccgttgaaggacttgcatccccattgcgggcagtgctggacgtgtcccggagacccaccgggagggcgccgccatgccttgtacccccaccgtgcaggttgtggccggttttctccgcaggttgaacatggaaataaaagcaaacttgtatgaaaaaa

SEQ ID NO: 428214 - DNA, 789 bp, Homo sapiens
gtggagagaaggcgcaccaattcctttgaggctttggactgactcaaacgatccttctgttcaaagatcgtttgagtcagtccaaagcctcaaaggaattggtggagagaaggcgcaccatgatggaagatttccggaagtaccggaaaatggcccaggagctctatatggagcagaaaaacgagcgcctggagttgcgaggaggggtggacactgacgagctggacagcaacgtggacgactgggaagaggagaccattgagttcttcgtcactgaagaaatcattcccctcgggaatcaggagtgacctggagcactgtggcagccgtgtgtgctgtggagccgaggccgtcctgcaggaagccgcgtgactcccgcctcctccctgtgctctctggctctggactgtgactgcgcctggattctgccattgcgacacatttttgtgcctttcagcccctggtgtctgcagtgggggatttaaggcacccgcttccacttctttcttgtttggagttttctgttggaaccgccggcgttggctccgaagacttagcgacgccactggcggcaccttctcctgcgcccagtgatgtttccacggtgcctgtacacagccgagcagcatttccgttgaaggacttgcatccccattgcgggcagtgctggacgtgtcccggagacccaccgggagggcgccgccatgccttgtacccccaccgtgcaggttgtggccggttttctccgcaggttgaacatggaaataaaagcaaacttgtatgaaaaaa

SEQ ID NO: 428215 - DNA, 585 bp, Homo sapiens
gagtgaggagtactttcttgtaaaattacattttctagatatggttggtgatatgattgggatatctgttccctccaaatctcatgctgaaatgtaacccccaggcctggcatggcagctcatacctgcaatcccagcaatttgggaggccaactgggctgaagcttaagcccgggagttcaagtccagcctgggtgacggagcaagaccctgtctaaaaaaaagagaaaagagattgagcctgtgttcttgtttggctttttgttttgccatggagaaaaggaggaaggaagggttaaaaataggtgagaaaatgggaaacatggccgcccttccaggcagggagaccggaggtcaggatcccactgtaggtgcacactgggtgcgagggaagcggcatccacagctgctgacaatgtcgggctcctgcggtcctgctgtgggtgtcctgctctcaggaagggagcagtttcacgtaggtcactccacacaagtggaagcagctgtctctgaaactccaggaatgtgcacctttcctgctgttgcttgctctcccgtccttttaatgaacttttacacgtcggg

SEQ ID NO: 428216 - DNA, 263 bp, Homo sapiens
taagagtcggtactgttgctaggtggagtccatatgagtctgtgcgtgatggtggggttgctaatattctgtctgcattcactccttgtcacagtgagcacagtagtgccacagggtcctggcgaggacctatgaagctgcgcggaatgcccagagcagtggctgtgcagagggagcgctcagcgtcaggtgtgacagcattgagcttctatatagcaaatgagttgttatattctcttcgtgcttttcagtttcgtcatcac

SEQ ID NO: 428217 - DNA, 484 bp, Homo sapiens
cgccttgtcgctaggagagtggctttggtcttttggggtcacacgtctctgacatctctctgttggggtccctgcagcagtgaacatttgctgtaaagggaattctttgtccagttacctcaggaaataagatagtattgttttgaaatacccctgtcgcatcttcttttttttcccatttaaagtatggatcatgacttagggggtacttggcgatggactttgtaaaattgttttccgaggtggtccagcattaccagctctgccctcatgggcagcatgagcacggccaagtcctccagccttggctgccccggcactgtggaagccctcgcagctcgtgacaggcgcgctctttcctttcagagatgttcgacaagcagcaggcgaacaccatcttctggagcccccaaggacagttcgtggtgttggcgggcctgaggaggtaggtgtctgcgctctgagcctgtccgccctgtgagta

SEQ ID NO: 428218 - DNA, 917 bp, Homo sapiens
caagtagctgggactgcaggtgcctgccaccatgcctagctaatttttgtatttttagtagagatggggtttcactgtgttggccatgctggtctcagaactcctgacctcaagtgatctgcccacctcagcctcccaaagtgctgggattactggcgtgagccaccacacccagccatttttaaatcttttttgagacagagtcttactctgttgcccaggctggagtacagtggcgtgatctcggctgactgcagccttcacctcccaggttcaaacgattctggtgcttcagtctcctgagtagctggaattacaggcgcgcaaccactacgcccagctaattttttgtatattttagaagagtcggggtttcaccatgttggccaggctggtctcgaactcctgacctcaagtgatccgcctgcccgcctcagcctctcaaagtgcagggattacaggtgtgagccaccgcgcccggcctaaggtgagtttgttctggacacaaggatggaggcttgagtcagtgggcagcaaggctgctcagcattgggcccgccacccttgaggcaccacttcagtgaccccttcccgtgcctagaaatgaattttcaaggccagagccttgagtcggcttccttccatctacctcgtctttgatctagaaactgaggagggtggggtttccagccttttaaggaaaagaggggactctgcttaggtgaaaggttttcctggtactcttccatccgaggcagggtttggggagccttcggctcattttcaccagcaaagaatgggcacgtttttatttatcgcaaaacttgggactggtcagtatcacggcagtgaacttccaacaatccaaggacattgacgtttcttctttcgtttttacattcttgggcaaaattatg

SEQ ID NO: 428219 - DNA, 3196 bp, Homo sapiens
gttcagtcccgccccgcagcgtccgacgggaaaggaaagggggaggacgccatgttggacggaaccatctgctgccacacatggggtggtcaatgctcccatgagtttactgatgcacagaaacaaccttgctgaatggaattaagcactttcttgtcacaaatatatcagtttgatgattttcgggcgcggtcttgtggatgcgagtcctctcagggtcgttcgtgaggccccagggcgtgggtgcgccccccgccccgcggccttggtgcggcctccccgtcgcacgcacatggctgggctgtagccgtcgcggcgcgcggtgcggcctgggagagtcggaagcgcggcggccgcggagccctgcgagtaggcagcgttgggcccatgcaggacgcggagaacgtggcggtgcccgaggcggccgaggagcgcgccgagcccggccagcagcagccggccgccgagccgccgccagccgaggggctgctgcggcccgcggggcccggcgctccggaggccgcggggaccgaggcctccagtgaggaggtggggatcgcggaggccgggccggagcccgagggcgaggccccaggagagcaggctcgggacgagcgctccgacagccgggcccaggcggtgtccgaggacgcgggaggaaacgagggcagagcggccgaggccgaaccccgggcgctggagaacggcgacgcggacgagccctccttcagcgaccccgaggacttcgtggacgacgtgagcgaggaagaattactgggagatgtactcaaagatcggccccaggaagcagatggaatcgattcggtgattgtagtggacaatgtccctcaggtgggacccgaccgacttgagaaactcaaaaatgtcatccacaagatcttttccaagtttgggaaaatcacaaatgatttttatcctgaagaggatgggaagacaaaagggtatattttcctggagtacgcgtcccctgcccacgctgtggatgctgtgaagaacgccgacggctacaagcttgacaagcagcacacattccgggtcaacctctttacggattttgacaagtatatgacgatcagtgacgagtgggatattccagagaaacagcctttcaaagacctggggaacttacgttactggcttgaagaggcagaatgcagagatcagtacagtgtgatttttgagagtggagaccgcacttccatattctggaatgacgtaaaagaccctgtctcaattgaagaaagagcgagatggacagagacgtatgtgcgttggtctcctaagggcacctacctggctacctttcatcaaagaggcattgctctatgggggggagagaaattcaagcaaattcagagattcagccaccaaggggttcagcttattgacttctcaccttgtgaaaggtacctggtgacctttagccccctgatggacacgcaggatgaccctcaggccataatcatctgggacatccttacggggcacaagaagaggggttttcactgtgagagctcagcccattggcctatttttaagtggagccatgatggcaaattctttgccagaatgaccctggatacgcttagcatctatgaaactccttctatgggtcttttggacaagaagagtttgaagatctctgggataaaagacttttcttggtctcctggtggtaacataatcgccttctgggtgcctgaagacaaagatattccagccagggtaaccctgatgcagctccctaccaggcaagagatccgagtgaggaacctgttcaatgtggtggactgcaagctccattggcagaagaacggagactacttgtgtgtgaaagtagataggactccgaaaggcacccagggtgttgtcacaaattttgaaattttccgaatgagggagaaacaggtacctgtggatgtggtcgagatgaaagaaaccatcatagcctttgcctgggaaccaaatggaagtaagtttgctgtgctgcacggagaggctccgcggatatctgtgtctttctaccacgtcaaaaacaacgggaagattgaactcatcaagatgttcgacaagcagcaggcgaacaccatcttctggagcccccaaggacagttcgtggtgttggcgggcctgaggagtatgaacggtgccttagcgtttgtggacacttcggactgcacggtcatgaacatcgcagagcactacatggcttccgacgtcgaatgggatcctactgggcgctacgtcgtcacctctgtgtcctggtggagccataaggtggacaacgcgtactggctgtggactttccagggacgcctcctgcagaagaacaacaaggaccgcttctgccagctgctgtggcggccccggcctcccacactcctgagccaggaacagatcaagcaaattaaaaaggatctgaagaaatactctaagatctttgaacagaaggatcgtttgagtcagtccaaagcctcaaaggaattggtggagagaaggcgcaccatgatggaagatttccggaagtaccggaaaatggcccaggagctctatatggagcagaaaaacgagcgcctggagttgcgaggaggggtggacactgacgagctggacagcaacgtggacgactgggaagaggagaccattgagttcttcgtcactgaagaaatcattcccctcgggaatcaggagtgacctggagcactgtggcagccgtgtgtgctgtggagccgaggccgtcctgcaggaagccgcgtgactcccgcctcctccctgtgctctctggctctggactgtgactgcgcctggattctgccattgcgacacatttttgtgcctttcagcccctggtgtctgcagtgggggatttaaggcacccgcttccacttctttcttgtttggagttttctgttggaaccgccggcgttggctccgaagacttagcgacgccactggcggcaccttctcctgcgcccagtgatgtttccacggtgcctgtacacagccgagcagcatttccgttgaaggacttgcatccccattgcgggcagtgctggacgtgtcccggagacccaccgggagggcgccgccatgccttgtacccccaccgtgcaggttgtggccggttttctccgcaggttgaacatggaaataaaagcaaacttgtatgaaaaaa

SEQ ID NO: 428220 - DNA, 2320 bp, Homo sapiens
  misc_feature (17)..(17): n is a, c, g, or t
cgagcccggtacccgangcgcacgatggcgcgtcccctgcccacgctgtggatgctgtgaagaacgccgacggctacaagcttgacaagcagcacacattccgggtcaacctctttacggattttgacaagtatatgacgatcagtgacgagtgggatattccagagaaacagcctttcaaagacctggggaacttacgttactggcttgaagaggcagaatgcagagatcagtacagtgtgatttttgagagtggagaccgcacttccatattctggaatgacgtaaaagaccctgtctcaattgaagaaagagcgagatggacagagacgtatgtgcgttggtctcctaagggcacctacctggctacctttcatcaaagaggcattgctctatgggggggagagaaattcaagcaaattcagagattcagccaccaaggggttcagcttattgacttctcaccttgtgaaaggtacctggtgacctttagccccctgatggacacgcaggatgaccctcaggccataatcatctgggacatccttacggggcacaagaagaggggttttcactgtgagagctcagcccattggcctatttttaagtggagccatgatggcaaattctttgccagaatgaccctggatacgcttagcatctatgaaactccttctatgggtcttttggacaagaagagtttgaagatctctgggataaaagacttttcttggtctcctggtggtaacataatcgccttctgggtgcctgaagacaaagatattccagccagggtaaccctgatgcagctccctaccaggcaagagatccgagtgaggaacctgttcaatgtggtggactgcaagctccattggcagaagaacggagactacttgtgtgtgaaagtagataggactccgaaaggcacccagggtgttgtcacaaattttgaaattttccgaatgagggagaaacaggtacctgtggatgtggtcgagatgaaagaaaccatcatagcctttgcctgggaaccaaatggaagtaagtttgctgtgctgcacggagaggctccgcggatatctgtgtctttctaccacgtcaaaaacaacgggaagattgaactcatcaagatgttcgacaagcagcaggcgaacaccatcttctggagcccccaaggacagttcgtggtgttggcgggcctgaggagtatgaacggtgccttagcgtttgtggacacttcggactgcacggtcatgaacatcgcagagcactacatggcttccgacgtcgaatgggatcctactgggcgctacgtcgtcacctctgtgtcctggtggagccataaggtggacaacgcgtactggctgtggactttccagggacgcctcctgcagaagaacaacaaggaccgcttctgccagctgctgtggcggccccggcctcccacactcctgagccaggaacagatcaagcaaattaaaaaggatctgaagaaatactctaagatctttgaacagaaggatcgtttgagtcagtccaaagcctcaaaggaattggtggagagaaggcgcaccatgatggaagatttccggaagtaccggaaaatggcccaggagctctatatggagcagaaaaacgagcgcctggagttgcgaggaggggtggacactgacgagctggacagcaacgtggacgactgggaagaggagaccattgagttcttcgtcactgaagaaatcattcccctcgggaatcaggagtgacctggagcactgtggggacggactccgcctgctgttcccgcgctgagctacaggactcccgagtgtgagccgcggttcctctgttgcagcgcagccgtgtgtgctgtggagccgaggccgtcctgcaggaagccgcgtgactcccgcctcctccctgtgctctctggctctggactgtgactgcgcctggattctgccattgcgacacatttttgtgcctttcagcccctggtgtctgcagtgggggatttaaggcacccgcttccacttctttcttgtttggagttttctgttggaaccgccggcgttggctccgaagacttagcgacgccactggcggcaccttctcctgcgcccagtgatgtttccacggtgcctgtacacagccgagcagcatttccgttgaaggacttgcatccccattgcgggcagtgctggacgtgtcccggagacccaccgggagggcgccgccatgccttgtacccccaccgtgcaggttgtggccggttttctccgcaggttgaacatggaaataaaagcaaacttgtatgaaaaaa

SEQ ID NO: 428221 - DNA, 3412 bp, Homo sapiens
gttcagtcccgccccgcagcgtccgacgggaaaggaaagggggaggacgccatgttggacggaaccatctgctgccacacatggggtggtcaatgctcccatgagtttactgatgcacagaaacaaccttgctgaatggaattaagcactttcttgtcacaaatatatcagtttgatgattttcgggcgcggtcttgtggatgcgagtcctctcagggtcgttcgtgaggccccagggcgtgggtgcgccccccgccccgcggccttggtgcggcctccccgtcgcacgcacatggctgggctgtagccgtcgcggcgcgcggtgcggcctgggagagtcggaagcgcggcggccgcggagccctgcgagtaggcagcgttgggcccatgcaggacgcggagaacgtggcggtgcccgaggcggccgaggagcgcgccgagcccggccagcagcagccggccgccgagccgccgccagccgaggggctgctgcggcccgcggggcccggcgctccggaggccgcggggaccgaggcctccagtgaggaggtggggatcgcggaggccgggccggagcccgaggtgaggaccgagccggcggccgaggcagaggcggcctccggcccgtccgagtcgccctcgccgccggccgccgaggagctgcccgggtcgcatgctgagccccctgtcccggcacagggcgaggccccaggagagcaggctcgggacgagcgctccgacagccgggcccaggcggtgtccgaggacgcgggaggaaacgagggcagagcggccgaggccgaaccccgggcgctggagaacggcgacgcggacgagccctccttcagcgaccccgaggacttcgtggacgacgtgagcgaggaagaattactgggagatgtactcaaagatcggccccaggaagcagatggaatcgattcggtgattgtagtggacaatgtccctcaggtgggacccgaccgacttgagaaactcaaaaatgtcatccacaagatcttttccaagtttgggaaaatcacaaatgatttttatcctgaagaggatgggaagacaaaagggtatattttcctggagtacgcgtcccctgcccacgctgtggatgctgtgaagaacgccgacggctacaagcttgacaagcagcacacattccgggtcaacctctttacggattttgacaagtatatgacgatcagtgacgagtgggatattccagagaaacagcctttcaaagacctggggaacttacgttactggcttgaagaggcagaatgcagagatcagtacagtgtgatttttgagagtggagaccgcacttccatattctggaatgacgtaaaagaccctgtctcaattgaagaaagagcgagatggacagagacgtatgtgcgttggtctcctaagggcacctacctggctacctttcatcaaagaggcattgctctatgggggggagagaaattcaagcaaattcagagattcagccaccaaggggttcagcttattgacttctcaccttgtgaaaggtacctggtgacctttagccccctgatggacacgcaggatgaccctcaggccataatcatctgggacatccttacggggcacaagaagaggggttttcactgtgagagctcagcccattggcctatttttaagtggagccatgatggcaaattctttgccagaatgaccctggatacgcttagcatctatgaaactccttctatgggtcttttggacaagaagagtttgaagatctctgggataaaagacttttcttggtctcctggtggtaacataatcgccttctgggtgcctgaagacaaagatattccagccagggtaaccctgatgcagctccctaccaggcaagagatccgagtgaggaacctgttcaatgtggtggactgcaagctccattggcagaagaacggagactacttgtgtgtgaaagtagataggactccgaaaggcacccagggtgttgtcacaaattttgaaattttccgaatgagggagaaacaggtacctgtggatgtggtcgagatgaaagaaaccatcatagcctttgcctgggaaccaaatggaagtaagtttgctgtgctgcacggagaggctccgcggatatctgtgtctttctaccacgtcaaaaacaacgggaagattgaactcatcaagatgttcgacaagcagcaggcgaacaccatcttctggagcccccaaggacagttcgtggtgttggcgggcctgaggagtatgaacggtgccttagcgtttgtggacacttcggactgcacggtcatgaacatcgcagagcactacatggcttccgacgtcgaatgggatcctactgggcgctacgtcgtcacctctgtgtcctggtggagccataaggtggacaacgcgtactggctgtggactttccagggacgcctcctgcagaagaacaacaaggaccgcttctgccagctgctgtggcggccccggcctcccacactcctgagccaggaacagatcaagcaaattaaaaaggatctgaagaaatactctaagatctttgaacagaaggatcgtttgagtcagtccaaagcctcaaaggaattggtggagagaaggcgcaccatgatggaagatttccggaagtaccggaaaatggcccaggagctctatatggagcagaaaaacgagcgcctggagttgcgaggaggggtggacactgacgagctggacagcaacgtggacgactgggaagaggagaccattgagttcttcgtcactgaagaaatcattcccctcgggaatcaggagtgacctggagcactgtgggccgccatgcctgtctatccaggggacggactccgcctgctgttcccgcgctgagctacaggactcccgagtgtgagccgcggttcctctgttgcagcgcagccgtgtgtgctgtggagccgaggccgtcctgcaggaagccgcgtgactcccgcctcctccctgtgctctctggctctggactgtgactgcgcctggattctgccattgcgacacatttttgtgcctttcagcccctggtgtctgcagtgggggatttaaggcacccgcttccacttctttcttgtttggagttttctgttggaaccgccggcgttggctccgaagacttagcgacgccactggcggcaccttctcctgcgcccagtgatgtttccacggtgcctgtacacagccgagcagcatttccgttgaaggacttgcatccccattgcgggcagtgctggacgtgtcccggagacccaccgggagggcgccgccatgccttgtacccccaccgtgcaggttgtggccggttttctccgcaggttgaacatggaaataaaagcaaacttgtatgaaaaaa

SEQ ID NO: 428222 - DNA, 3668 bp, Homo sapiens
gttcagtcccgccccgcagcgtccgacgggaaaggaaagggggaggacgccatgttggacggaaccatctgctgccacacatggggtggtcaatgctcccatgagtttactgatgcacagaaacaaccttgctgaatggaattaagcactttcttgtcacaaatatatcagtttgatgattttcgggcgcggtcttgtggatgcgagtcctctcagggtcgttcgtgaggccccagggcgtgggtgcgccccccgccccgcggccttggtgcggcctccccgtcgcacgcacatggctgggctgtagccgtcgcggcgcgcggtgcggcctgggagagtcggaagcgcggcggccgcggagccctgcgagtaggcagcgttgggcccatgcaggacgcggagaacgtggcggtgcccgaggcggccgaggagcgcgccgagcccggccagcagcagccggccgccgagccgccgccagccgaggggctgctgcggcccgcggggcccggcgctccggaggccgcggggaccgaggcctccagtgaggaggtggggatcgcggaggccgggccggagcccgaggtgaggaccgagccggcggccgaggcagaggcggcctccggcccgtccgagtcgccctcgccgccggccgccgaggagctgcccgggtcgcatgctgagccccctgtcccggcacagggcgaggccccaggagagcaggctcgggacgagcgctccgacagccgggcccaggcggtgtccgaggacgcgggaggaaacgagggcagagcggccgaggccgaaccccgggcgctggagaacggcgacgcggacgagccctccttcagcgaccccgaggacttcgtggacgacgtgagcgaggaagaattactgggagatgtactcaaagatcggccccaggaagcagatggaatcgattcggtgattgtagtggacaatgtccctcaggtgggacccgaccgacttgagaaactcaaaaatgtcatccacaagatcttttccaagtttgggaaaatcacaaatgatttttatcctgaagaggatgggaagacaaaagggtatattttcctggagtacgcgtcccctgcccacgctgtggatgctgtgaagaacgccgacggctacaagcttgacaagcagcacacattccgggtcaacctctttacggattttgacaagtatatgacgatcagtgacgagtgggatattccagagaaacagcctttcaaagacctggggaacttacgttactggcttgaagaggcagaatgcagagatcagtacagtgtgatttttgagagtggagaccgcacttccatattctggaatgacgtaaaagaccctgtctcaattgaagaaagagcgagatggacagagacgtatgtgcgttggtctcctaagggcacctacctggctacctttcatcaaagaggcattgctctatgggggggagagaaattcaagcaaattcagagattcagccaccaaggggttcagcttattgacttctcaccttgtgaaaggtacctggtgacctttagccccctgatggacacgcaggatgaccctcaggccataatcatctgggacatccttacggggcacaagaagaggggttttcactgtgagagctcagcccattggcctatttttaagtggagccatgatggcaaattctttgccagaatgaccctggatacgcttagcatctatgaaactccttctatgggtcttttggacaagaagagtttgaagatctctgggataaaagacttttcttggtctcctggtggtaacataatcgccttctgggtgcctgaagacaaagatattccagccagggtaaccctgatgcagctccctaccaggcaagagatccgagtgaggaacctgttcaatgtggtggactgcaagctccattggcagaagaacggagactacttgtgtgtgaaagtagataggactccgaaaggcacccagggtgttgtcacaaattttgaaattttccgaatgagggagaaacaggtacctgtggatgtggtcgagatgaaagaaaccatcatagcctttgcctgggaaccaaatggaagtaagtttgctgtgctgcacggagaggctccgcggatatctgtgtctttctaccacgtcaaaaacaacgggaagattgaactcatcaagatgttcgacaagcagcaggcgaacaccatcttctggagcccccaaggacagttcgtggtgttggcgggcctgaggagtatgaacggtgccttagcgtttgtggacacttcggactgcacggtcatgaacatcgcagagcactacatggcttccgacgtcgaatgggatcctactgggcgctacgtcgtcacctctgtgtcctggtggagccataaggtggacaacgcgtactggctgtggactttccagggacgcctcctgcagaagaacaacaaggaccgcttctgccagctgctgtggcggccccggcctcccacactcctgagccaggaacagatcaagcaaattaaaaaggatctgaagaaatactctaagatctttgaacagaaggatcgtttgagtcagtccaaagcctcaaaggaattggtggagagaaggcgcaccatgatggaagatttccggaagtaccggaaaatggcccaggagctctatatggagcagaaaaacgagcgcctggagttgcgaggaggggtggacactgacgagctggacagcaacgtggacgactgggaagaggagaccattgagttcttcgtcactgaagaaatcattcccctcgggaatcaggagtgacctggagcactgtggggacggactccgcctgctgttcccgcgctgagctacaggactcccgagtgtgagccgcggttcctctgttgcagcgcagccgtgtgtgctgtggagccgaggccgtcctgcaggaagccgcgtgactcccgcctcctccctgtgctctctggctctggactgtgactgcgcctggattctgccattgcgacacatttttgtgcctttcagcccctggtgtctgcagtgggggatttaaggcacccgcttccacttctttcttgtttggagttttctgttggaaccgccggcgttggctccgaagacttagcgacgccactggcggcaccttctcctgcgcccagtgatgtttccacggtgcctgtacacagccgagcagcatttccgttgaaggacttgcatccccattgcgggcagtgctggacgtgtcccggagacccaccgggagggcgccgccatgccttgtacccccaccgtgcaggttgtggccggttttctccgcaggttgaacatggaaataaaagcaaacttgtatgaaaaaaaaaaaaaaaaaaaaaagaaaaaaactgtctgcgcgcacagggccccaaagagaggcatagaaaacacagacgttggcgaccacacggcccccagagatgagaagtgaaacacaggcacaaagagggtcacacagggaaagaccgggggccgagaaagagggagcggaatacgacccaaatatacaaagccacgggcgcaacaacgacagagtggagacaacatccaagggagcaagaggcacacacgggacacacaaaggcagcagcggagctagaata

SEQ ID NO: 428223 - DNA, 1890 bp, Homo sapiens
  misc_feature (21)..(21): n is a, c, g, or t
  misc_feature (29)..(29): n is a, c, g, or t
  misc_feature (31)..(31): n is a, c, g, or t
  misc_feature (44)..(44): n is a, c, g, or t
aactgagtatagtacgaggcngggtgtgntntcaccttgtgaanggtacctggtgacctttagccccctgatggacacgcaggatgaccctcaggccataatcatctgggacatccttacggggcacaagaagaggggttttcactgtgagagctcagcccattggcctatttttaagtggagccatgatggcaaattctttgccagaatgaccctggatacgcttagcatctatgaaactccttctatgggtcttttggacaagaagagtttgaagatctctgggataaaagacttttcttggtctcctggtggtaacataatcgccttctgggtgcctgaagacaaagatattccagccagggtaaccctgatgcagctccctaccaggcaagagatccgagtgaggaacctgttcaatgtggtggactgcaagctccattggcagaagaacggagactacttgtgtgtgaaagtagataggactccgaaaggcacccagggtgttgtcacaaattttgaaattttccgaatgagggagaaacaggtacctgtggatgtggtcgagatgaaagaaaccatcatagcctttgcctgggaaccaaatggaagtaagtttgctgtgctgcacggagaggctccgcggatatctgtgtctttctaccacgtcaaaaacaacgggaagattgaactcatcaagatgttcgacaagcagcaggcgaacaccatcttctggagcccccaaggacagttcgtggtgttggcgggcctgaggagtatgaacggtgccttagcgtttgtggacacttcggactgcacggtcatgaacatcgcagagcactacatggcttccgacgtcgaatgggatcctactgggcgctacgtcgtcacctctgtgtcctggtggagccataaggtggacaacgcgtactggctgtggactttccagggacgcctcctgcagaagaacaacaaggaccgcttctgccagctgctgtggcggccccggcctcccacactcctgagccaggaacagatcaagcaaattaaaaaggatctgaagaaatactctaagatctttgaacagaaggatcgtttgagtcagtccaaagcctcaaaggaattggtggagagaaggcgcaccatgatggaagatttccggaagtaccggaaaatggcccaggagctctatatggagcagaaaaacgagcgcctggagttgcgaggaggggtggacactgacgagctggacagcaacgtggacgactgggaagaggagaccattgagttcttcgtcactgaagaaatcattcccctcgggaatcaggagtgacctggagcactgtggggacggactccgcctgctgttcccgcgctgagctacaggactcccgagtgtgagccgcggttcctctgttgcagcgcagccgtgtgtgctgtggagccgaggccgtcctgcaggaagccgcgtgactcccgcctcctccctgtgctctctggctctggactgtgactgcgcctggattctgccattgcgacacatttttgtgcctttcagcccctggtgtctgcagtgggggatttaaggcacccgcttccacttctttcttgtttggagttttctgttggaaccgccggcgttggctccgaagacttagcgacgccactggcggcaccttctcctgcgcccagtgatgtttccacggtgcctgtacacagccgagcagcatttccgttgaaggacttgcatccccattgcgggcagtgctggacgtgtcccggagacccaccgggagggcgccgccatgccttgtacccccaccgtgcaggttgtggccggttttctccgcaggttgaacatggaaataaaagcaaacttgtatgaaaaaa

SEQ ID NO: 428224 - DNA, 3146 bp, Homo sapiens
gttcagtcccgccccgcagcgtccgacgggaaaggaaagggggaggacgccatgttggacggaaccatctgctgccacacatggggtggtcaatgctcccatgagtttactgatgcacagaaacaaccttgctgaatggaattaagcactttcttgtcacaaatatatcagtttgatgattttcgggcgcggtcttgtggatgcgagtcctctcagggtcgttcgtgaggccccagggcgtgggtgcgccccccgccccgcggccttggtgcggcctccccgtcgcacgcacatggctgggctgtagccgtcgcggcgcgcggtgcggcctgggagagtcggaagcgcggcggccgcggagccctgcgagtaggcagcgttgggcccatgcaggacgcggagaacgtggcggtgcccgaggcggccgaggagcgcgccgagcccggccagcagcagccggccgccgagccgccgccagccgaggggctgctgcggcccgcggggcccggcgctccggaggccgcggggaccgaggcctccagtgaggaggtggggatcgcggaggccgggccggagcccgaggtgaggaccgagccggcggccgaggcagaggcggcctccggcccgtccgagtcgccctcgccgccggccgccgaggagctgcccgggtcgcatgctgagccccctgtcccggcacagggcgaggccccaggagagcaggctcgggacgagcgctccgacagccgggcccaggcggtgtccgaggacgcgggaggaaacgagggcagagcggccgaggccgaaccccgggcgctggagaacggcgacgcggacgagccctccttcagcgaccccgaggacttcgtggacgacgtgagcgaggaagaattactgggagatgtactcaaagatcggccccaggaagcagatggaatcgattcggtgattgtagtggacaatgtccctcaggtgggacccgaccgacttgagaaactcaaaaatgtcatccacaagatcttttccaagtttgggaaaatcacaaatgatttttatcctgaagaggatgggaagacaaaagggtatattttcctggagtacgcgtcccctgcccacgctgtggatgctgtgaagaacgccgacggctacaagcttgacaagcagcacacattccgggtcaacctctttacggattttgacaagtatatgacgatcagtgacgagtgggatattccagagaaacagcctttcaaagacctggggaacttacgttactggcttgaagaggcagaatgcagagatcagtacagtgtgatttttgagagtggagaccgcacttccatattctggaatgacgtaaaagaccctgtctcaattgaagaaagagcgaagaggggttttcactgtgagagctcagcccattggcctatttttaagtggagccatgatggcaaattctttgccagaatgaccctggatacgcttagcatctatgaaactccttctatgggtcttttggacaagaagagtttgaagatctctgggataaaagacttttcttggtctcctggtggtaacataatcgccttctgggtgcctgaagacaaagatattccagccagggtaaccctgatgcagctccctaccaggcaagagatccgagtgaggaacctgttcaatgtggtggactgcaagctccattggcagaagaacggagactacttgtgtgtgaaagtagataggactccgaaaggcacccagggtgttgtcacaaattttgaaattttccgaatgagggagaaacaggtacctgtggatgtggtcgagatgaaagaaaccatcatagcctttgcctgggaaccaaatggaagtaagtttgctgtgctgcacggagaggctccgcggatatctgtgtctttctaccacgtcaaaaacaacgggaagattgaactcatcaagatgttcgacaagcagcaggcgaacaccatcttctggagcccccaaggacagttcgtggtgttggcgggcctgaggagtatgaacggtgccttagcgtttgtggacacttcggactgcacggtcatgaacatcgcagagcactacatggcttccgacgtcgaatgggatcctactgggcgctacgtcgtcacctctgtgtcctggtggagccataaggtggacaacgcgtactggctgtggactttccagggacgcctcctgcagaagaacaacaaggaccgcttctgccagctgctgtggcggccccggcctcccacactcctgagccaggaacagatcaagcaaattaaaaaggatctgaagaaatactctaagatctttgaacagaaggatcgtttgagtcagtccaaagcctcaaaggaattggtggagagaaggcgcaccatgatggaagatttccggaagtaccggaaaatggcccaggagctctatatggagcagaaaaacgagcgcctggagttgcgaggaggggtggacactgacgagctggacagcaacgtggacgactgggaagaggagaccattgagttcttcgtcactgaagaaatcattcccctcgggaatcaggagtgacctggagcactgtggggacggactccgcctgctgttcccgcgctgagctacaggactcccgagtgtgagccgcggttcctctgttgcagcgcagccgtgtgtgctgtggagccgaggccgtcctgcaggaagccgcgtgactcccgcctcctccctgtgctctctggctctggactgtgactgcgcctggattctgccattgcgacacatttttgtgcctttcagcccctggtgtctgcagtgggggatttaaggcacccgcttccacttctttcttgtttggagttttctgttggaaccgccggcgttggctccgaagacttagcgacgccactggcggcaccttctcctgcgcccagtgatgtttccacggtgcctgtacacagccgagcagcatttccgttgaaggacttgcatccccattgcgggcagtgctggacgtgtcccggagacccaccgggagggcgccgccatgccttgtacccccaccgtgcaggttgtggccggttttctccgcaggttgaacatggaaataaaagcaaacttgtatgaaaaaa

SEQ ID NO: 428225 - DNA, 3178 bp, Homo sapiens
gttcagtcccgccccgcagcgtccgacgggaaaggaaagggggaggacgccatgttggacggaaccatctgctgccacacatggggtggtcaatgctcccatgagtttactgatgcacagaaacaaccttgctgaatggaattaagcactttcttgtcacaaatatatcagtttgatgattttcgggcgcggtcttgtggatgcgagtcctctcagggtcgttcgtgaggccccagggcgtgggtgcgccccccgccccgcggccttggtgcggcctccccgtcgcacgcacatggctgggctgtagccgtcgcggcgcgcggtgcggcctgggagagtcggaagcgcggcggccgcggagccctgcgagtaggcagcgttgggcccatgcaggacgcggagaacgtggcggtgcccgaggcggccgaggagcgcgccgagcccggccagcagcagccggccgccgagccgccgccagccgaggggctgctgcggcccgcggggcccggcgctccggaggccgcggggaccgaggcctccagtgaggaggtggggatcgcggaggccgggccggagcccgaggtgaggaccgagccggcggccgaggcagaggcggcctccggcccgtccgagtcgccctcgccgccggccgccgaggagctgcccgggtcgcatgctgagccccctgtcccggcacagggcgaggccccaggagagcaggctcgggacgagcgctccgacagccgggcccaggcggtgtccgaggacgcgggaggaaacgagggcagagcggccgaggccgaaccccgggcgctggagaacggcgacgcggacgagccctccttcagcgaccccgaggacttcgtggacgacgtgagcgaggaagaattactgggagatgtactcaaagatcggccccaggaagcagatggaatcgattcggtgattgtagtggacaatgtccctcaggtgggacccgaccgacttgagaaactcaaaaatgtcatccacaagatcttttccaagtttgggaaaatcacaaatgatttttatcctgaagaggatgggaagacaaaagggtatattttcctggagtacgcgtcccctgcccacgctgtggatgctgtgaagaacgccgacggctacaagcttgacaagcagcacacattccgggtcaacctctttacggattttgacaagtatatgacgatcagtgacgagtgggatattccagagaaacagcctttcaaagacctggggaacttacgttactggcttgaagaggcagaatgcagagatcagtacagtgtgatttttgagagtggagaccgcacttccatattctggaatgacgtaaaagaccctgtctcaattgaagaaagagcgagatggacagagacgtatgtgcgttggtctcctaagggcacctacctggctacctttcatcaaagaggcattgctctatgggggggagagaaattcaagcaaattcagagattcagccaccaaggggttcagcttattgacttctcaccttgtgaaaggtacctggtgacctttagccccctgatggacacgcaggatgaccctcaggccataatcatctgggacatccttacggggcacaagaagaggggttttcactgtgagagctcagcccattggcctatttttaagtggagccatgatggcaaattctttgccagaatgaccctggatacgcttagcatctatgaaactccttctatgggtcttttggacaagaagagtttgaagatctctgggataaaagacttttcttggtctcctggtggtaacataatcgccttctgggtgcctgaagacaaagatattccagccagggtaaccctgatgcagctccctaccaggcaagagatccgagtgaggaacctgttcaatgtggtggactgcaagctccattggcagaagaacggagactacttgtgtgtgaaagtagataggactccgaaaggcacccagggtgttgtcacaaattttgaaattttccgaatgagggagaaacaggtacctgtggatgtggtcgagatgaaagaaaccatcatagcctttgcctgggaaccaaatggaagtaagtttgctgtgctgcacggagaggctccgcggatatctgtgtctttctaccacgtcaaaaacaacgggaagattgaactcatcaagatgttcgacaagcagcaggcgaacaccatcttctggagcccccaaggacagttcgtggtgttggcgggcctgaggagtatgaacggtgccttagcgtttgtggacacttcggactgcacggtcatgaacatcgcagagcactacatggcttccgacgtcgaatgggatcctactgggcgctacgtcgtcacctctgtgtcctggtggagccataaggtggacaacgcgtactggctgtggactttccagggacgcctcctgcagaagaacaacaaggaccgcttctgccagctgctgtggcggccccggcctcccacactcctgagccaggaacagatcaagcaaattaaaaaggatctgaagaaatactctaagatctttgaacagaaggatcgtttgagtcagtccaaagcctcaaaggaattggtggagagaaggcgcaccatgatggaagatttccggaagtaccggaaaatggcccaggagctctatatggagcagaaaaacgagcgcctggagttgcgaggaggggtggacactgacgagctggacagcaacgtggacgactgggaagaggagaccattgagttcttcgtcactgaagaaatcattcccctcgggaatcaggagtgacctggagcactgtgcccctggtgtctgcagtgggggatttaaggcacccgcttccacttctttcttgtttggagttttctgttggaaccgccggcgttggctccgaagacttagcgacgccactggcggcaccttctcctgcgcccagtgatgtttccacggtgcctgtacacagccgagcagcatttccgttgaaggacttgcatccccattgcgggcagtgctggacgtgtcccggagacccaccgggagggcgccgccatgccttgtacccccaccgtgcaggttgtggccggttttctccgcaggttgaacatggaaataaaagcaaacttgtatgaaaaaa

SEQ ID NO: 428226 - DNA, 2995 bp, Homo sapiens
gttcagtcccgccccgcagcgtccgacgggaaaggaaagggggaggacgccatgttggacggaaccatctgctgccacacatggggtggtcaatgctcccatgagtttactgatgcacagaaacaaccttgctgaatggaattaagcactttcttgtcacaaatatatcagtttgatgattttcgggcgcggtcttgtggatgcgagtcctctcagggtcgttcgtgaggccccagggcgtgggtgcgccccccgccccgcggccttggtgcggcctccccgtcgcacgcacatggctgggctgtagccgtcgcggcgcgcggtgcggcctgggagagtcggaagcgcggcggccgcggagccctgcgagtaggcagcgttgggcccatgcaggacgcggagaacgtggcggtgcccgaggcggccgaggagcgcgccgagcccggccagcagcagccggccgccgagccgccgccagccgaggggctgctgcggcccgcggggcccggcgctccggaggccgcggggaccgaggcctccagtgaggaggtggggatcgcggaggccgggccggagcccgaggtgaggaccgagccggcggccgaggcagaggcggcctccggcccgtccgagtcgccctcgccgccggccgccgaggagctgcccgggtcgcatgctgagccccctgtcccggcacagggcgaggccccaggagagcaggctcgggacgagcgctccgacagccgggcccaggcggtgtccgaggacgcgggaggaaacgagggcagagcggccgaggccgaaccccgggcgctggagaacggcgacgcggacgagccctccttcagcgaccccgaggacttcgtggacgacgtgagcgaggaagaattactgggagatgtactcaaagatcggccccaggaagcagatggaatcgattcggtgattgtagtggacaatgtccctcaggtgggacccgaccgacttgagaaactcaaaaatgtcatccacaagatcttttccaagtttgggaaaatcacaaatgatttttatcctgaagaggatgggaagacaaaagggtatattttcctggagtacgcgtcccctgcccacgctgtggatgctgtgaagaacgccgacggctacaagcttgacaagcagcacacattccgggtcaacctctttacggattttgacaagtatatgacgatcagtgacgagtgggatattccagagaaacagcctttcaaagacctggggaacttacgttactggcttgaagaggcagaatgcagagatcagtacagtgtgatttttgagagtggagaccgcacttccatattctggaatgacgtaaaagaccctgtctcaattgaagaaagagcgagatggacagagacgtatgtgcgttggtctcctaagggcacctacctggctacctttcatcaaagaggcattgctctatgggggggagagaaattcaagcaaattcagagattcagccaccaaggggttcagcttattgacttctcaccttgtgaaaggtacctggtgacctttagccccctgatggacacgcaggatgaccctcaggccataatcatctgggacatccttacggggcacaagaagaggggttttcactgtgagagctcagcccattggcctatttttaagtggagccatgatggcaaattctttgccagaatgaccctggatacgcttagcatctatgaaactccttctatgggtcttttggacaagaagagtttgaagatctctgggataaaagacttttcttggtctcctggtggtaacataatcgccttctgggtgcctgaagacaaagatattccagccagggtaaccctgatgcagctccctaccaggcaagagatccgagtgaggaacctgttcaatgtggtggactgcaagctccattggcagaagaacggagactacttgtgtgtgaaagtagataggactccgaaaggcacccagggtgttgtcacaaattttgaaattttccgaatgagggagaaacaggtacctgtggatgtggtcgagatgaaagaaaccatcatagcctttgcctgggaaccaaatggaagtaagtttgctgtgctgcacggagaggctccgcggatatctgtgtctttctaccacgtcaaaaacaacgggaagattgaactcatcaagatgttcgacaagcagcaggcgaacaccatcttctggagcccccaaggacagttcgtggtgttggcgggcctgaggagtatgaacggtgccttagcgtttgtggacacttcggactgcacggtcatgaacatcgcagagcactacatggcttccgacgtcgaatgggatcctactgggcgctacgtcgtcacctctgtgtcctggtggagccataaggtggacaacgcgtactggctgtggactttccagggacgcctcctgcagaagaacaacaaggaccgcttctgccagctgctgtggcggccccggcctcccacactcctgagccaggaacagatcaagcaaattaaaaaggatctgaagaaatactctaagatctttgaacagaaggatcgtttgagtcagtccaaagcctcaaaggaattggtggagagaaggcgcaccatgatggaagatttccggaagtaccggaaaatggcccaggagctctatatggagcagaaaaacgagcgcctggagttgcgaggaggggtggacactgacgagctggacacgaagacttagcgacgccactggcggcaccttctcctgcgcccagtgatgtttccacggtgcctgtacacagccgagcagcatttccgttgaaggacttgcatccccattgcgggcagtgctggacgtgtcccggagacccaccgggagggcgccgccatgccttgtacccccaccgtgcaggttgtggccggttttctccgcaggttgaacatggaaataaaagcaaacttgtatgaaaaaa

SEQ ID NO: 428227 - DNA, 2086 bp, Homo sapiens
caagtagctgggactgcaggtgcctgccaccatgcctagctaatttttgtatttttagtagagatggggtttcactgtgttggccatgctggtctcagaactcctgacctcaagtgatctgcccacctcagcctcccaaagtgctgggattactggcgtgagccaccacacccagccatttttaaatcttttttgagacagagtcttactctgttgcccaggctggagtacagtggcgtgatctcggctgactgcagccttcacctcccaggttcaaacgattctggtgcttcagtctcctgagtagctggaattacaggcgcgcaaccactacgcccagctaattttttgtatattttagaagagtcggggtttcaccatgttggccaggctggtctcgaactcctgacctcaagtgatccgcctgcccgcctcagcctctcaaagtgcagggattacaggtgtgagccaccgcgcccggcctaagagacttttcttggtctcctggtggtaacataatcgccttctgggtgcctgaagacaaagatattccagccagggtaaccctgatgcagctccctaccaggcaagagatccgagtgaggaacctgttcaatgtggtggactgcaagctccattggcagaagaacggagactacttgtgtgtgaaagtagataggactccgaaaggcacccagggtgttgtcacaaattttgaaattttccgaatgagggagaaacaggtacctgtggatgtggtcgagatgaaagaaaccatcatagcctttgcctgggaaccaaatggaagtaagtttgctgtgctgcacggagaggctccgcggatatctgtgtctttctaccacgtcaaaaacaacgggaagattgaactcatcaagatgttcgacaagcagcaggcgaacaccatcttctggagcccccaaggacagttcgtggtgttggcgggcctgaggagtatgaacggtgccttagcgtttgtggacacttcggactgcacggtcatgaacatcgcagagcactacatggcttccgacgtcgaatgggatcctactgggcgctacgtcgtcacctctgtgtcctggtggagccataaggtggacaacgcgtactggctgtggactttccagggacgcctcctgcagaagaacaacaaggaccgcttctgccagctgctgtggcggccccggcctcccacactcctgagccaggaacagatcaagcaaattaaaaaggatctgaagaaatactctaagatctttgaacagaaggatcgtttgagtcagtccaaagcctcaaaggaattggtggagagaaggcgcaccatgatggaagatttccggaagtaccggaaaatggcccaggagctctatatggagcagaaaaacgagcgcctggagttgcgaggaggggtggacactgacgagctggacagcaacgtggacgactgggaagaggagaccattgagttcttcgtcactgaagaaatcattcccctcgggaatcaggagtgacctggagcactgtggggacggactccgcctgctgttcccgcgctgagctacaggactcccgagtgtgagccgcggttcctctgttgcagcgcagccgtgtgtgctgtggagccgaggccgtcctgcaggaagccgcgtgactcccgcctcctccctgtgctctctggctctggactgtgactgcgcctggattctgccattgcgacacatttttgtgcctttcagcccctggtgtctgcagtgggggatttaaggcacccgcttccacttctttcttgtttggagttttctgttggaaccgccggcgttggctccgaagacttagcgacgccactggcggcaccttctcctgcgcccagtgatgtttccacggtgcctgtacacagccgagcagcatttccgttgaaggacttgcatccccattgcgggcagtgctggacgtgtcccggagacccaccgggagggcgccgccatgccttgtacccccaccgtgcaggttgtggccggttttctccgcaggttgaacatggaaataaaagcaaacttgtatgaaaaaa

SEQ ID NO: 428228 - DNA, 2859 bp, Homo sapiens
gttcagtcccgccccgcagcgtccgacgggaaaggaaagggggaggacgccatgttggacggaaccatctgctgccacacatggggtggtcaatgctcccatgagtttactgatgcacagaaacaaccttgctgaatggaattaagcactttcttgtcacaaatatatcagtttgatgattttcgggcgcggtcttgtggatgcgagtcctctcagggtcgttcgtgaggccccagggcgtgggtgcgccccccgccccgcggccttggtgcggcctccccgtcgcacgcacatggctgggctgtagccgtcgcggcgcgcggtgcggcctgggagagtcggaagcgcggcggccgcggagccctgcgagtaggcagcgttgggcccatgcaggacgcggagaacgtggcggtgcccgaggcggccgaggagcgcgccgagcccggccagcagcagccggccgccgagccgccgccagccgaggggctgctgcggcccgcggggcccggcgctccggaggccgcggggaccgaggcctccagtgaggaggtggggatcgcggaggccgggccggagcccgaggtgaggaccgagccggcggccgaggcagaggcggcctccggcccgtccgagtcgccctcgccgccggccgccgaggagctgcccgggtcgcatgctgagccccctgtcccggcacagggcgaggccccaggagagcaggctcgggacgagcgctccgacagccgggcccaggcggtgtccgaggacgcgggaggaaacgagggcagagcggccgaggccgaaccccgggcgctggagaacggcgacgcggacgagccctccttcagcgaccccgaggacttcgtggacgacgtgagcgaggaagaattactgggagatgtactcaaagatcggccccaggaagcagatggaatcgattcggtgattgtagtggacaatgtccctcaggtgggacccgaccgacttgagaaactcaaaaatgtcatccacaagatcttttccaagtttgggaaaatcacaaatgatttttatcctgaagaggatgggaagacaaaagggtatattttcctggagtacgcgtcccctgcccacgctgtggatgctgtgaagaacgccgacggctacaagcttgacaagcagcacacattccgggtcaacctctttacggattttgacaagtatatgacgatcagtgacgagtgggatattccagagaaacagcctttcaaagacctggggaacttacgttactggcttgaagaggcagaatgcagagatcagtacagtgtgatttttgagagtggagaccgcacttccatattctggaatgacgtaaaagaccctgtctcaattgaagaaagagcgagatggacagagacgtatgtgcgttggtctcctaagggcacctacctggctacctttcatcaaagaggcattgctctatgggggggagagaaattcaagcaaattcagagattcagccaccaaggggttcagcttattgacttctcaccttgtgaaagaaaccatcatagcctttgcctgggaaccaaatggaagtaagtttgctgtgctgcacggagaggctccgcggatatctgtgtctttctaccacgtcaaaaacaacgggaagattgaactcatcaagatgttcgacaagcagcaggcgaacaccatcttctggagcccccaaggacagttcgtggtgttggcgggcctgaggagtatgaacggtgccttagcgtttgtggacacttcggactgcacggtcatgaacatcgcagagcactacatggcttccgacgtcgaatgggatcctactgggcgctacgtcgtcacctctgtgtcctggtggagccataaggtggacaacgcgtactggctgtggactttccagggacgcctcctgcagaagaacaacaaggaccgcttctgccagctgctgtggcggccccggcctcccacactcctgagccaggaacagatcaagcaaattaaaaaggatctgaagaaatactctaagatctttgaacagaaggatcgtttgagtcagtccaaagcctcaaaggaattggtggagagaaggcgcaccatgatggaagatttccggaagtaccggaaaatggcccaggagctctatatggagcagaaaaacgagcgcctggagttgcgaggaggggtggacactgacgagctggacagcaacgtggacgactgggaagaggagaccattgagttcttcgtcactgaagaaatcattcccctcgggaatcaggagtgacctggagcactgtggggacggactccgcctgctgttcccgcgctgagctacaggactcccgagtgtgagccgcggttcctctgttgcagcgcagccgtgtgtgctgtggagccgaggccgtcctgcaggaagccgcgtgactcccgcctcctccctgtgctctctggctctggactgtgactgcgcctggattctgccattgcgacacatttttgtgcctttcagcccctggtgtctgcagtgggggatttaaggcacccgcttccacttctttcttgtttggagttttctgttggaaccgccggcgttggctccgaagacttagcgacgccactggcggcaccttctcctgcgcccagtgatgtttccacggtgcctgtacacagccgagcagcatttccgttgaaggacttgcatccccattgcgggcagtgctggacgtgtcccggagacccaccgggagggcgccgccatgccttgtacccccaccgtgcaggttgtggccggttttctccgcaggttgaacatggaaataaaagcaaacttgtatgaaaaaa

SEQ ID NO: 428229 - DNA, 2974 bp, Homo sapiens
gttcagtcccgccccgcagcgtccgacgggaaaggaaagggggaggacgccatgttggacggaaccatctgctgccacacatggggtggtcaatgctcccatgagtttactgatgcacagaaacaaccttgctgaatggaattaagcactttcttgtcacaaatatatcagtttgatgattttcgggcgcggtcttgtggatgcgagtcctctcagggtcgttcgtgaggccccagggcgtgggtgcgccccccgccccgcggccttggtgcggcctccccgtcgcacgcacatggctgggctgtagccgtcgcggcgcgcggtgcggcctgggagagtcggaagcgcggcggccgcggagccctgcgagtaggcagcgttgggcccatgcaggacgcggagaacgtggcggtgcccgaggcggccgaggagcgcgccgagcccggccagcagcagccggccgccgagccgccgccagccgaggggctgctgcggcccgcggggcccggcgctccggaggccgcggggaccgaggcctccagtgaggaggtggggatcgcggaggccgggccggagcccgaggtgaggaccgagccggcggccgaggcagaggcggcctccggcccgtccgagtcgccctcgccgccggccgccgaggagctgcccgggtcgcatgctgagccccctgtcccggcacagggcgaggccccaggagagcaggctcgggacgagcgctccgacagccgggcccaggcggtgtccgaggacgcgggaggaaacgagggcagagcggccgaggccgaaccccgggcgctggagaacggcgacgcggacgagccctccttcagcgaccccgaggacttcgtggacgacgtgagcgaggaagaattactgggagatgtactcaaagatcggccccaggaagcagatggaatcgattcggtgattgtagtggacaatgtccctcaggtgggacccgaccgacttgagaaactcaaaaatgtcatccacaagatcttttccaagtttgggaaaatcacaaatgatttttatcctgaagaggatgggaagacaaaagggtatattttcctggagtacgcgtcccctgcccacgctgtggatgctgtgaagaacgccgacggctacaagcttgacaagcagcacacattccgggtcaacctctttacggattttgacaagtatatgacgatcagtgacgagtgggatattccagagaaacagcctttcaaagacctggggaacttacgttactggcttgaagaggcagaatgcagagatcagtacagtgtgatttttgagagtggagaccgcacttccatattctggaatgacgtaaaagaccctgtctcaattgaagaaagagcgagatggacagagacgtatgtgcgttggtctcctaagggcacctacctggctacctttcatcaaagaggcattgctctatgggggggagagaaattcaagcaaattcagagattcagccaccaaggggttcagcttattgacttctcaccttgtgaaaggtacctggtgacctttagccccctgatggacacgcaggatgaccctcaggccataatcatctgggacatccttacggggcacaagaagaggggttttcactgtgagagctcagcccattggcctatttttaagtggagccatgatggcaaattctttgccagaatgaccctggatacgcttagcatctatgaaactccttctaccacgtcaaaaacaacgggaagattgaactcatcaagatgttcgacaagcagcaggcgaacaccatcttctggagcccccaaggacagttcgtggtgttggcgggcctgaggagtatgaacggtgccttagcgtttgtggacacttcggactgcacggtcatgaacatcgcagagcactacatggcttccgacgtcgaatgggatcctactgggcgctacgtcgtcacctctgtgtcctggtggagccataaggtggacaacgcgtactggctgtggactttccagggacgcctcctgcagaagaacaacaaggaccgcttctgccagctgctgtggcggccccggcctcccacactcctgagccaggaacagatcaagcaaattaaaaaggatctgaagaaatactctaagatctttgaacagaaggatcgtttgagtcagtccaaagcctcaaaggaattggtggagagaaggcgcaccatgatggaagatttccggaagtaccggaaaatggcccaggagctctatatggagcagaaaaacgagcgcctggagttgcgaggaggggtggacactgacgagctggacagcaacgtggacgactgggaagaggagaccattgagttcttcgtcactgaagaaatcattcccctcgggaatcaggagtgacctggagcactgtggggacggactccgcctgctgttcccgcgctgagctacaggactcccgagtgtgagccgcggttcctctgttgcagcgcagccgtgtgtgctgtggagccgaggccgtcctgcaggaagccgcgtgactcccgcctcctccctgtgctctctggctctggactgtgactgcgcctggattctgccattgcgacacatttttgtgcctttcagcccctggtgtctgcagtgggggatttaaggcacccgcttccacttctttcttgtttggagttttctgttggaaccgccggcgttggctccgaagacttagcgacgccactggcggcaccttctcctgcgcccagtgatgtttccacggtgcctgtacacagccgagcagcatttccgttgaaggacttgcatccccattgcgggcagtgctggacgtgtcccggagacccaccgggagggcgccgccatgccttgtacccccaccgtgcaggttgtggccggttttctccgcaggttgaacatggaaataaaagcaaacttgtatgaaaaaa

SEQ ID NO: 428230 - DNA, 2726 bp, Homo sapiens
gttcagtcccgccccgcagcgtccgacgggaaaggaaagggggaggacgccatgttggacggaaccatctgctgccacacatggggtggtcaatgctcccatgagtttactgatgcacagaaacaaccttgctgaatggaattaagcactttcttgtcacaaatatatcagtttgatgattttcgggcgcggtcttgtggatgcgagtcctctcagggtcgttcgtgaggccccagggcgtgggtgcgccccccgccccgcggccttggtgcggcctccccgtcgcacgcacatggctgggctgtagccgtcgcggcgcgcggtgcggcctgggagagtcggaagcgcggcggccgcggagccctgcgagtaggcagcgttgggcccatgcaggacgcggagaacgtggcggtgcccgaggcggccgaggagcgcgccgagcccggccagcagcagccggccgccgagccgccgccagccgaggggctgctgcggcccgcggggcccggcgctccggaggccgcggggaccgaggcctccagtgaggaggtggggatcgcggaggccgggccggagcccgaggtgaggaccgagccggcggccgaggcagaggcggcctccggcccgtccgagtcgccctcgccgccggccgccgaggagctgcccgggtcgcatgctgagccccctgtcccggcacagggcgaggccccaggagagcaggctcgggacgagcgctccgacagccgggcccaggcggtgtccgaggacgcgggaggaaacgagggcagagcggccgaggccgaaccccgggcgctggagaacggcgacgcggacgagccctccttcagcgaccccgaggacttcgtggacgacgtgagcgaggaagaattactgggagatgtactcaaagatcggccccaggaagcagatggaatcgattcggtgattgtagtggacaatgtccctcaggtgggacccgaccgacttgagaaactcaaaaatgtcatccacaagatcttttccaagtttgggaaaatcacaaatgatttttatcctgaagaggatgggaagacaaaagggtatattttcctggagtacgcgtcccctgcccacgctgtggatgctgtgaagaacgccgacggctacaagcttgacaagcagcacacattccgggtcaacctctttacggattttgacaagtatatgacgatcagtgacgagtgggatattccagagaaacagcctttcaaagacctggggaacttacgttactggcttgaagaggcagaatgcagagatcagtacagtgtgatttttgagagtggagaccgcacttccatattctggaatgacgtaaaagaccctgtctcaattgaagaaagagcgagatggacagagacgtatgtgcgttggtctcctaagggcacctacctggctacctttcatcaaagaggcattgctctatgggggggagagaaattcaagcaaattcagagattcagccaccaaggggttcagcttattgacttctcaccttgtgaaaggtacctggtgacctttagccccctgatggacacgcaggatgaccctcaggccataatcatctgggacatccttacggggcacaagaagaggggttttcactgtgagagctcagcccattggcctatttttaagtggagccatgatggcaaattctttgccagaatgaccctggatacgcttagcatctatgaaactccttctatgggtcttttggacaagaagagtttgaagatctctgggataaaagacttttcttggtctcctggtggtaacataatcgccttctgggtgcctgaagacaaagatattccagccagggtaaccctgatgcagctccctaccaggcaagagatccgagtgaggaacctgttcaatgtggtggactgcaagctccattggcagaagaacggagactacttgtgtgtgaaagtagataggactccgaaaggcacccagggtgttgtcacaaattttgaaattttccgaatgagggagaaacaggtacctgtggatgtggtcgagatgaaagaaaccatcatagcctttgcctgggaaccaaatggaagtaagtttgctgtgctgcacggagaggctccgcggatatctgtgtctttctaccacgtcaaaaacaacgggaagattgaactcatcaagatgttcgacaagcagcaggcgaacaccatcttctggagcccccaaggacagttcgtggtgttggcgggcctgaggagtatgaacggtgccttagcgtttgtggacacttcggactgcacggtcatgaacatcgcagagcactacatggcttccgacgtcgaatgggatcttgcgacacatttttgtgcctttcagcccctggtgtctgcagtgggggatttaaggcacccgcttccacttctttcttgtttggagttttctgttggaaccgccggcgttggctccgaagacttagcgacgccactggcggcaccttctcctgcgcccagtgatgtttccacggtgcctgtacacagccgagcagcatttccgttgaaggacttgcatccccattgcgggcagtgctggacgtgtcccggagacccaccgggagggcgccgccatgccttgtacccccaccgtgcaggttgtggccggttttctccgcaggttgaacatggaaataaaagcaaacttgtatgaaaaaa

SEQ ID NO: 428231 - DNA, 1642 bp, Homo sapiens
gatgattttcccctgatagttacacctgattggaggatcgccttaccacgggcatggatactcttagatgtagaagacgtgtccaaaagtagctcggtgagctcgaagtgtctaaaagagcaccaatcatactagataaatactatcgtgtgtgaaccctggacttggaggtccggagttgcgtgtccatggctgttgtccaaagattgtgaaaagcggcgaatcgactgtgaagacacacgagggatagcgtgatggtatgctaggttgcagacaatagaatcgacagatccactcgctacgtcctattgctcgtggtgatacgaagatgcggaacgtcacggtcttgatgctcgcgtgagggcggaagagtgtcgccgtgaactagtcgtgtcggttgttctcttgcactctcagaactgcgagatgagtaaagatgggactccgtccagatgttcgacaagcagcaggcgaacaccatcttctggagcccccaaggacagttcgtggtgttggcgggcctgaggagtatgaacggtgccttagcgtttgtggacacttcggactgcacggtcatgaacatcgcagagcactacatggcttccgacgtcgaatgggatcctactgggcgctacgtcgtcacctctgtgtcctggtggagccataaggtggacaacgcgtactggctgtggactttccagggacgcctcctgcagaagaacaacaaggaccgcttctgccagctgctgtggcggccccggcctcccacactcctgagccaggaacagatcaagcaaattaaaaaggatctgaagaaatactctaagatctttgaacagaaggatcgtttgagtcagtccaaagcctcaaaggaattggtggagagaaggcgcaccatgatggaagatttccggaagtaccggaaaatggcccaggagctctatatggagcagaaaaacgagcgcctggagttgcgaggaggggtggacactgacgagctggacagcaacgtggacgactgggaagaggagaccattgagttcttcgtcactgaagaaatcattcccctcgggaatcaggagtgacctggagcactgtggggacggactccgcctgctgttcccgcgctgagctacaggactcccgagtgtgagccgcggttcctctgttgcagcgcagccgtgtgtgctgtggagccgaggccgtcctgcaggaagccgcgtgactcccgcctcctccctgtgctctctggctctggactgtgactgcgcctggattctgccattgcgacacatttttgtgcctttcagcccctggtgtctgcagtgggggatttaaggcacccgcttccacttctttcttgtttggagttttctgttggaaccgccggcgttggctccgaagacttagcgacgccactggcggcaccttctcctgcgcccagtgatgtttccacggtgcctgtacacagccgagcagcatttccgttgaaggacttgcatccccattgcgggcagtgctggacgtgtcccggagacccaccgggagggcgccgccatgccttgtacccccaccgtgcaggttgtggccggttttctccgcaggttgaacatggaaataaaagcaaacttgtatgaaaaaa

SEQ ID NO: 428232 - DNA, 1316 bp, Homo sapiens
tgtccacacttgctactgtatttttggaggcttacttagcctcagataacatttccagtaaaaataatatgatggcagtcgtatgtaatactcactgcacactctgcatctgtgatttggtaagtctcacagcggccaccagaggctgttgctgtgcttgtttccatgttaacgccgaggctggctccctggggaccccatgccgcagcacctctcaggagtgggatgccaggaggtatgcgtctccatgaagcctgacggtcctgtctgtctttgcagtatgaacggtgccttagcgtttgtggacacttcggactgcacggtcatgaacatcgcagagcactacatggcttccgacgtcgaatgggatcctactgggcgctacgtcgtcacctctgtgtcctggtggagccataaggtggacaacgcgtactggctgtggactttccagggacgcctcctgcagaagaacaacaaggaccgcttctgccagctgctgtggcggccccggcctcccacactcctgagccaggaacagatcaagcaaattaaaaaggatctgaagaaatactctaagatctttgaacagaaggatcgtttgagtcagtccaaagcctcaaaggaattggtggagagaaggcgcaccatgatggaagatttccggaagtaccggaaaatggcccaggagctctatatggagcagaaaaacgagcgcctggagttgcgaggaggggtggacactgacgagctggacagcaacgtggacgactgggaagaggagaccattgagttcttcgtcactgaagaaatcattcccctcgggaatcaggagtgacctggagcactgtggcagccgtgtgtgctgtggagccgaggccgtcctgcaggaagccgcgtgactcccgcctcctccctgtgctctctggctctggactgtgactgcgcctggattctgccattgcgacacatttttgtgcctttcagcccctggtgtctgcagtgggggatttaaggcacccgcttccacttctttcttgtttggagttttctgttggaaccgccggcgttggctccgaagacttagcgacgccactggcggcaccttctcctgcgcccagtgatgtttccacggtgcctgtacacagccgagcagcatttccgttgaaggacttgcatccccattgcgggcagtgctggacgtgtcccggagacccaccgggagggcgccgccatgccttgtacccccaccgtgcaggttgtggccggttttctccgcaggttgaacatggaaataaaagcaaacttgtatgaaaaaa

SEQ ID NO: 428233 - DNA, 2088 bp, Homo sapiens
  misc_feature (127)..(127): n is a, c, g, or t
cctgggcccagggacccctgaaaaggagtgagaatgtctgcagagaggagtcgtttcctttgaagtctgaacagagttccataaccgcagacattaagatctgttttggggtcagtggttgagtccnagctgccgcgttacccacaactcgtattccaaaactgctggttaagtttgtcaaggactttcagtatttagtgacttgtaaaaacattgatggaggcactgatacttgaactagtccatgccaatagagcctgtgaaaccaaacgcgggtaattttgtttaatgagatacagaatttgtaggaatatcaacttcccaaatgttactgcaagtgtctagagttagaaatcttcgcattcgaatcaggatatgttgatcacagcctgtgtccaggtatgttcagatgtcactgcggtggggcctgccttgacacttgaaatcactttaggccaggcacagtggctcacacctgtaatcccagcacttcaggaggcagaggtagaaaaatcacttgaacccaggagtttgagactagcctgagcaacatagcgaaaccctagccccattaaaaaaaaaaaaaaaaaaaagactttttaagctgttgaccactctccttgagttatgaacacttagcttccaaaatgccggcctgcaacaaggagtttatgctgagtgccagtgaaggcgccctccttcatgagagaggcctgccatgaggagagcggaactaggcggcgtgtagtgatgcagttagcttacatccagcacagggctccgcacagctcacacccggcccagggctcagcagtgagtagtgctatgcagttagcttacgtttggcacagggttcagtccagtttaaatccagcacggggttcagcggcgcagtagtgaggcagttagcttacatccagcatggggttcttattgccagccagaatgtgcaggcctgtgctgtgatgagcgctgctccagctgctccgtgccccgcactccgggtcggttgcataatggaggtgtcttgcattgactgcccacctaccctgctgtcagctcagcacaggcagagctttgtttgcttcacacgtgtccccgatacccaggaccttgttcagcaagtgacatagtcacggttgtggctctctgacccctctgtgtcctggtgtgtccctgccctggcctaggtggacaacgcgtactggctgtggactttccagggacgcctcctgcagaagaacaacaaggaccgcttctgccagctgctgtggcggccccggcctcccacactcctgagccaggaacagatcaagcaaattaaaaaggatctgaagaaatactctaagatctttgaacagaaggatcgtttgagtcagtccaaagcctcaaaggaattggtggagagaaggcgcaccatgatggaagatttccggaagtaccggaaaatggcccaggagctctatatggagcagaaaaacgagcgcctggagttgcgaggaggggtggacactgacgagctggacagcaacgtggacgactgggaagaggagaccattgagttcttcgtcactgaagaaatcattcccctcgggaatcaggagtgacctggagcactgtggcagccgtgtgtgctgtggagccgaggccgtcctgcaggaagccgcgtgactcccgcctcctccctgtgctctctggctctggactgtgactgcgcctggattctgccattgcgacacatttttgtgcctttcagcccctggtgtctgcagtgggggatttaaggcacccgcttccacttctttcttgtttggagttttctgttggaaccgccggcgttggctccgaagacttagcgacgccactggcggcaccttctcctgcgcccagtgatgtttccacggtgcctgtacacagccgagcagcatttccgttgaaggacttgcatccccattgcgggcagtgctggacgtgtcccggagacccaccgggagggcgccgccatgccttgtacccccaccgtgcaggttgtggccggttttctccgcaggttgaacatggaaataaaagcaaacttgtatgaaaaaa

SEQ ID NO: 428234 - DNA, 1428 bp, Homo sapiens
cgccttgtcgctaggagagtggctttggtcttttggggtcacacgtctctgacatctctctgttggggtccctgcagcagtgaacatttgctgtaaagggaattctttgtccagttacctcaggaaataagatagtattgttttgaaatacccctgtcgcatcttcttttttttcccatttaaagtatggatcatgacttagggggtacttggcgatggactttgtaaaattgttttccgaggtggtccagcattaccagctctgccctcatgggcagcatgagcacggccaagtcctccagccttggctgccccggcactgtggaagccctcgcagctcgtgacaggcgcgctctttcctttcagagatgttcgacaagcagcaggcgaacaccatcttctggagcccccaaggacagttcgtggtgttggcgggcctgaggagtatgaacggtgccttagcgtttgtggacacttcggactgcacggtcatgaacatcgcagaaacaacaaggaccgcttctgccagctgctgtggcggccccggcctcccacactcctgagccaggaacagatcaagcaaattaaaaaggatctgaagaaatactctaagatctttgaacagaaggatcgtttgagtcagtccaaagcctcaaaggaattggtggagagaaggcgcaccatgatggaagatttccggaagtaccggaaaatggcccaggagctctatatggagcagaaaaacgagcgcctggagttgcgaggaggggtggacactgacgagctggacagcaacgtggacgactgggaagaggagaccattgagttcttcgtcactgaagaaatcattcccctcgggaatcaggagtgacctggagcactgtggggacggactccgcctgctgttcccgcgctgagctacaggactcccgagtgtgagccgcggttcctctgttgcagcgcagccgtgtgtgctgtggagccgaggccgtcctgcaggaagccgcgtgactcccgcctcctccctgtgctctctggctctggactgtgactgcgcctggattctgccattgcgacacatttttgtgcctttcagcccctggtgtctgcagtgggggatttaaggcacccgcttccacttctttcttgtttggagttttctgttggaaccgccggcgttggctccgaagacttagcgacgccactggcggcaccttctcctgcgcccagtgatgtttccacggtgcctgtacacagccgagcagcatttccgttgaaggacttgcatccccattgcgggcagtgctggacgtgtcccggagacccaccgggagggcgccgccatgccttgtacccccaccgtgcaggttgtggccggttttctccgcaggttgaacatggaaataaaagcaaacttgtatgaaaaaa

SEQ ID NO: 428235 - DNA, 924 bp, Homo sapiens
cacctctgaccgagttcccacctctgaccgagttcccacctctgaccgagttcccacctctgaccgagttcccaagcaaattaaaaaggatctgaagaaatactctaagatctttgaacagaaggatcgtttgagtcagtccaaagcctcaaaggaattggtggagagaaggcgcaccatgatggaagatttccggaagtaccggaaaatggcccaggagctctatatggagcagaaaaacgagcgcctggagttgcgaggaggggtggacactgacgagctggacagcaacgtggacgactgggaagaggagaccattgagttcttcgtcactgaagaaatcattcccctcgggaatcaggagtgacctggagcactgtggggacggactccgcctgctgttcccgcgctgagctacaggactcccgagtgtgagccgcggttcctctgttgcagcgcagccgtgtgtgctgtggagccgaggccgtcctgcaggaagccgcgtgactcccgcctcctccctgtgctctctggctctggactgtgactgcgcctggattctgccattgcgacacatttttgtgcctttcagcccctggtgtctgcagtgggggatttaaggcacccgcttccacttctttcttgtttggagttttctgttggaaccgccggcgttggctccgaagacttagcgacgccactggcggcaccttctcctgcgcccagtgatgtttccacggtgcctgtacacagccgagcagcatttccgttgaaggacttgcatccccattgcgggcagtgctggacgtgtcccggagacccaccgggagggcgccgccatgccttgtacccccaccgtgcaggttgtggccggttttctccgcaggttgaacatggaaataaaagcaaacttgtatgaaaaaa

SEQ ID NO: 428236 - DNA, 2798 bp, Homo sapiens
gttcagtcccgccccgcagcgtccgacgggaaaggaaagggggaggacgccatgttggacggaaccatctgctgccacacatggggtggtcaatgctcccatgagtttactgatgcacagaaacaaccttgctgaatggaattaagcactttcttgtcacaaatatatcagtttgatgattttcgggcgcggtcttgtggatgcgagtcctctcagggtcgttcgtgaggccccagggcgtgggtgcgccccccgccccgcggccttggtgcggcctccccgtcgcacgcacatggctgggctgtagccgtcgcggcgcgcggtgcggcctgggagagtcggaagcgcggcggccgcggagccctgcgagtaggcagcgttgggcccatgcaggacgcggagaacgtggcggtgcccgaggcggccgaggagcgcgccgagcccggccagcagcagccggccgccgagccgccgccagccgaggggctgctgcggcccgcggggcccggcgctccggaggccgcggggaccgaggcctccagtgaggaggtggggatcgcggaggccgggccggagcccgaggtgaggaccgagccggcggccgaggcagaggcggcctccggcccgtccgagtcgccctcgccgccggccgccgaggagctgcccgggtcgcatgctgagccccctgtcccggcacagggcgaggccccaggagagcaggctcgggacgagcgctccgacagccgggcccaggcggtgtccgaggacgcgggaggaaacgagggcagagcggccgaggccgaaccccgggcgctggagaacggcgacgcggacgagccctccttcagcgaccccgaggacttcgtggacgacgtgagcgaggaagaattactgggagatgtactcaaagatcggccccaggaagcagatggaatcgattcggtgattgtagtggacaatgtccctcaggtgggacccgaccgacttgagaaactcaaaaatgtcatccacaagatcttttccaagtttgggaaaatcacaaatgatttttatcctgaagaggatgggaagacaaaagggtatattttcctggagtacgcgtcccctgcccacgctgtggatgctgtgaagaacgccgacggctacaagcttgacaagcagcacacattccgggtcaacctctttacggattttgacaagtatatgacgatcagtgacgagtgggatattccagagaaacagcctttcaaagacctggggaacttacgttactggcttgaagaggcagaatgcagagatcagtacagtgtgatttttgagagtggagaccgcacttccatattctggaatgacgtaaaagaccctgtctcaattgaagaaagagcgagatggacagagacgtatgtgcgttggtctcctaagggcacctacctggctacctttcatcaaagaggcattgctctatgggggggagagaaattcaagcaaattcagagattcagccaccaaggggttcagcttattgacttctcaccttgtgaaaggtacctggtgacctttagccccctgatggacacgcaggatgaccctcaggccataatcatctgggacatccttacggggcacaagaagaggggttttcactgtgagagctcagcccattggcctatttttaagtggagccatgatggcaaattctttgccagaatgaccctggatacgcttagcatctatgaaactccttctatgggtcttttggacaagaagagtttgaagatctctgggataaaagacttttcttggtctcctggtggtaacataatcgccttctgggtgcctgaagacaaagatattccagccagggtaaccctgatgcagctccctaccaggcaagagatccgagtgaggaacctgttcaatgtggtggactgcaagctccattggcagaagaacggagactacttgtgtgtgaaagtagataggactccgaaaggcacccagggtgttgtcacaaattttgaaattttccgaatgagggagaaacaggtacctgtggatgtggtcgagatgaaaggcaagttgtattttagtcactttgaggcgaatggggcctacgtgctgttttactcttggctttaacacttccatgcgaggggttgtctgagcagctgagtcaggactgtgagccctcaccatgaatagtcatctccaggtcacagaacgtgtttagagcctgggcaacatagtgagaccctctctgtacaaaaaacaaattaaaaaaattagccaggtgtggtggtgcgcaccgatagtcccagctgtttgagacgctgaagcgggaggatcacttgagcccaggagcagaggttgcagtgaactgagattgcgcccctgcactccagcctgggtgacggagcaagaccctgtctaaaaaaaagagaaaagagattgagcctgtgttcttgtttggctttttgttttgccatggagaaaaggaggaaggaagggttaaaaataggtgagaaaatgggaaacatggccgcccttccaggcagggagaccggaggtcaggatcccactgtaggtgcacactgggtgcgagggaagcggcatccacagctgctgacaatgtcgggctcctgcggtcctgctgtgggtgtcctgctctcaggaagggagcagtttcacgtaggtcactccacacaagtggaagcagctgtctctgaaactccaggaatgtgcacctttcctgctgttgcttgctctcccgtccttttaatgaacttttacacgtcggg

SEQ ID NO: 428237 - DNA, 2334 bp, Homo sapiens
gttcagtcccgccccgcagcgtccgacgggaaaggaaagggggaggacgccatgttggacggaaccatctgctgccacacatggggtggtcaatgctcccatgagtttactgatgcacagaaacaaccttgctgaatggaattaagcactttcttgtcacaaatatatcagtttgatgattttcgggcgcggtcttgtggatgcgagtcctctcagggtcgttcgtgaggccccagggcgtgggtgcgccccccgccccgcggccttggtgcggcctccccgtcgcacgcacatggctgggctgtagccgtcgcggcgcgcggtgcggcctgggagagtcggaagcgcggcggccgcggagccctgcgagtaggcagcgttgggcccatgcaggacgcggagaacgtggcggtgcccgaggcggccgaggagcgcgccgagcccggccagcagcagccggccgccgagccgccgccagccgaggggctgctgcggcccgcggggcccggcgctccggaggccgcggggaccgaggcctccagtgaggaggtggggatcgcggaggccgggccggagcccgaggtgaggaccgagccggcggccgaggcagaggcggcctccggcccgtccgagtcgccctcgccgccggccgccgaggagctgcccgggtcgcatgctgagccccctgtcccggcacagggcgaggccccaggagagcaggctcgggacgagcgctccgacagccgggcccaggcggtgtccgaggacgcgggaggaaacgagggcagagcggccgaggccgaaccccgggcgctggagaacggcgacgcggacgagccctccttcagcgaccccgaggacttcgtggacgacgtgagcgaggaagaattactgggagatgtactcaaagatcggccccaggaagcagatggaatcgattcggtgattgtagtggacaatgtccctcaggtgggacccgaccgacttgagaaactcaaaaatgtcatccacaagatcttttccaagtttgggaaaatcacaaatgatttttatcctgaagaggatgggaagacaaaagggtatattttcctggagtacgcgtcccctgcccacgctgtggatgctgtgaagaacgccgacggctacaagcttgacaagcagcacacattccgggtcaacctctttacggattttgacaagtatatgacgatcagtgacgagtgggatattccagagaaacagcctttcaaagacctggggaacttacgttactggcttgaagaggcagaatgcagagatcagtacagtgtgatttttgagagtggagaccgcacttccatattctggaatgacgtaaaagaccctgtctcaattgaagaaagagcgagatggacagagacgtatgtgcgttggtctcctaagggcacctacctggctacctttcatcaaagaggcattgctctatgggggggagagaaattcaagcaaattcagagattcagccaccaaggggttcagcttattgacttctcaccttgtgaaaggtacctggtgacctttagccccctgatggacacgcaggatgaccctcaggccataatcatctgggacatccttacggggcacaagaagaggggttttcactgtgagagctcagcccattggcctatttttaagtaagtggaccattgtaacgagctctgtagcctttgtcttttcatgggaataccctggcacttttgtttttcttaggtggagccatgatggcaaattctttgccagaatgaccctggatacgcttagcatctatgaaactcctgtaagtggcctcagtgatggcaaacgccccgtccggtccttgcttgtaaccggggtgtggtgcctttccttatttgtgctagaagaggaggaggaggtttcacagatgcataggaaaggcctgtctcctgtgcctttttaactgcccctgctctgggcagagctcttcagtcactcctgcccacctggcgcagccgtgggaagtcctggatgggagttaatgcagtgggcttcagaactgcagttctgggtggcgggtgggtggatgggttcactgtcacgctctgtgtgcactgccccctaggcaaactcacatcagactcttgtttccttttgtaaaaagttaggtgtgtttctgagacactgacatgatttgactcaactgcagccttccttttttttgggcagtctatgggtcttttggacaagaagagtttgaagatctctgggataaagtgagtattcttatcagtttggtgtcttagtgtgttcaggctgcttaacacaataccaaaa

SEQ ID NO: 428238 - DNA, 1851 bp, Homo sapiens
gttcagtcccgccccgcagcgtccgacgggaaaggaaagggggaggacgccatgttggacggaaccatctgctgccacacatggggtggtcaatgctcccatgagtttactgatgcacagaaacaaccttgctgaatggaattaagcactttcttgtcacaaatatatcagtttgatgattttcgggcgcggtcttgtggatgcgagtcctctcagggtcgttcgtgaggccccagggcgtgggtgcgccccccgccccgcggccttggtgcggcctccccgtcgcacgcacatggctgggctgtagccgtcgcggcgcgcggtgcggcctgggagagtcggaagcgcggcggccgcggagccctgcgagtaggcagcgttgggcccatgcaggacgcggagaacgtggcggtgcccgaggcggccgaggagcgcgccgagcccggccagcagcagccggccgccgagccgccgccagccgaggggctgctgcggcccgcggggcccggcgctccggaggccgcggggaccgaggcctccagtgaggaggtggggatcgcggaggccgggccggagcccgaggtgaggaccgagccggcggccgaggcagaggcggcctccggcccgtccgagtcgccctcgccgccggccgccgaggagctgcccgggtcgcatgctgagccccctgtcccggcacagggcgaggccccaggagagcaggctcgggacgagcgctccgacagccgggcccaggcggtgtccgaggacgcgggaggaaacgagggcagagcggccgaggccgaaccccgggcgctggagaacggcgacgcggacgagccctccttcagcgaccccgaggacttcgtggacgacgtgagcgaggaagaattactgggagatgtactcaaagatcggccccaggaagcagatggaatcgattcggtgattgtagtggacaatgtccctcaggtgggacccgaccgacttgagaaactcaaaaatgtcatccacaagatcttttccaagtttgggaaaatcacaaatgatttttatcctgaagaggatgggaagacaaaagggtatattttcctggagtacgcgtcccctgcccacgctgtggatgctgtgaagaacgccgacggctacaagcttgacaagcagcacacattccgggtcaacctctttacggattttgacaagtatatgacgatcagtgacgagtgggatattccagagaaacagcctttcaaagacctggggaacttacgttactggcttgaagaggcagaatgcagagatcagtacagtgtgatttttgagagtggagaccgcacttccatattctggaatgacgtaaaagaccctgtctcaattgaagaaagagcgagatggacagagacgtatgtgcgttggtctcctaagggcacctacctggctacctttcatcaaagaggcattgctctatgggggggagagaaattcaagcaaattcagagattcagccaccaaggggttcagcttattgacttctcaccttgtgaaaggtacctggtgacctttagccccctgatggacacgcaggatgaccctcaggccataatcatctgggacatccttacggggcacaagaagaggggttttcactgtgagagctcagcccattggcctatttttaagtggagccatgatggcaaattctttgccagaatgaccctggatacgcttagcatctatgaaactccttctatgggtcttttggacaagaagagtttgaagatctctgggataaagtgagtattcttatcagtttggtgtcttagtgtgttcaggctgcttaacacaataccaaaa

SEQ ID NO: 428239 - DNA, 1858 bp, Homo sapiens
  misc_feature (127)..(127): n is a, c, g, or t
cctgggcccagggacccctgaaaaggagtgagaatgtctgcagagaggagtcgtttcctttgaagtctgaacagagttccataaccgcagacattaagatctgttttggggtcagtggttgagtccnagctgccgcgttacccacaactcgtattccaaaactgctggttaagtttgtcaaggactttcagtatttagtgacttgtaaaaacattgatggaggcactgatacttgaactagtccatgccaatagagcctgtgaaaccaaacgcgggtaattttgtttaatgagatacagaatttgtaggaatatcaacttcccaaatgttactgcaagtgtctagagttagaaatcttcgcattcgaatcaggatatgttgatcacagcctgtgtccaggtatgttcagatgtcactgcggtggggcctgccttgacacttgaaatcactttaggccaggcacagtggctcacacctgtaatcccagcacttcaggaggcagaggtagaaaaatcacttgaacccaggagtttgagactagcctgagcaacatagcgaaaccctagccccattaaaaaaaaaaaaaaaaaaaagactttttaagctgttgaccactctccttgagttatgaacacttagcttccaaaatgccggcctgcaacaaggagtttatgctgagtgccagtgaaggcgccctccttcatgagagaggcctgccatgaggagagcggaactaggcggcgtgtagtgatgcagttagcttacatccagcacagggctccgcacagctcacacccggcccagggctcagcagtgagtagtgctatgcagttagcttacgtttggcacagggttcagtccagtttaaatccagcacggggttcagcggcgcagtagtgaggcagttagcttacatccagcatggggttcttattgccagccagaatgtgcaggcctgtgctgtgatgagcgctgctccagctgctccgtgccccgcactccgggtcggttgcataatggaggtgtcttgcattgactgcccacctaccctgctgtcagctcagcacaggcagagctttgtttgcttcacacgtgtccccgatacccaggaccttgttcagcaagtgacatagtcacggttgtggctctctgacccctctgtgtcctggtgtgtccctgccctggcctaggtggacaacgcgtactggctgtggactttccagggacgcctcctgcagaagaacaacaaggaccgcttctgccagctgctgtggcggccccggcctcccacactcctgagccaggaacagatcaaggtcagcatgcccccacccccgggtgcagggcacatggaggcaattgtggcgttgaaaaggtgtcagttttttctgttattgttagggtggtgactgggggataaaaacgtgacatttgcaaggattctttgaagagacgcaggaacagtgagaactgaatggaatagaacagctttaggatagtaacttgaggctttcagcttctttagggaagttttgcatgaacccgaggggtggataaaaagatgccagggccattaaaaagtcctgctgggattagaagcggcttgtctgggatttacattattgtggtaaaataggccgttggtcttaggtcagagcaaagaggagggttaaatcccagggagaaagtccgtctcaaagtgaaagatggaggaaggagcaggcacgagcgctcctgggatgctgtgttgtgtgaatgaccctgggtgtcaaggaggaaggagcaggcacgagcgctcctgggatgctgtgttctgtgaatgaccctgggtgtcatggaggaaggagcaggcgcgagc

SEQ ID NO: 428240 - DNA, 772 bp, Homo sapiens
gtaacttagagatccctcagtccccaggagctggcccttacgctgcccctgggccctggtgcccgcggactcctgcgttccttcccactggcctcggcggtgccactaggcatgtgcccccatgggtgatctgcgccctttgtcccctcaggggtggacactgacgagctggacagcaacgtggacgactgggaagaggagaccattgagttcttcgtcactgaagaaatcattcccctcgggaatcaggagtgacctggagcactgtggtgagcgtctgcagggggcgcgatgggggtcctgttggctgctcatgctgcttcagttatccccgtcactgaggaagcacctcctttaaggcaggggtgaagggtgaagccctagtgtcatgtgcccagggttagctgagcctcgtgtgaaatgtagagtcggtgccgacgtggcctcgactgcgccctctgaccacattgcagatggcgcctttcaggcagtgctgggtgagggaggagctgtggccaggtgttgggaagtgccaggaagaggagggtggccatgcctggccatttcctgatacctgtgctagtgacggccgcggtgtgtccactggaaagaaacactggcgtgcacggctgtgactctggtttcagcagttctgagacaagagccttccaagtcgggggctggggagcagagtgcgggagctcctgagtcctgggggcctccgcgcctcacagcatgggcacatgtgggacagaaggcctaatggggtgcc

SEQ ID NO: 428241 - DNA, 3313 bp, Homo sapiens
gttcagtcccgccccgcagcgtccgacgggaaaggaaagggggaggacgccatgttggacggaaccatctgctgccacacatggggtggtcaatgctcccatgagtttactgatgcacagaaacaaccttgctgaatggaattaagcactttcttgtcacaaatatatcagtttgatgattttcgggcgcggtcttgtggatgcgagtcctctcagggtcgttcgtgaggccccagggcgtgggtgcgccccccgccccgcggccttggtgcggcctccccgtcgcacgcacatggctgggctgtagccgtcgcggcgcgcggtgcggcctgggagagtcggaagcgcggcggccgcggagccctgcgagtaggcagcgttgggcccatgcaggacgcggagaacgtggcggtgcccgaggcggccgaggagcgcgccgagcccggccagcagcagccggccgccgagccgccgccagccgaggggctgctgcggcccgcggggcccggcgctccggaggccgcggggaccgaggcctccagtgaggaggtggggatcgcggaggccgggccggagcccgaggtgaggaccgagccggcggccgaggcagaggcggcctccggcccgtccgagtcgccctcgccgccggccgccgaggagctgcccgggtcgcatgctgagccccctgtcccggcacagggcgaggccccaggagagcaggctcgggacgagcgctccgacagccgggcccaggcggtgtccgaggacgcgggaggaaacgagggcagagcggccgaggccgaaccccgggcgctggagaacggcgacgcggacgagccctccttcagcgaccccgaggacttcgtggacgacgtgagcgaggaagaattactgggagatgtactcaaagatcggccccaggaagcagatggaatcgattcggtgattgtagtggacaatgtccctcaggtgggacccgaccgacttgagaaactcaaaaatgtcatccacaagatcttttccaagtttgggaaaatcacaaatgatttttatcctgaagaggatgggaagacaaaagggtatattttcctggagtacgcgtcccctgcccacgctgtggatgctgtgaagaacgccgacggctacaagcttgacaagcagcacacattccgggtcaacctctttacggattttgacaagtatatgacgatcagtgacgagtgggatattccagagaaacagcctttcaaagacctggggaacttacgttactggcttgaagaggcagaatgcagagatcagtacagtgtgatttttgagagtggagaccgcacttccatattctggaatgacgtaaaagaccctgtctcaattgaagaaagagcgagatggacagagacgtatgtgcgttggtctcctaagggcacctacctggctacctttcatcaaagaggcattgctctatgggggggagagaaattcaagcaaattcagagattcagccaccaaggggttcagcttattgacttctcaccttgtgaaaggtacctggtgacctttagccccctgatggacacgcaggatgaccctcaggccataatcatctgggacatccttacggggcacaagaagaggggttttcactgtgagagctcagcccattggcctatttttaagtggagccatgatggcaaattctttgccagaatgaccctggatacgcttagcatctatgaaactccttctatgggtcttttggacaagaagagtttgaagatctctgggataaaagacttttcttggtctcctggtggtaacataatcgccttctgggtgcctgaagacaaagatattccagccagggtaaccctgatgcagctccctaccaggcaagagatccgagtgaggaacctgttcaatgtggtggactgcaagctccattggcagaagaacggagactacttgtgtgtgaaagtagataggactccgaaaggcacccagggtgttgtcacaaattttgaaattttccgaatgagggagaaacaggtacctgtggatgtggtcgagatgaaagaaaccatcatagcctttgcctgggaaccaaatggaagtaagtttgctgtgctgcacggagaggctccgcggatatctgtgtctttctaccacgtcaaaaacaacgggaagattgaactcatcaagatgttcgacaagcagcaggcgaacaccatcttctggagcccccaaggacagttcgtggtgttggcgggcctgaggagtatgaacggtgccttagcgtttgtggacacttcggactgcacggtcatgaacatcgcagagcactacatggcttccgacgtcgaatgggatcctactgggcgctacgtcgtcacctctgtgtcctggtggagccataaggtggacaacgcgtactggctgtggactttccagggacgcctcctgcagaagaacaacaaggaccgcttctgccagctgctgtggcggccccggcctcccacactcctgagccaggaacagatcaagcaaattaaaaaggatctgaagaaatactctaagatctttgaacagaaggatcgtttgagtcagtccaaagcctcaaaggaattggtggagagaaggcgcaccatgatggaagatttccggaagtaccggaaaatggcccaggagctctatatggagcagaaaaacgagcgcctggagttgcgaggaggggtggacactgacgagctggacagcaacgtggacgactgggaagaggagaccattgagttcttcgtcactgaagaaatcattcccctcgggaatcaggagtgacctggagcactgtggcagccgtgtgtgctgtggagccgaggccgtcctgcaggaagccgcgtgactcccgcctcctccctgtgctctctggctctggactgtgactgcgcctggattctgccattgcgacacatttttgtgcctttcagcccctggtgtctgcagtgggggatttaaggcacccgcttccacttctttcttgtttggagttttctgttggaaccgccggcgttggctccgaagacttagcgacgccactggcggcaccttctcctgcgcccagtgatgtttccacggtgcctgtacacagccgagcagcatttccgttgaaggacttgcatccccattgcgggcagtgctggacgtgtcccggagacccaccgggagggcgccgccatgccttgtacccccaccgtgcaggttgtggccggttttctccgcaggttgaacatggaaataaaagcaaacttgtatgaaaaaa

SEQ ID NO: 428242 - DNA, 3198 bp, Homo sapiens
gttcagtcccgccccgcagcgtccgacgggaaaggaaagggggaggacgccatgttggacggaaccatctgctgccacacatggggtggtcaatgctcccatgagtttactgatgcacagaaacaaccttgctgaatggaattaagcactttcttgtcacaaatatatcagtttgatgattttcgggcgcggtcttgtggatgcgagtcctctcagggtcgttcgtgaggccccagggcgtgggtgcgccccccgccccgcggccttggtgcggcctccccgtcgcacgcacatggctgggctgtagccgtcgcggcgcgcggtgcggcctgggagagtcggaagcgcggcggccgcggagccctgcgagtaggcagcgttgggcccatgcaggacgcggagaacgtggcggtgcccgaggcggccgaggagcgcgccgagcccggccagcagcagccggccgccgagccgccgccagccgaggggctgctgcggcccgcggggcccggcgctccggaggccgcggggaccgaggcctccagtgaggaggtggggatcgcggaggccgggccggagcccgaggtgaggaccgagccggcggccgaggcagaggcggcctccggcccgtccgagtcgccctcgccgccggccgccgaggagctgcccgggtcgcatgctgagccccctgtcccggcacagggcgaggccccaggagagcaggctcgggacgagcgctccgacagccgggcccaggcggtgtccgaggacgcgggaggaaacgagggcagagcggccgaggccgaaccccgggcgctggagaacggcgacgcggacgagccctccttcagcgaccccgaggacttcgtggacgacgtgagcgaggaagaattactgggagatgtactcaaagatcggccccaggaagcagatggaatcgattcggtgattgtagtggacaatgtccctcaggtgggacccgaccgacttgagaaactcaaaaatgtcatccacaagatcttttccaagtttgggaaaatcacaaatgatttttatcctgaagaggatgggaagacaaaagggtatattttcctggagtacgcgtcccctgcccacgctgtggatgctgtgaagaacgccgacggctacaagcttgacaagcagcacacattccgggtcaacctctttacggattttgacaagtatatgacgatcagtgacgagtgggatattccagagaaacagcctttcaaagacctggggaacttacgttactggcttgaagaggcagaatgcagagatcagtacagtgtgatttttgagagtggagaccgcacttccatattctggaatgacgtaaaagaccctgtctcaattgaagaaagagcgagatggacagagacgtatgtgcgttggtctcctaagggcacctacctggctacctttcatcaaagaggcattgctctatgggggggagagaaattcaagcaaattcagagattcagccaccaaggggttcagcttattgacttctcaccttgtgaaaggtacctggtgacctttagccccctgatggacacgcaggatgaccctcaggccataatcatctgggacatccttacggggcacaagaagaggggttttcactgtgagagctcagcccattggcctatttttaagtggagccatgatggcaaattctttgccagaatgaccctggatacgcttagcatctatgaaactccttctatgggtcttttggacaagaagagtttgaagatctctgggataaaagacttttcttggtctcctggtggtaacataatcgccttctgggtgcctgaagacaaagatattccagccagggtaaccctgatgcagctccctaccaggcaagagatccgagtgaggaacctgttcaatgtggtggactgcaagctccattggcagaagaacggagactacttgtgtgtgaaagtagataggactccgaaaggcacccagggtgttgtcacaaattttgaaattttccgaatgagggagaaacaggtacctgtggatgtggtcgagatgaaagaaaccatcatagcctttgcctgggaaccaaatggaagtaagtttgctgtgctgcacggagaggctccgcggatatctgtgtctttctaccacgtcaaaaacaacgggaagattgaactcatcaagatgttcgacaagcagcaggcgaacaccatcttctggagcccccaaggacagttcgtggtgttggcgggcctgaggagtatgaacggtgccttagcgtttgtggacacttcggactgcacggtcatgaacatcgcagagcactacatggcttccgacgtcgaatgggatcctactgggcgctacgtcgtcacctctgtgtcctggtggagccataaggtggacaacgcgtactggctgtggactttccagggacgcctcctgcagaagaacaacaaggaccgcttctgccagctgctgtggcggccccggcctcccacactcctgagccaggaacagatcaagcaaattaaaaaggatctgaagaaatactctaagatctttgaacagaaggatcgtttgagtcagtccaaagcctcaaaggaattggtggagagaaggcgcaccatgatggaagatttccggaagtaccggaaaatggcccaggagctctatatggagcagaaaaacgagcgcctggagttgcgaggaggggtggacactgacgagctggacagcaacgtggacgactgggaagaggagaccattgagttcttcgtcactgaagaaatcattcccctcgggaatcaggagtgacctggagcactgtggcagccgtgtgtgctgtggagccgaggccgtcctgcaggaagccgcgtgactcccgcctcctccctgtgctctctggctctggactgtgactgcgcctggattctgccacgaagacttagcgacgccactggcggcaccttctcctgcgcccagtgatgtttccacggtgcctgtacacagccgagcagcatttccgttgaaggacttgcatccccattgcgggcagtgctggacgtgtcccggagacccaccgggagggcgccgccatgccttgtacccccaccgtgcaggttgtggccggttttctccgcaggttgaacatggaaataaaagcaaacttgtatgaaaaaa

SEQ ID NO: 428243 - DNA, 994 bp, Homo sapiens
  misc_feature (13)..(13): n is a, c, g, or t
  misc_feature (26)..(26): n is a, c, g, or t
gttaagctaggtncaggctgggtgtnagcaaattaaaaaggatctgaagaaatactctaagatctttgaacagaaggatcgtttgagtcagtccaaagcctcaaaggaattggtggagagaaggcgcaccatgatggaagatttccggaagtaccggaaaatggcccaggagctctatatggagcagaaaaacgagcgcctggagttgcgaggaggggtggacactgacgagctggacagcaacgtggacgactgggaagaggagaccattgagttcttcgtcactgaagaaatcattcccctcgggaatcaggagtgacctggagcactgtggcagccgtgtgtgctgtggagccgaggccgtcctgcaggaagccgcgtgactcccgcctcctccctgtgctctctggctctggactgtgactgcgcctggattctgccattgcgacacatttttgtgcctttcagcccctggtgtctgcagtgggggatttaaggcacccgcttccacttctttcttgtttggagttttctgttggaaccgccggcgttggctccgaagacttagcgacgccactggcggcaccttctcctgcgcccagtgatgtttccacggtgcctgtacacagccgagcagcatttccgttgaaggacttgcatccccattgcgggcagtgctggacgtgtcccggagacccaccgggagggcgccgccatgccttgtacccccaccgtgcaggttgtggccggttttctccgcaggttgaacatggaaataaaagcaaacttgtatgaaaaaaaaaacaaaacaccagaggaaataataacagaagcggaaaaaaggcatgaaggggacaaggcaagacgaaccgaccagatacgacaaagggaacagcggacccaaagaggagaataacaaagacagacgtaaaaaagaaggcgaagaaaataacgaaaggaaaagaaagaaaagacaaaaaaaaacgaagaaagc

SEQ ID NO: 428244 - DNA, 4081 bp, Homo sapiens
gttcagtcccgccccgcagcgtccgacgggaaaggaaagggggaggacgccatgttggacggaaccatctgctgccacacatggggtggtcaatgctcccatgagtttactgatgcacagaaacaaccttgctgaatggaattaagcactttcttgtcacaaatatatcagtttgatgattttcgggcgcggtcttgtggatgcgagtcctctcagggtcgttcgtgaggccccagggcgtgggtgcgccccccgccccgcggccttggtgcggcctccccgtcgcacgcacatggctgggctgtagccgtcgcggcgcgcggtgcggcctgggagagtcggaagcgcggcggccgcggagccctgcgagtaggcagcgttgggcccatgcaggacgcggagaacgtggcggtgcccgaggcggccgaggagcgcgccgagcccggccagcagcagccggccgccgagccgccgccagccgaggggctgctgcggcccgcggggcccggcgctccggaggccgcggggaccgaggcctccagtgaggaggtggggatcgcggaggccgggccggagcccgaggtgaggaccgagccggcggccgaggcagaggcggcctccggcccgtccgagtcgccctcgccgccggccgccgaggagctgcccgggtcgcatgctgagccccctgtcccggcacagggcgaggccccaggagagcaggctcgggacgagcgctccgacagccgggcccaggcggtgtccgaggacgcgggaggaaacgagggcagagcggccgaggccgaaccccgggcgctggagaacggcgacgcggacgagccctccttcagcgaccccgaggacttcgtggacgacgtgagcgaggaagaattactgggagatgtactcaaagatcggccccaggaagcagatggaatcgattcggtgattgtagtggacaatgtccctcaggtgggacccgaccgacttgagaaactcaaaaatgtcatccacaagatcttttccaagtttgggaaaatcacaaatgatttttatcctgaagaggatgggaagacaaaagggtatattttcctggagtacgcgtcccctgcccacgctgtggatgctgtgaagaacgccgacggctacaagcttgacaagcagcacacattccgggtcaacctctttacggattttgacaagtatatgacgatcagtgacgagtgggatattccagagaaacagcctttcaaagacctggggaacttacgttactggcttgaagaggcagaatgcagagatcagtacagtgtgatttttgagagtggagaccgcacttccatattctggaatgacgtaaaagaccctgtctcaattgaagaaagagcgagatggacagagacgtatgtgcgttggtctcctaagggcacctacctggctacctttcatcaaagaggcattgctctatgggggggagagaaattcaagcaaattcagagattcagccaccaaggggttcagcttattgacttctcaccttgtgaaaggtacctggtgacctttagccccctgatggacacgcaggatgaccctcaggccataatcatctgggacatccttacggggcacaagaagaggggttttcactgtgagagctcagcccattggcctatttttaagtggagccatgatggcaaattctttgccagaatgaccctggatacgcttagcatctatgaaactccttctatgggtcttttggacaagaagagtttgaagatctctgggataaaagacttttcttggtctcctggtggtaacataatcgccttctgggtgcctgaagacaaagatattccagccagggtaaccctgatgcagctccctaccaggcaagagatccgagtgaggaacctgttcaatgtggtggactgcaagctccattggcagaagaacggagactacttgtgtgtgaaagtagataggactccgaaaggcacccagggtgttgtcacaaattttgaaattttccgaatgagggagaaacaggtacctgtggatgtggtcgagatgaaagaaaccatcatagcctttgcctgggaaccaaatggaagtaagtttgctgtgctgcacggagaggctccgcggatatctgtgtctttctaccacgtcaaaaacaacgggaagattgaactcatcaagatgttcgacaagcagcaggcgaacaccatcttctggagcccccaaggacagttcgtggtgttggcgggcctgaggagtatgaacggtgccttagcgtttgtggacacttcggactgcacggtcatgaacatcgcagagcactacatggcttccgacgtcgaatgggatcctactgggcgctacgtcgtcacctctgtgtcctggtggagccataaggtggacaacgcgtactggctgtggactttccagggacgcctcctgcagaagaacaacaaggaccgcttctgccagctgctgtggcggccccggcctcccacactcctgagccaggaacagatcaagcaaattaaaaaggatctgaagaaatactctaagatctttgaacagaaggatcgtttgagtcagtccaaagcctcaaaggaattggtggagagaaggcgcaccatgatggaagatttccggaagtaccggaaaatggcccaggagctctatatggagcagaaaaacgagcgcctggagttgcgaggaggggtggacactgacgagctggacagcaacgtggacgactgggaagaggagaccattgagttcttcgtcactgaagaaatcattcccctcgggaatcaggagtgacctggagcactgtggtgagcgtctgcagggggcgcgatgggggtcctgttggctgctcatgctgcttcagttatccccgtcactgaggaagcacctcctttaaggcaggggtgaagggtgaagccctagtgtcatgtgcccagggttagctgagcctcgtgtgaaatgtagagtcggtgccgacgtggcctcgactgcgccctctgaccacattgcagatggcgcctttcaggcagtgctgggtgagggaggagctgtggccaggtgttgggaagtgccaggaagaggagggtggccatgcctggccatttcctgatacctgtgctagtgacggccgcggtgtgtccactggaaagaaacactggcgtgcacggctgtgactctggtttcagcagttctgagacaagagccttccaagtcgggggctggggagcagagtgcgggagctcctgagtcctgggggcctccgcgcctcacagcatgggcacatgtgggacagaaggcctaatggggtgcctgagggtggcctggttgctgtccccccagggtgggaccatgagcgagtaggggtggcacacgggctcagctctctgtggccggggtggctcctcttgcgggactcaacgtcagccccaaggcgatgttcagggggtccctcagccttttgaggtggtgccgtttagggccgccatgcctgtctatccaggggacggactccgcctgctgttcccgcgctgagctacaggactcccgagtgtgagccgcggttcctctgttgcagcgcagccgtgtgtgctgtggagccgaggccgtcctgcaggaagccgcgtgactcccgcctcctccctgtgctctctggctctggactgtgactgcgcctggattctgccattgcgacacatttttgtgcctttcagcccctggtgtctgcagtgggggatttaaggcacccgcttccacttctttcttgtttggagttttctgttggaaccgccggcgttggctccgaagacttagcgacgccactggcggcaccttctcctgcgcccagtgatgtttccacggtgcctgtacacagccgagcagcatttccgttgaaggacttgcatccccattgcgggcagtgctggacgtgtcccggagacccaccgggagggcgccgccatgccttgtacccccaccgtgcaggttgtggccggttttctccgcaggttgaacatggaaataaaagcaaacttgtatgaaaaaa

SEQ ID NO: 428245 - DNA, 2036 bp, Homo sapiens
  misc_feature (13)..(13): n is a, c, g, or t
ctgattcttgagnataaaactaggtccaaagcgagatggacagagacgtatgtgcgttggtctcctaagggcacctacctggctacctttcatcaaagaggcattgctctatgggggggagagaaattcaagcaaattcagagattcagccaccaaggggttcagcttattgacttctcaccttgtgaaaggtacctggtgacctttagccccctgatggacacgcaggatgaccctcaggccataatcatctgggacatccttacggggcacaagaagaggggttttcactgtgagagctcagcccattggcctatttttaagtggagccatgatggcaaattctttgccagaatgaccctggatacgcttagcatctatgaaactccttctatgggtcttttggacaagaagagtttgaagatctctgggataaaagacttttcttggtctcctggtggtaacataatcgccttctgggtgcctgaagacaaagatattccagccagggtaaccctgatgcagctccctaccaggcaagagatccgagtgaggaacctgttcaatgtggtggactgcaagctccattggcagaagaacggagactacttgtgtgtgaaagtagataggactccgaaaggcacccagggtgttgtcacaaattttgaaattttccgaatgagggagaaacaggtacctgtggatgtggtcgagatgaaagaaaccatcatagcctttgcctgggaaccaaatggaagtaagtttgctgtgctgcacggagaggctccgcggatatctgtgtctttctaccacgtcaaaaacaacgggaagattgaactcatcaagatgttcgacaagcagcaggcgaacaccatcttctggagcccccaaggacagttcgtggtgttggcgggcctgaggagtatgaacggtgccttagcgtttgtggacacttcggactgcacggtcatgaacatcgcagagcactacatggcttccgacgtcgaatgggatcctactgggcgctacgtcgtcacctctgtgtcctggtggagccataaggtggacaacgcgtactggctgtggactttccagggacgcctcctgcagaagaacaacaaggaccgcttctgccagctgctgtggcggccccggcctcccacactcctgagccaggaacagatcaagcaaattaaaaaggatctgaagaaatactctaagatctttgaacagaaggatcgtttgagtcagtccaaagcctcaaaggaattggtggagagaaggcgcaccatgatggaagatttccggaagtaccggaaaatggcccaggagctctatatggagcagaaaaacgagcgcctggagttgcgaggaggggtggacactgacgagctggacagcaacgtggacgactgggaagaggagaccattgagttcttcgtcactgaagaaatcattcccctcgggaatcaggagtgacctggagcactgtggggacggactccgcctgctgttcccgcgctgagctacaggactcccgagtgtgagccgcggttcctctgttgcagcgcagccgtgtgtgctgtggagccgaggccgtcctgcaggaagccgcgtgactcccgcctcctccctgtgctctctggctctggactgtgactgcgcctggattctgccattgcgacacatttttgtgcctttcagcccctggtgtctgcagtgggggatttaaggcacccgcttccacttctttcttgtttggagttttctgttggaaccgccggcgttggctccgaagacttagcgacgccactggcggcaccttctcctgcgcccagtgatgtttccacggtgcctgtacacagccgagcagcatttccgttgaaggacttgcatccccattgcgggcagtgctggacgtgtcccggagacccaccgggagggcgccgccatgccttgtacccccaccgtgcaggttgtggccggttttctccgcaggttgaacatggaaataaaagcaaacttgtatgaaaaaa

SEQ ID NO: 428246 - DNA, 3408 bp, Homo sapiens
gttcagtcccgccccgcagcgtccgacgggaaaggaaagggggaggacgccatgttggacggaaccatctgctgccacacatggggtggtcaatgctcccatgagtttactgatgcacagaaacaaccttgctgaatggaattaagcactttcttgtcacaaatatatcagtttgatgattttcgggcgcggtcttgtggatgcgagtcctctcagggtcgttcgtgaggccccagggcgtgggtgcgccccccgccccgcggccttggtgcggcctccccgtcgcacgcacatggctgggctgtagccgtcgcggcgcgcggtgcggcctgggagagtcggaagcgcggcggccgcggagccctgcgagtaggcagcgttgggcccatgcaggacgcggagaacgtggcggtgcccgaggcggccgaggagcgcgccgagcccggccagcagcagccggccgccgagccgccgccagccgaggggctgctgcggcccgcggggcccggcgctccggaggccgcggggaccgaggcctccagtgaggaggtggggatcgcggaggccgggccggagcccgaggtgaggaccgagccggcggccgaggcagaggcggcctccggcccgtccgagtcgccctcgccgccggccgccgaggagctgcccgggtcgcatgctgagccccctgtcccggcacagggcgaggccccaggagagcaggctcgggacgagcgctccgacagccgggcccaggcggtgtccgaggacgcgggaggaaacgagggcagagcggccgaggccgaaccccgggcgctggagaacggcgacgcggacgagccctccttcagcgaccccgaggacttcgtggacgacgtgagcgaggaagaattactgggagatgtactcaaagatcggccccaggaagcagatggaatcgattcggtgattgtagtggacaatgtccctcaggtgggacccgaccgacttgagaaactcaaaaatgtcatccacaagatcttttccaagtttgggaaaatcacaaatgatttttatcctgaagaggatgggaagacaaaagggtatattttcctggagtacgcgtcccctgcccacgctgtggatgctgtgaagaacgccgacggctacaagcttgacaagcagcacacattccgggtcaacctctttacggattttgacaagtatatgacgatcagtgacgagtgggatattccagagaaacagcctttcaaagacctggggaacttacgttactggcttgaagaggcagaatgcagagatcagtacagtgtgatttttgagagtggagaccgcacttccatattctggaatgacgtaaaagaccctgtctcaattgaagaaagagcgagatggacagagacgtatgtgcgttggtctcctaagggcacctacctggctacctttcatcaaagaggcattgctctatgggggggagagaaattcaagcaaattcagagattcagccaccaaggggttcagcttattgacttctcaccttgtgaaagtgttgcccttctcttctaggtacctggtgacctttagccccctgatggacacgcaggatgaccctcaggccataatcatctgggacatccttacggggcacaagaagaggggttttcactgtgagagctcagcccattggcctatttttaagtggagccatgatggcaaattctttgccagaatgaccctggatacgcttagcatctatgaaactccttctatgggtcttttggacaagaagagtttgaagatctctgggataaaagacttttcttggtctcctggtggtaacataatcgccttctgggtgcctgaagacaaagatattccagccagggtaaccctgatgcagctccctaccaggcaagagatccgagtgaggaacctgttcaatgtggtggactgcaagctccattggcagaagaacggagactacttgtgtgtgaaagtagataggactccgaaaggcacccagggtgttgtcacaaattttgaaattttccgaatgagggagaaacaggtacctgtggatgtggtcgagatgaaagaaaccatcatagcctttgcctgggaaccaaatggaagtaagtttgctgtgctgcacggagaggctccgcggatatctgtgtctttctaccacgtcaaaaacaacgggaagattgaactcatcaagatgttcgacaagcagcaggcgaacaccatcttctggagcccccaaggacagttcgtggtgttggcgggcctgaggagtatgaacggtgccttagcgtttgtggacacttcggactgcacggtcatgaacatcgcagagcactacatggcttccgacgtcgaatgggatcctactgggcgctacgtcgtcacctctgtgtcctggtggagccataaggtggacaacgcgtactggctgtggactttccagggacgcctcctgcagaagaacaacaaggaccgcttctgccagctgctgtggcggccccggcctcccacactcctgagccaggaacagatcaagcaaattaaaaaggatctgaagaaatactctaagatctttgaacagaaggatcgtttgagtcagtccaaagcctcaaaggaattggtggagagaaggcgcaccatgatggaagatttccggaagtaccggaaaatggcccaggagctctatatggagcagaaaaacgagcgcctggagttgcgaggaggggtggacactgacgagctggacagcaacgtggacgactgggaagaggagaccattgagttcttcgtcactgaagaaatcattcccctcgggaatcaggagtgacctggagcactgtggggacggactccgcctgctgttcccgcgctgagctacaggactcccgagtgtgagccgcggttcctctgttgcagcgcagccgtgtgtgctgtggagccgaggccgtcctgcaggaagccgcgtgactcccgcctcctccctgtgctctctggctctggactgtgactgcgcctggattctgccattgcgacacatttttgtgcctttcagcccctggtgtctgcagtgggggatttaaggcacccgcttccacttctttcttgtttggagttttctgttggaaccgccggcgttggctccgaagacttagcgacgccactggcggcaccttctcctgcgcccagtgatgtttccacggtgcctgtacacagccgagcagcatttccgttgaaggacttgcatccccattgcgggcagtgctggacgtgtcccggagacccaccgggagggcgccgccatgccttgtacccccaccgtgcaggttgtggccggttttctccgcaggttgaacatggaaataaaagcaaacttgtatgaaaaaa

SEQ ID NO: 428247 - DNA, 3872 bp, Homo sapiens
gttcagtcccgccccgcagcgtccgacgggaaaggaaagggggaggacgccatgttggacggaaccatctgctgccacacatggggtggtcaatgctcccatgagtttactgatgcacagaaacaaccttgctgaatggaattaagcactttcttgtcacaaatatatcagtttgatgattttcgggcgcggtcttgtggatgcgagtcctctcagggtcgttcgtgaggccccagggcgtgggtgcgccccccgccccgcggccttggtgcggcctccccgtcgcacgcacatggctgggctgtagccgtcgcggcgcgcggtgcggcctgggagagtcggaagcgcggcggccgcggagccctgcgagtaggcagcgttgggcccatgcaggacgcggagaacgtggcggtgcccgaggcggccgaggagcgcgccgagcccggccagcagcagccggccgccgagccgccgccagccgaggggctgctgcggcccgcggggcccggcgctccggaggccgcggggaccgaggcctccagtgaggaggtggggatcgcggaggccgggccggagcccgaggtgaggaccgagccggcggccgaggcagaggcggcctccggcccgtccgagtcgccctcgccgccggccgccgaggagctgcccgggtcgcatgctgagccccctgtcccggcacagggcgaggccccaggagagcaggctcgggacgagcgctccgacagccgggcccaggcggtgtccgaggacgcgggaggaaacgagggcagagcggccgaggccgaaccccgggcgctggagaacggcgacgcggacgagccctccttcagcgaccccgaggacttcgtggacgacgtgagcgaggaagaattactgggagatgtactcaaagatcggccccaggaagcagatggaatcgattcggtgattgtagtggacaatgtccctcaggtgggacccgaccgacttgagaaactcaaaaatgtcatccacaagatcttttccaagtttgggaaaatcacaaatgatttttatcctgaagaggatgggaagacaaaagggtatattttcctggagtacgcgtcccctgcccacgctgtggatgctgtgaagaacgccgacggctacaagcttgacaagcagcacacattccgggtcaacctctttacggattttgacaagtatatgacgatcagtgacgagtgggatattccagagaaacagcctttcaaagacctggggaacttacgttactggcttgaagaggcagaatgcagagatcagtacagtgtgatttttgagagtggagaccgcacttccatattctggaatgacgtaaaagaccctgtctcaattgaagaaagagcgagatggacagagacgtatgtgcgttggtctcctaagggcacctacctggctacctttcatcaaagaggcattgctctatgggggggagagaaattcaagcaaattcagagattcagccaccaaggggttcagcttattgacttctcaccttgtgaaaggtacctggtgacctttagccccctgatggacacgcaggatgaccctcaggccataatcatctgggacatccttacggggcacaagaagaggggttttcactgtgagagctcagcccattggcctatttttaagtaagtggaccattgtaacgagctctgtagcctttgtcttttcatgggaataccctggcacttttgtttttcttaggtggagccatgatggcaaattctttgccagaatgaccctggatacgcttagcatctatgaaactcctgtaagtggcctcagtgatggcaaacgccccgtccggtccttgcttgtaaccggggtgtggtgcctttccttatttgtgctagaagaggaggaggaggtttcacagatgcataggaaaggcctgtctcctgtgcctttttaactgcccctgctctgggcagagctcttcagtcactcctgcccacctggcgcagccgtgggaagtcctggatgggagttaatgcagtgggcttcagaactgcagttctgggtggcgggtgggtggatgggttcactgtcacgctctgtgtgcactgccccctaggcaaactcacatcagactcttgtttccttttgtaaaaagttaggtgtgtttctgagacactgacatgatttgactcaactgcagccttccttttttttgggcagtctatgggtcttttggacaagaagagtttgaagatctctgggataaaagacttttcttggtctcctggtggtaacataatcgccttctgggtgcctgaagacaaagatattccagccagggtaaccctgatgcagctccctaccaggcaagagatccgagtgaggaacctgttcaatgtggtggactgcaagctccattggcagaagaacggagactacttgtgtgtgaaagtagataggactccgaaaggcacccagggtgttgtcacaaattttgaaattttccgaatgagggagaaacaggtacctgtggatgtggtcgagatgaaagaaaccatcatagcctttgcctgggaaccaaatggaagtaagtttgctgtgctgcacggagaggctccgcggatatctgtgtctttctaccacgtcaaaaacaacgggaagattgaactcatcaagatgttcgacaagcagcaggcgaacaccatcttctggagcccccaaggacagttcgtggtgttggcgggcctgaggagtatgaacggtgccttagcgtttgtggacacttcggactgcacggtcatgaacatcgcagagcactacatggcttccgacgtcgaatgggatcctactgggcgctacgtcgtcacctctgtgtcctggtggagccataaggtggacaacgcgtactggctgtggactttccagggacgcctcctgcagaagaacaacaaggaccgcttctgccagctgctgtggcggccccggcctcccacactcctgagccaggaacagatcaagcaaattaaaaaggatctgaagaaatactctaagatctttgaacagaaggatcgtttgagtcagtccaaagcctcaaaggaattggtggagagaaggcgcaccatgatggaagatttccggaagtaccggaaaatggcccaggagctctatatggagcagaaaaacgagcgcctggagttgcgaggaggggtggacactgacgagctggacagcaacgtggacgactgggaagaggagaccattgagttcttcgtcactgaagaaatcattcccctcgggaatcaggagtgacctggagcactgtggggacggactccgcctgctgttcccgcgctgagctacaggactcccgagtgtgagccgcggttcctctgttgcagcgcagccgtgtgtgctgtggagccgaggccgtcctgcaggaagccgcgtgactcccgcctcctccctgtgctctctggctctggactgtgactgcgcctggattctgccattgcgacacatttttgtgcctttcagcccctggtgtctgcagtgggggatttaaggcacccgcttccacttctttcttgtttggagttttctgttggaaccgccggcgttggctccgaagacttagcgacgccactggcggcaccttctcctgcgcccagtgatgtttccacggtgcctgtacacagccgagcagcatttccgttgaaggacttgcatccccattgcgggcagtgctggacgtgtcccggagacccaccgggagggcgccgccatgccttgtacccccaccgtgcaggttgtggccggttttctccgcaggttgaacatggaaataaaagcaaacttgtatgaaaaaa

SEQ ID NO: 428248 - DNA, 2931 bp, Homo sapiens
gttcagtcccgccccgcagcgtccgacgggaaaggaaagggggaggacgccatgttggacggaaccatctgctgccacacatggggtggtcaatgctcccatgagtttactgatgcacagaaacaaccttgctgaatggaattaagcactttcttgtcacaaatatatcagtttgatgattttcgggcgcggtcttgtggatgcgagtcctctcagggtcgttcgtgaggccccagggcgtgggtgcgccccccgccccgcggccttggtgcggcctccccgtcgcacgcacatggctgggctgtagccgtcgcggcgcgcggtgcggcctgggagagtcggaagcgcggcggccgcggagccctgcgagtaggcagcgttgggcccatgcaggacgcggagaacgtggcggtgcccgaggcggccgaggagcgcgccgagcccggccagcagcagccggccgccgagccgccgccagccgaggggctgctgcggcccgcggggcccggcgctccggaggccgcggggaccgaggcctccagtgaggaggtggggatcgcggaggccgggccggagcccgaggtgaggaccgagccggcggccgaggcagaggcggcctccggcccgtccgagtcgccctcgccgccggccgccgaggagctgcccgggtcgcatgctgagccccctgtcccggcacagggcgaggccccaggagagcaggctcgggacgagcgctccgacagccgggcccaggcggtgtccgaggacgcgggaggaaacgagggcagagcggccgaggccgaaccccgggcgctggagaacggcgacgcggacgagccctccttcagcgaccccgaggacttcgtggacgacgtgagcgaggaagaattactgggagatgtactcaaagatcggccccaggaagcagatggaatcgattcggtgattgtagtggacaatgtccctcaggtgggacccgaccgacttgagaaactcaaaaatgtcatccacaagatcttttccaagtttgggaaaatcacaaatgatttttatcctgaagaggatgggaagacaaaagggtatattttcctggagtacgcgtcccctgcccacgctgtggatgctgtgaagaacgccgacggctacaagcttgacaagcagcacacattccgggtcaacctctttacggattttgacaagtatatgacgatcagtgacgagtgggatattccagagaaacagcctttcaaagacctggggaacttacgttactggcttgaagaggcagaatgcagagatcagtacagtgtgatttttgagagtggagaccgcacttccatattctggaatgacgtaaaagaccctgtctcaattgaagaaagagcgagatggacagagacgtatgtgcgttggtctcctaagggcacctacctggctacctttcatcaaagaggcattgctctatgggggggagagaaattcaagcaaattcagagattcagccaccaaggggttcagcttattgacttctcaccttgtgaaaggtacctggtgacctttagccccctgatggacacgcaggatgaccctcaggccataatcatctgggacatccttacggggcacaagaagaggggttttcactgtgagagctcagcccattggcctatttttaagtggagccatgatggcaaattctttgccagaatgaccctggatacgcttagcatctatgaaactccttctatgggtcttttggacaagaagagtttgaagatctctgggataaaagacttttcttggtctcctggtggtaacataatcgccttctgggtgcctgaagacaaagatattccagccagggtaaccctgatgcagctccctaccaggcaagagatccgagtgaggaacctgttcaatgtggtggactgcaagctccattggcagaagaacggagactacttgtgtgtgaaagtagataggactccgaaaggcacccagggtgttgtcacaaattttgaaattttccgaatgagggagaaacaggtacctgtggatgtggtcgagatgaaagaaaccatcatagcctttgcctgggaaccaaatggaagtaagtttgctgtgctgcacggagaggctccgcggatatctgtgtctttctaccacgtcaaaaacaacgggaagattgaactcatcaagatgttcgacaagcagcaggcgaacaccatcttctggagcccccaaggacagttcgtggtgttggcgggcctgaggagtatgaacggtgccttagcgtttgtggacacttcggactgcacggtcatgaacatcgcagagcactacatggcttccgacgtcgaatgggatcctactgggcgctacgtcgtcacctctgtgtcctggtggagccataaggtggacaacgcgtactggctgtggactttccagggacgcctcctgcagaagaacaacaaggaccgcttctgccagctgctgtggcggccccggcctcccacactcctgagccaggaacagatcaagcaaattaaaaaggatctgaagaaatactctaagatctttgaacagaaggatcgtttgagtcagtccaaagcctcaaaggaattggtggagagaaggcgcaccatgatggaagatttccggaagtaccggaaaatggcccaggagctctatatggagcagaaaaacgagcgcctggagttgcgaggaggggtggacactgacgagctggacagcaacgtggacgactgggaagaggagaccattgagttcttcgtcactgaagaaatcattcccctcgggaatcaggagtgacctggagcactgtgggacggactccgcctgctgttcccgccgaatgacgcactgaatgacacacagcatgcatccagcgcggaataggtaccgagctat

SEQ ID NO: 428249 - DNA, 1660 bp, Homo sapiens
tagctagcaggcgcgctgaaatcggccgaggcagacagagttgaagatctctgggattaaaagacttttcttggtctcctggtggtaacataatcgccttctgggtgcctgaagacaaagatattccagccagggtaaccctgatgcagctccctaccaggcaagagatccgagtgaggaacctgttcaatgtggtggactgcaagctccattggcagaagaacggagactacttgtgtgtgaaagtagataggactccgaaaggcacccagggtgttgtcacaaattttgaaattttccgaatgagggagaaacaggtacctgtggatgtggtcgagatgaaagaaaccatcatagcctttgcctgggaaccaaatggaagtaagtttgctgtgctgcacggagaggctccgcggatatctgtgtctttctaccacgtcaaaaacaacgggaagattgaactcatcaagatgttcgacaagcagcaggcgaacaccatcttctggagcccccaaggacagttcgtggtgttggcgggcctgaggagtatgaacggtgccttagcgtttgtggacacttcggactgcacggtcatgaacatcgcagagcactacatggcttccgacgtcgaatgggatcctactgggcgctacgtcgtcacctctgtgtcctggtggagccataaggtggacaacgcgtactggctgtggactttccagggacgcctcctgcagaagaacaacaaggaccgcttctgccagctgctgtggcggccccggcctcccacactcctgagccaggaacagatcaagcaaattaaaaaggatctgaagaaatactctaagatctttgaacagaaggatcgtttgagtcagtccaaagcctcaaaggaattggtggagagaaggcgcaccatgatggaagatttccggaagtaccggaaaatggcccaggagctctatatggagcagaaaaacgagcgcctggagttgcgaggaggggtggacactgacgagctggacagcaacgtggacgactgggaagaggagaccattgagttcttcgtcactgaagaaatcattcccctcgggaatcaggagtgacctggagcactgtggggacggactccgcctgctgttcccgcgctgagctacaggactcccgagtgtgagccgcggttcctctgttgcagcgcagccgtgtgtgctgtggagccgaggccgtcctgcaggaagccgcgtgactcccgcctcctccctgtgctctctggctctggactgtgactgcgcctggattctgccattgcgacacatttttgtgcctttcagcccctggtgtctgcagtgggggatttaaggcacccgcttccacttctttcttgtttggagttttctgttggaaccgccggcgttggctccgaagacttagcgacgccactggcggcaccttctcctgcgcccagtgatgtttccacggtgcctgtacacagccgagcagcatttccgttgaaggacttgcatccccattgcgggcagtgctggacgtgtcccggagacccaccgggagggcgccgccatgccttgtacccccaccgtgcaggttgtggccggttttctccgcaggttgaacatggaaataaaagcaaacttgtatgaaaaaa

SEQ ID NO: 428250 - DNA, 1762 bp, Homo sapiens
gtgagactgggaagaggagaccattgagttcttcgtcactgaagaaatcattccccccggcctcccacactcctgagccaggaacagatcaagcaaattaaaaaggatctgaagaaatactctaagatctttgaacagaaggatcgtttgagtcagtccaaagcctcaaaggaattggtggagagaaggcgcaccatgatggaagatttccggaagtaccggaaaatggcccaggagctctatatggagcagaaaaacgagcgcctggagttgcgaggaggggtggacactgacgagctggacagcaacgtggacgactgggaagaggagactacttgtgtgtgaaagtagataggactccgaaaggcacccagggtgttgtcacaaattttgaaattttccgaatgagggagaaacaggtacctgtggatgtggtcgagatgaaagaaaccatcatagcctttgcctgggaaccaaatggaagtaagtttgctgtgctgcacggagaggctccgcggatatctgtgtctttctaccacgtcaaaaacaacgggaagattgaactcatcaagatgttcgacaagcagcaggcgaacaccatcttctggagcccccaaggacagttcgtggtgttggcgggcctgaggagtatgaacggtgccttagcgtttgtggacacttcggactgcacggtcatgaacatcgcagagcactacatggcttccgacgtcgaatgggatcctactgggcgctacgtcgtcacctctgtgtcctggtggagccataaggtggacaacgcgtactggctgtggactttccagggacgcctcctgcagaagaacaacaaggaccgcttctgccagctgctgtggcggccccggcctcccacactcctgagccaggaacagatcaagcaaattaaaaaggatctgaagaaatactctaagatctttgaacagaaggatcgtttgagtcagtccaaagcctcaaaggaattggtggagagaaggcgcaccatgatggaagatttccggaagtaccggaaaatggcccaggagctctatatggagcagaaaaacgagcgcctggagttgcgaggaggggtggacactgacgagctggacagcaacgtggacgactgggaagaggagaccattgagttcttcgtcactgaagaaatcattcccctcgggaatcaggagtgacctggagcactgtggggacggactccgcctgctgttcccgcgctgagctacaggactcccgagtgtgagccgcggttcctctgttgcagcgcagccgtgtgtgctgtggagccgaggccgtcctgcaggaagccgcgtgactcccgcctcctccctgtgctctctggctctggactgtgactgcgcctggattctgccattgcgacacatttttgtgcctttcagcccctggtgtctgcagtgggggatttaaggcacccgcttccacttctttcttgtttggagttttctgttggaaccgccggcgttggctccgaagacttagcgacgccactggcggcaccttctcctgcgcccagtgatgtttccacggtgcctgtacacagccgagcagcatttccgttgaaggacttgcatccccattgcgggcagtgctggacgtgtcccggagacccaccgggagggcgccgccatgccttgtacccccaccgtgcaggttgtggccggttttctccgcaggttgaacatggaaataaaagcaaacttgtatgaaaaaa

SEQ ID NO: 428251 - DNA, 3083 bp, Homo sapiens
gttcagtcccgccccgcagcgtccgacgggaaaggaaagggggaggacgccatgttggacggaaccatctgctgccacacatggggtggtcaatgctcccatgagtttactgatgcacagaaacaaccttgctgaatggaattaagcactttcttgtcacaaatatatcagtttgatgattttcgggcgcggtcttgtggatgcgagtcctctcagggtcgttcgtgaggccccagggcgtgggtgcgccccccgccccgcggccttggtgcggcctccccgtcgcacgcacatggctgggctgtagccgtcgcggcgcgcggtgcggcctgggagagtcggaagcgcggcggccgcggagccctgcgagtaggcagcgttgggcccatgcaggacgcggagaacgtggcggtgcccgaggcggccgaggagcgcgccgagcccggccagcagcagccggccgccgagccgccgccagccgaggggctgctgcggcccgcggggcccggcgctccggaggccgcggggaccgaggcctccagtgaggaggtggggatcgcggaggccgggccggagcccgaggtgaggaccgagccggcggccgaggcagaggcggcctccggcccgtccgagtcgccctcgccgccggccgccgaggagctgcccgggtcgcatgctgagccccctgtcccggcacagggcgaggccccaggagagcaggctcgggacgagcgctccgacagccgggcccaggcggtgtccgaggacgcgggaggaaacgagggcagagcggccgaggccgaaccccgggcgctggagaacggcgacgcggacgagccctccttcagcgaccccgaggacttcgtggacgacgtgagcgaggaagaattactgggagatgtactcaaagatcggccccaggaagcagatggaatcgattcggtgattgtagtggacaatgtccctcaggtgggacccgaccgacttgagaaactcaaaaatgtcatccacaagatcttttccaagtttgggaaaatcacaaatgatttttatcctgaagaggatgggaagacaaaagggtatattttcctggagtacgcgtcccctgcccacgctgtggatgctgtgaagaacgccgacggctacaagcttgacaagcagcacacattccgggtcaacctctttacggattttgacaagtatatgacgatcagtgacgagtgggatattccagagaaacagcctttcaaagacctggggaacttacgttactggcttgaagaggcagaatgcagagatcagtacagtgtgatttttgagagtggagaccgcacttccatattctggaatgacgtaaaagaccctgtctcaattgaagaaagagcgagatggacagagacgtatgtgcgttggtctcctaagggcacctacctggctacctttcatcaaagaggcattgctctatgggggggagagaaattcaagcaaattcagagattcagccaccaaggggttcagcttattgacttctcaccttgtgaaaggtacctggtgacctttagccccctgatggacacgcaggatgaccctcaggccataatcatctgggacatccttacggggcacaagaagaggggttttcactgtgagagctcagcccattggcctatttttaagtggagccatgatggcaaattctttgccagaatgaccctggatacgcttagcatctatgaaactccttctatgggtcttttggacaagaagagtttgaagatctctgggataaaagacttttcttggtctcctggtggtaacataatcgccttctgggtgcctgaagacaaagatattccagccagggtaaccctgatgcagctccctaccaggcaagagatccgagtgaggaacctgttcaatgtggtggactgcaagctccattggcagaagaacggagactacttgtgtgtgaaagtagataggactccgaaaggcacccagggtgttgtcacaaattttgaaattttccgaatgagggagaaacaggtacctgtggatgtggtcgagatgaaagaaaccatcatagcctttgcctgggaaccaaatggaagtaagtttgctgtgctgcacggagaggctccgcggatatctgtgtctttctaccacgtcaaaaacaacgggaagattgaactcatcaagatgttcgacaagcagcaggcgaacaccatcttctggagcccccaaggacagttcgtggtgttggcgggcctgaggagtatgaacggtgccttagcgtttgtggacacttcggactgcacggtcatgaacatcgcagagcactacatggcttccgacgtcgaatgggatcctactgggcgctacgtcgtcacctctgtgtcctggtggagccataaggtggacaacgcgtactggctgtggactttccagggacgcctcctgcagaagaacaacaaggaccgcttctgccagctgctgtggcggccccggcctcccacactcctgagccaggaacagatcaaggtcagcatgcccccacccccgggtgcagggcacatggaggcaattgtggcgttgaaaaggtgtcagttttttctgttattgttagggtggtgactgggggataaaaacgtgacatttgcaaggattctttgaagagacgcaggaacagtgagaactgaatggaatagaacagctttaggatagtaacttgaggctttcagcttctttagggaagttttgcatgaacccgaggggtggataaaaagatgccagggccattaaaaagtcctgctgggattagaagcggcttgtctgggatttacattattgtggtaaaataggccgttggtcttaggtcagagcaaagaggagggttaaatcccagggagaaagtccgtctcaaagtgaaagatggaggaaggagcaggcacgagcgctcctgggatgctgtgttgtgtgaatgaccctgggtgtcaaggaggaaggagcaggcacgagcgctcctgggatgctgtgttctgtgaatgaccctgggtgtcatggaggaaggagcaggcgcgagc

SEQ ID NO: 428252 - DNA, 800 bp, Homo sapiens
  misc_feature (13)..(13): n is a, c, g, or t
  misc_feature (26)..(26): n is a, c, g, or t
gttaagctaggtncaggctgggtgtnagcaaattaaaaaggatctgaagaaatactctaagatctttgaacagaaggatcgtttgagtcagtccaaagcctcaaaggaattggtggagagaaggcgcaccatgatggaagatttccggaagtaccggaaaatggcccaggagctctatatggagcagaaaaacgagcgcctggagttgcgaggaggggtggacactgacgagctggacagcaacgtggacgactgggaagaggagaccattgagttcttcgtcactgaagaaatcattcccctcgggaatcaggagtgacctggagcactgtggcagccgtgtgtgctgtggagccgaggccgtcctgcaggaagccgcgtgactcccgcctcctccctgtgctctctggctctggactgtgactgcgcctggattctgccattgcgacacatttttgtgcctttcagcccctggtgtctgcagtgggggatttaaggcacccgcttccacttctttcttgtttggagttttctgttggaaccgccggcgttggctccgaagacttagcgacgccactggcggcaccttctcctgcgcccagtgatgtttccacggtgcctgtacacagccgagcagcatttccgttgaaggacttgcatccccattgcgggcagtgctggacgtgtcccggagacccaccgggagggcgccgccatgccttgtacccccaccgtgcaggttgtggccggttttctccgcaggttgaacatggaaataaaagcaaacttgtatgaaaaaa

SEQ ID NO: 428253 - DNA, 2190 bp, Homo sapiens
gttcagtcccgccccgcagcgtccgacgggaaaggaaagggggaggacgccatgttggacggaaccatctgctgccacacatggggtggtcaatgctcccatgagtttactgatgcacagaaacaaccttgctgaatggaattaagcactttcttgtcacaaatatatcagtttgatgattttcgggcgcggtcttgtggatgcgagtcctctcagggtcgttcgtgaggccccagggcgtgggtgcgccccccgccccgcggccttggtgcggcctccccgtcgcacgcacatggctgggctgtagccgtcgcggcgcgcggtgcggcctgggagagtcggaagcgcggcggccgcggagccctgcgagtaggcagcgttgggcccatgcaggacgcggagaacgtggcggtgcccgaggcggccgaggagcgcgccgagcccggccagcagcagccggccgccgagccgccgccagccgaggggctgctgcggcccgcggggcccggcgctccggaggccgcggggaccgaggcctccagtgaggaggtggggatcgcggaggccgggccggagcccgaggtgaggaccgagccggcggccgaggcagaggcggcctccggcccgtccgagtcgccctcgccgccggccgccgaggagctgcccgggtcgcatgctgagccccctgtcccggcacagggcgaggccccaggagagcaggctcgggacgagcgctccgacagccgggcccaggcggtgtccgaggacgcgggaggaaacgagggcagagcggccgaggccgaaccccgggcgctggagaacggcgacgcggacgagccctccttcagcgaccccgaggacttcgtggacgacgtgagcgaggaagaattactgggagatgtactcaaagatcggccccaggaagcagatggaatcgattcggtgattgtagtggacaatgtccctcaggtgggacccgaccgacttgagaaactcaaaaatgtcatccacaagatcttttccaagtttgggaaaatcacaaatgatttttatcctgaagaggatgggaagacaaaagggtatattttcctggagtacgcgtcccctgcccacgctgtggatgctgtgaagaacgccgacggctacaagcttgacaagcagcacacattccgggtcaacctctttacggattttgacaagtatatgacgatcagtgacgagtgggatattccagagaaacagcctttcaaagacctggggaacttacgttactggcttgaagaggcagaatgcagagatcagtacagtgtgatttttgagagtggagaccgcacttccatattctggaatgacgtaaaagaccctgtctcaattgaagaaagagcgagatggacagagacgtatgtgcgttggtctcctaagggcacctacctggctacctttcatcaaagaggcattgctctatgggggggagagaaattcaagcaaattcagagattcagccaccaaggggttcagcttattgacttctcaccttgtgaaaggtacctggtgacctttagccccctgatggacacgcaggatgaccctcaggccataatcatctgggacatccttacggggcacaagaagaggggttttcactgtgagagctcagcccattggcctatttttaagtggagccatgatggcaaattctttgccagaatgaccctggatacgcttagcatctatgaaactccttctatgggtcttttggacaagaagagtttgaagatctctgggataaaagacttttcttggtctcctggtggtaacataatcgccttctgggtgcctgaagacaaagatattccagccagggtaaccctgatgcagctccctaccaggcaagagatccgagtgaggaacctgttcaatgtggtggactgcaagctccattggcagaagaacggagactacttgtgtgtgaaagtagataggactccgaaaggcacccagggtgttgtcacaaattttgaaattttccgaatgagggagaaacaggtacctgtggatgtggtcgagatgaaagaaaccatcatagcctttgcctgggaaccaaatggaagtaagtttgctgtgctgcttgtcgaacatcttgatgagttcaatcttcccgttgtttttgacgtggtagaaagacacaga

SEQ ID NO: 428254 - DNA, 2129 bp, Homo sapiens
gttcagtcccgccccgcagcgtccgacgggaaaggaaagggggaggacgccatgttggacggaaccatctgctgccacacatggggtggtcaatgctcccatgagtttactgatgcacagaaacaaccttgctgaatggaattaagcactttcttgtcacaaatatatcagtttgatgattttcgggcgcggtcttgtggatgcgagtcctctcagggtcgttcgtgaggccccagggcgtgggtgcgccccccgccccgcggccttggtgcggcctccccgtcgcacgcacatggctgggctgtagccgtcgcggcgcgcggtgcggcctgggagagtcggaagcgcggcggccgcggagccctgcgagtaggcagcgttgggcccatgcaggacgcggagaacgtggcggtgcccgaggcggccgaggagcgcgccgagcccggccagcagcagccggccgccgagccgccgccagccgaggggctgctgcggcccgcggggcccggcgctccggaggccgcggggaccgaggcctccagtgaggaggtggggatcgcggaggccgggccggagcccgaggtgaggaccgagccggcggccgaggcagaggcggcctccggcccgtccgagtcgccctcgccgccggccgccgaggagctgcccgggtcgcatgctgagccccctgtcccggcacagggcgaggccccaggagagcaggctcgggacgagcgctccgacagccgggcccaggcggtgtccgaggacgcgggaggaaacgagggcagagcggccgaggccgaaccccgggcgctggagaacggcgacgcggacgagccctccttcagcgaccccgaggacttcgtggacgacgtgagcgaggaagaattactgggagatgtactcaaagatcggccccaggaagcagatggaatcgattcggtgattgtagtggacaatgtccctcaggtgggacccgaccgacttgagaaactcaaaaatgtcatccacaagatcttttccaagtttgggaaaatcacaaatgatttttatcctgaagaggatgggaagacaaaagggtatattttcctggagtacgcgtcccctgcccacgctgtggatgctgtgaagaacgccgacggctacaagcttgacaagcagcacacattccgggtcaacctctttacggattttgacaagtatatgacgatcagtgacgagtgggatattccagagaaacagcctttcaaagacctggggaacttacgttactggcttgaagaggcagaatgcagagatcagtacagtgtgatttttgagagtggagaccgcacttccatattctggaatgacgtaaaagaccctgtctcaattgaagaaagagcgagatggacagagacgtatgtgcgttggtctcctaagggcacctacctggctacctttcatcaaagaggcattgctctatgggggggagagaaattcaagcaaattcagagattcagccaccaaggggttcagcttattgacttctcaccttgtgaaaggtacctggtgacctttagccccctgatggacacgcaggatgaccctcaggccataatcatctgggacatccttacggggcacaagaagaggggttttcactgtgagagctcagcccattggcctatttttaagtggagccatgatggcaaattctttgccagaatgaccctggatacgcttagcatctatgaaactccttctatgggtcttttggacaagaagagtttgaagatctctgggataaaagacttttcttggtctcctggtggtaacataatcgccttctgggtgcctgaagacaaagatattccagccagggtaaccctgatgcagctccctaccaggcaagagatccgagtgaggaacctgttcaatgtggtggactgcaagctccattggcagaagaacggagactacttgtgtgtgaaagtagataggactccgaaaggcacccagggtgttgtcacagattcttgaaaagggattcattatggctgaagtaatgaaatacgaagattttaaagaggaaggttctgaaaatgcagtcaggctgctggaaagtacacgacaacaaggaggtcaca

SEQ ID NO: 428255 - DNA, 1037 bp, Homo sapiens
ctttaacattttattttcctgttctgcagagacttttcttggtctcctggtggtaacataatcgccttctgggtgcctgaagacaaagatattccagccagggtaaccctgatgcagctccctaccaggcaagagatccgagtgaggaacctgttcaatgtggtggactgcaagctccattggcagaagaacggagactacttgtgtgtgaaagtagataggactccgaaaggcacccagggtgttgtcacaaattttgaaattttccgaatgagggagaaacaggtacctgtggatgtggtcgagatgaaaggcaagttgtattttagtcactttgaggcgaatggggcctacgtgctgttttactcttggctttaacacttccatgcgaggggttgtctgagcagctgagtcaggactgtgagccctcaccatgaatagtcatctccaggtcacagaacgtgtttagagcctgggcaacatagtgagaccctctctgtacaaaaaacaaattaaaaaaattagccaggtgtggtggtgcgcaccgatagtcccagctgtttgagacgctgaagcgggaggatcacttgagcccaggagcagaggttgcagtgaactgagattgcgcccctgcactccagcctgggtgacggagcaagaccctgtctaaaaaaaagagaaaagagattgagcctgtgttcttgtttggctttttgttttgccatggagaaaaggaggaaggaagggttaaaaataggtgagaaaatgggaaacatggccgcccttccaggcagggagaccggaggtcaggatcccactgtaggtgcacactgggtgcgagggaagcggcatccacagctgctgacaatgtcgggctcctgcggtcctgctgtgggtgtcctgctctcaggaagggagcagtttcacgtaggtcactccacacaagtggaagcagctgtctctgaaactccaggaatgtgcacctttcctgctgttgcttgctctcccgtccttttaatgaacttttacacgtcggg

SEQ ID NO: 428256 - DNA, 967 bp, Homo sapiens
ccccaacctgatgttagtcaaccaacagggattctgtacttacacctgatttgcaaagtggaactggtagctgcctgtgatgatcttctaacaatctatcatgctgacttaacagccttacctatcattcaatgcatcaagtcaatagatgactagtaccatactgatctttcagtattgataaatatcatcttgtatatgttgcagatgcctcagtcaagcatttgtcacagtctttattctgtaaaacactctccatatgctcttcataatccttaaagattattgcagttcagccacttctgtaagtgtttattagcattggcatgttggtagtagtcctgttcttcagaccatagctttgaaccagaatagtgctcttcatctccagagacaaacttccatgcactaacccagcagtaaaggatttggcccctacatgggaaaacagcagtgttggagatattgttgtagagattaaaggagagagttgtgctacaaatacaccaaaggaattagaaaattctgtttaaaattccatttaaaaagcttttataagaataaagatagaaaaatagatatgattatcttgatcattgacatttggaaaacacacaaattcattgctgaggtaaacaatctattatgggacagaatatacattcaataggtggtaaactggatttctcattctagggtgatttaaaattacctgaggctatgcaagtttctgtcataattcttcctcatatttacaaagaagaaagagattaaatgttgaaagggctgcgtagttagtaaagaaagtaatttgaagaagaaaatgtgttacaaactcattaagaataggagataagagaaagattttctgaaatatttccataaaaccccttataacttgtcaggtcaaaaagtaatagtctaaatgcaatgtggtatgtgtactggttttgatcgtagaacaaaa

SEQ ID NO: 428257 - DNA, 3622 bp, Homo sapiens
  misc_feature (3593)..(3593): n is a, c, g, or t
cagtgtgatttcgccatcttctccatggaccactatatacattaatgtttcttaccttctaggtgtgggagtatttccctcacaggatcctgctcagcccagaatgcctccttggatttacaatgagagtttggttccagatgcctataagaaaatcttagaaaccacaatgactccaactggaatagatactgccaaactgtatcccattctgatgtcatctgggcttcccagggaaactcttggacagatatgggccttagctaatcgaactacacctggcaaacttacaaaagaagaactttataccgttctagccatgatagcggtaacacagaggggcgttcctgcaatgagtcctgatgctttaaaccagttcccagcagctcctattccaactttaagtggcttttctatgactctgcctacaccggtgagtcagccaactgtgataccttcaggtcctgcgggctccatgcccctcagccttggacagccagtcatgggcattaaccttgttggaccagtgggtggagctgcagcccaggcttctagtggtttcataccaacctaccctgcaaatcaggtagtaaagccagaagaagatgacttccaggattttcaagatgcttctaagtcaggatcccttgatgactcattcagtgatttccaagagttgcctgcttcttcaaaaacaagtaactcccagcatggaaacagtgccccttctttgttgatgccacttcctggaactaaagcattgccttcaatggacaaatatgctgtgtttaaaggaattgcagctgacaagtcctctgaaaatactgttccacctggagatcctggtgataaatatagtgctttcagagaacttgaacagacagcagagaataaacctttaggagaaagctttgcagaattcagatctgcaggaactgatgatggtttcaccgattttaaaacagccgatagtgtatcaccactagagccaccaacaaaagacaaaacttttccaccatccttcccctcaggaactatacaacagaaacaacaaacacaagtgaaaaaccctctgaacttagcagacctagatatgttttcctcagttaattgcagcagcgagaaaccattgtctttttcagctgtgtttagcacatcaaaatcagtttctacaccacagtcaacaggttctgctgctactatgacagcattggcagcaacaaaaacttctagtttggctgatgattttggagaattcagcctttttggggaatattctggtctagcacctgttggggagcaggatgactttgcagattttatggctttcagtaatagctctatttcatctgagcaaaagccggatgacaaatatgatgcccttaaagaggaagccagtcctgttcctctaaccagcaacgtgggcagcacagtgaagggtggacaaaactcgactgctgcgtctaccaagtacgatgtcttcagacaactttctctggaagggtctggactaggtgttgaagacctgaaagataacactccttcaggaaaaagtgatgatgattttgctgacttccactccagtaaattttcttccataaactcggacaaatccctgggagagaaagcagtggctttcagacacaccaaagaagactctgcatcagtgaagtccttagatctcccttccattggtggcagcagtgttggcaaggaggactctgaagatgcactctctgttcagtttgacatgaaattggctgatgtgggaggagatcttaagcatgtcatgtctgatagctctttggatttaccaacagttagtggccagcatcctcctgctgcaggaagtggatccccctcagccacctcaattcttcaaaagaaagagacttcatttggcagttctgaaaacatcaccatgacatctctctccaaagtaacgacctttgtaagtgaagatgctcttccagagaccaccttcccagctcttgccagttttaaagacacgattcctcagaccagtgagcaaaaggaatatgaaaacagagactataaagatttcacaaaacaggacctgcctacggctgaacggagccaggaggccacgtgtcccagcccagcgtccagtggtgcctctcaagaaaccccgaacgaatgttcggatgactttggagagtttcaaagtgaaaagcccaaaatcagcaaatttgacttcttagtagccacttcacaaagcaaaatgaaatccagtgaagaaatgatcaaaagtgagctggcaacctttgacctttctgttcaaggtgagtagcttccaaggtagattttactattgtggtttttttccactgagatgttagatgttcttaagaataaaatgttgctctctggtttcgcaggaaatagattgttctaatctttgaaatcagggtcaattacagatagctataataaagatttccctgagacgggagtcaaaatcagcatccctcagataactgctttatgggctaaaaacaagcacagcatgcaggtattgctcattagctcgtttggttagaggtgtgctgtgttaaaagagccagataaatggattcgagccacttgtaggcacattagctccgctcatgttccctgagcacagataatgtcttttaatccaaaggttgcaaagtgggggccggggatctgcatctagcctgcatatcacattgacccacacaaaagatttttaagtacgaagtaattgccagtatttaaaagacatgagatttcccaatctggatttccaacttttcttgagaagtcataatatctggcactagtaggtctacagtcccatatgttggcagctggagccgaagagcaccactccctgtaggtgggtcattctctctctcctaccataatccccaccgcttcctgtctcagcggacctacttaagttgttcactttacttgcctggtctctgaaggcatttgagtttgcctcttctgctttaatctcatcctgacaggaggggtcgttgatttcaactggattgagagactgtgaaggaactcggttacaaatccataacaaatgactggaaaagccacacaactcttacatactgatatttagaaaggtgcttttgttctccagactccagtgattctgcactgggcattatggaagacttgtgatagatcagagaagagtcatgttgaaaacgaaacgcagggaaaccgtgcaagagagaacagtagaaaagatttaacatgtagcttcccagaaagaatgaatgaggaatgtgtttgtgaatgcctcatgacataagcatctgaagaagagggtcgtgggctgggcgcggtggctcacacctgtaatctcaacgctttgggaggggaggcaggcagataacttgagatcaggagttcgagaccagcctggccaacacaatgaaaccgtgtatctactaaaaatacaaaaattagccaggcatgatggtgtgcacctgtagtcccagctactcaggaggctgaggcaggagaattgcttgaacccaggaggcggaggttgcactgagccgagatcacaccaccgtactccngtctgagcgacagagcaagaatctgtctc

SEQ ID NO: 428258 - DNA, 7294 bp, Homo sapiens
gataaggtggcggcggcgaaggcagcggcaggtcgggagcaagatggcgctgcggccaggagctggttctggtggcggcggggccgcgggagctggcgcggggtccgccgggggaggcggcttcatgtttcctgttgcaggtgggataagaccccctcaagcaggcctgatgccgatgcagcaacaaggatttcctatggtctctgtcatgcagcctaatatgcaaggcattatgggaatgaattacagctctcagatgtcccaaggacctattgctatgcaggcaggaataccaatgggaccaatgccagcagcgggaatgccttacctaggacaagcacccttcctgggcatgcgtcctccaggcccacagtacactccagacatgcagaagcagtttgccgaagagcagcagaaacgatttgaacagcagcaaaaactcttagaagaagaaagaaaaagacgccagtttgaagagcagaagcaaaagctcagacttttgagcagtgtgaaacccaagacaggagagaagagtagagatgatgctttggaagccataaaaggaaatttagatgggttttccagagatgcaaaaatgcaccctactccagcatcgcaccccaagaaaccaggcccttccttggaggagaagttcctagtatcttgtgatataagtacatctgggcaggaacaaattaaattaaatacttctgaagttggccacaaagccctaggcccaggttccagtaagaagtatcccagtttaatggccagtaacggggttgctgtagatggatgtgtaagtggtaccaccactgcagaggcagaaaatacttcagatcaaaacctgtcaattgaagagagtggtgtgggagtatttccctcacaggatcctgctcagcccagaatgcctccttggatttacaatgagagtttggttccagatgcctataagaaaatcttagaaaccacaatgactccaactggaatagatactgccaaactgtatcccattctgatgtcatctgggcttcccagggaaactcttggacagatatgggccttagctaatcgaactacacctggcaaacttacaaaagaagaactttataccgttctagccatgatagcggtaacacagaggggcgttcctgcaatgagtcctgatgctttaaaccagttcccagcagctcctattccaactttaagtggcttttctatgactctgcctacaccggtgagtcagccaactgtgataccttcaggtcctgcgggctccatgcccctcagccttggacagccagtcatgggcattaaccttgttggaccagtgggtggagctgcagcccaggcttctagtggtttcataccaacctaccctgcaaatcaggtagtaaagccagaagaagatgacttccaggattttcaagatgcttctaagtcaggatcccttgatgactcattcagtgatttccaagagttgcctgcttcttcaaaaacaagtaactcccagcatggaaacagtgccccttctttgttgatgccacttcctggaactaaagcattgccttcaatggacaaatatgctgtgtttaaaggaattgcagctgacaagtcctctgaaaatactgttccacctggagatcctggtgataaatatagtgctttcagagaacttgaacagacagcagagaataaacctttaggagaaagctttgcagaattcagatctgcaggaactgatgatggtttcaccgattttaaaacagccgatagtgtatcaccactagagccaccaacaaaagacaaaacttttccaccatccttcccctcaggaactatacaacagaaacaacaaacacaagtgaaaaaccctctgaacttagcagacctagatatgttttcctcagttaattgcagcagcgagaaaccattgtctttttcagctgtgtttagcacatcaaaatcagtttctacaccacagtcaacaggttctgctgctactatgacagcattggcagcaacaaaaacttctagtttggctgatgattttggagaattcagcctttttggggaatattctggtctagcacctgttggggagcaggatgactttgcagattttatggctttcagtaatagctctatttcatctgagcaaaagccggatgacaaatatgatgcccttaaagaggaagccagtcctgttcctctaaccagcaacgtgggcagcacagtgaagggtggacaaaactcgactgctgcgtctaccaagtacgatgtcttcagacaactttctctggaagggtctggactaggtgttgaagacctgaaagataacactccttcaggaaaaagtgatgatgattttgctgacttccactccagtaaattttcttccataaactcggacaaatccctgggagagaaagcagtggctttcagacacaccaaagaagactctgcatcagtgaagtccttagatctcccttccattggtggcagcagtgttggcaaggaggactctgaagatgcactctctgttcagtttgacatgaaattggctgatgtgggaggagatcttaagcatgtcatgtctgatagctctttggatttaccaacagttagtggccagcatcctcctgctgcagatatagaggacttaaaatatgctgcttttggaagctacagtagcaattttgcagtgagcacacttacaagctatgactggtcagacagggatgatgcaactcagggcagaaaactctctccatttgtcctctcagcaggaagtggatccccctcagccacctcaattcttcaaaagaaagagacttcatttggcagttctgaaaacatcaccatgacatctctctccaaagtaacgacctttgtaagtgaagatgctcttccagagaccaccttcccagctcttgccagttttaaagacacgattcctcagaccagtgagcaaaaggaatatgaaaacagagactataaagatttcacaaaacaggacctgcctacggctgaacggagccaggaggccacgtgtcccagcccagcgtccagtggtgcctctcaagaaaccccgaacgaatgttcggatgactttggagagtttcaaagtgaaaagcccaaaatcagcaaatttgacttcttagtagccacttcacaaagcaaaatgaaatccagtgaagaaatgatcaaaagtgagctggcaacctttgacctttctgttcaaggatcacacaagaggagtttgagccttggtgataaagaaataagccgttcttctccttctccagctttggagcagcctttcagagaccgttccaatactctgaatgagaagcccgccctgcccgtcatccgagacaagtacaaagacctgacgggagaggtggaggaaaatgagagatatgcatatgaatggcagagatgcctggggagtgccctgaatgtcattaagaaggcaaatgataccttaaatggaatcagtagtagttctgtttgcacagaagtaattcagtcagctcaaggcatggaatatttattaggtgttgttgaagtgtacagggtaaccaagcgtgtggagctggggataaaagccactgcagtgtgcagtgagaaactccagcagttgctgaaggacatcgataaagtatggaataacctaatcggcttcatgtcactcgccacactcacaccagatgaaaactcgctggatttttcctcctgtatgttacggcctgggattaaaaatgctcaggagcttgcctgtggagtgtgcctcttgaatgtggactcgaggagccggaaagaagagaagcctgcagaagaacatcctaaaaaagcattcaactcagaaacagacagtttcaagctggcctatggagggcaccagtatcacgccagctgtgccaacttctggatcaactgtgtcgaaccaaagcctcctggcctcgtcctgcctgacctgctctgaacaactcctctgtgaagcattgacttttttttttctgtgacaccccacggggtgacagggaccaataaatagaatgcgagcactgcacagttcgcttccctgaatcgatatgaagaacaccgcaagggacggggcccccgtcatccccacggccagtctgcaggacttcaggtaaaattgtcccacccaaactgcacgtggcaccagaagcttgctcacttatctctacttaagattttctgaaatacggaccacggctttcttgatctaaggaagaacttgctgctgcagtattgaaactgtgaagaactgacatttgaagaaaaatagattaccgttgcgggactagaatgggcgactgcttggagccagtgcttgtttttatctaggacacttactgtcctgtgaagtagaatacatttatctgcatttagtttgttaatgtctgaaatgaataaaaagaggaaattgcgattaaactgatgttctgctttttatggagaagattctgcccatctcccctggacagtagcaggcaggtgagggcagattttacccacttggttgtcacaactgaaccagttctctactccttcccttcacttctgtccactctcaagactttttcccaaaacatgcctgggcactctgcagccgtgaagaatgctcattttgacagaggcccaaatcctgtgtattaggataatatccttccccccgggagccttcgctgcaaacctgttctgccgcatgcaaagactgtgaccatggagttttctcagacaagatttggaaaggcagtggaatgaaatctctttgcagtggcctctctccaaatttccaaagatgactgcatagggaccaacactgcctgactttgcagtatctgtgagaaaaacctgaaaattaattcagggtgaaaatgtggagctctcggcctagtgtaaagtatcaagatgtatatttatgggatagatacatgacttagaagaagtagaagaaaattgtccagaaacagtactgaattttagatagaaaaggctcatgcttcctggagtagggaattgtctttgccatttaatgtgaatgcataaaattaggggaaaaacccaagtggctaagagctgtgttattcctgggaagaactaccaatctagggcacacgtctctctgaattgttgattatgcgctttatgaagagatttttcaatctcgtgtgctttactttgtgtggtttagaccctctgacctagacttttatttttaaactgaaaaagttggtcttgtctatataattgctgcttttacataatttattttcccctctcaggacaaattctgtcttgctccatcttacagcttttccatgttctccaagaatggtgtggaacattttcattaaacagctgttgctgaggcttctgcttgaccttctgcgtgcccgaatgcacagagaggcaccgaggagagaaaggcttttctcactcgctcccgatgataccgtctctggccattcctgactgaggcagctcactctgaatgggcacctttggagcttttgcccaccacaaggctagtggggtgtttctaacaacacaagtgggacagcttttggcaggcttttcctgaggcctcggcgcttccatcctggacagcaccacttccacatggagctggaatgcaagcaggctgctaattggccttaaaaattctttgtttttttttgagatggagtttcactcttgttgcccaggcttgagtgcagtggcacaatctcggctcagtgcaacctccgcctcccgggttcaagcgattctcctgcctcagcctcgtgagtagctgggattacaggcgtgcaccaccacgcccagctaattttgtatttttggtagaggcagggtttctccatgttggccaggcttgaactccggacctcgggcgatccgcccgcctcagcctcccaaagtaccgggattacaggcgtgagccactgcgcctggcctaaatttcataacagaaccatgacagcagaatctacctttgcaataagaatgtttcccaggagttagagaccagccctgggcatgatggtaaagaccccagctaattatacaaaaaataattagccgggtaggtggagtgcatctgtggacattcgtggtcccagctactaggtaagctgaggcgggagatcacaagtccaggagtttgaggctgcacgtgacagcgtaggtgatgacagagcgagacactgtctcttaaaaaaaaaaaaaaaaaagtttcccagtttgaatttgtattgctgaagcatttttttgaaatgctatatagatgcctgtcatgtcacagtggcccagtatcaacattttaaaaagctcacttggtagctgggctggtttctattcctgagaaattccagaatgcctcagataaaattccttagtataatccccattttccttaccaaggatggtaggcttagtcactccttgggaggtgccacaggaaaattcagcagatgtcaacagaaaaaaagcctttgctatgaaaagtattcactacctttcatatctcttgaatacttgaaatgtttaattagatgccaccaatagggatccaaggagtgtgggacacggttgcgctgcttttctttataaacgtttattaaaatggctcaacgctgcattcagcttcacctcagctcttcttgtcagccaggagccccgtgtccttggaaactgtagccaaggttacttatttccatactgtgcattgtgtcagcccgcttcaccccactgcttgaatggccattaataagcacttttctttttttggtgggatgttttgcctttaaaatttttatggcttagtgtgtaatttaatttttgtctggacatgcttgagatagaagaggtactggatatatgaggatattttccatgctttatttttcctgtggctactagttagcattccataggggttgtgaatttttaattatttgaatattttgtgtacatatacatatttgaagggttttgggggggtcttatttgtttaaaggtgtcttctgtttgcctatttcaagtgtacttcagctttgcaaagattatagggctgtatgttacagaaataggaaatgctggccctgtactggggaccactacaaaaattccctttagccgtgagccactgcgcctggcctaaatttcataacagaaccatgacagcagaatctacctttgcaataagaatgtttcccaggagttagagaccagccctgggcatgatggtaaagaccccagc

SEQ ID NO: 428259 - DNA, 6792 bp, Homo sapiens
  misc_feature (6577)..(6577): n is a, c, g, or t
gataaggtggcggcggcgaaggcagcggcaggtcgggagcaagatggcgctgcggccaggagctggttctggtggcggcggggccgcgggagctggcgcggggtccgccgggggaggcggcttcatgtttcctgttgcaggtgggataagaccccctcaagcaggcctgatgccgatgcagcaacaaggatttcctatggtctctgtcatgcagcctaatatgcaaggcattatgggaatgaattacagctctcagatgtcccaaggacctattgctatgcaggcaggaataccaatgggaccaatgccagcagcgggaatgccttacctaggacaagcacccttcctgggcatgcgtcctccaggcccacagtacactccagacatgcagaagcagtttgccgaagagcagcagaaacgatttgaacagcagcaaaaactcttagaagaagaaagaaaaagacgccagtttgaagagcagaagcaaaagctcagacttttgagcagtgtgaaacccaagacaggagagaagagtagagatgatgctttggaagccataaaaggaaatttagatgggttttccagagatgcaaaaatgcaccctactccagcatcgcaccccaagaaaccaggcccttccttggaggagaagttcctagtatcttgtgatataagtacatctgggcaggaacaaattaaattaaatacttctgaagttggccacaaagccctaggcccaggttccagtaagaagtatcccagtttaatggccagtaacggggttgctgtagatggatgtgtaagtggtaccaccactgcagaggcagaaaatacttcagatcaaaacctgtcaattgaagagagtggtgtgggagtatttccctcacaggatcctgctcagcccagaatgcctccttggatttacaatgagagtttggttccagatgcctataagaaaatcttagaaaccacaatgactccaactggaatagatactgccaaactgtatcccattctgatgtcatctgggcttcccagggaaactcttggacagatatgggccttagctaatcgaactacacctggcaaacttacaaaagaagaactttataccgttctagccatgatagcggtaacacagaggggcgttcctgcaatgagtcctgatgctttaaaccagttcccagcagctcctattccaactttaagtggcttttctatgactctgcctacaccggtgagtcagccaactgtgataccttcaggtcctgcgggctccatgcccctcagccttggacagccagtcatgggcattaaccttgttggaccagtgggtggagctgcagcccaggcttctagtggtttcataccaacctaccctgcaaatcaggtagtaaagccagaagaagatgacttccaggattttcaagatgcttctaagtcaggatcccttgatgactcattcagtgatttccaagagttgcctgcttcttcaaaaacaagtaactcccagcatggaaacagtgccccttctttgttgatgccacttcctggaactaaagcattgccttcaatggacaaatatgctgtgtttaaaggaattgcagctgacaagtcctctgaaaatactgttccacctggagatcctggtgataaatatagtgctttcagagaacttgaacagacagcagagaataaacctttaggagaaagctttgcagaattcagatctgcaggaactgatgatggtttcaccgattttaaaacagccgatagtgtatcaccactagagccaccaacaaaagacaaaacttttccaccatccttcccctcaggaactatacaacagaaacaacaaacacaagtgaaaaaccctctgaacttagcagacctagatatgttttcctcagttaattgcagcagcgagaaaccattgtctttttcagctgtgtttagcacatcaaaatcagtttctacaccacagtcaacaggttctgctgctactatgacagcattggcagcaacaaaaacttctagtttggctgatgattttggagaattcagcctttttggggaatattctggtctagcacctgttggggagcaggatgactttgcagattttatggctttcagtaatagctctatttcatctgagcaaaagccggatgacaaatatgatgcccttaaagaggaagccagtcctgttcctctaaccagcaacgtgggcagcacagtgaagggtggacaaaactcgactgctgcgtctaccaagtacgatgtcttcagacaactttctctggaagggtctggactaggtgttgaagacctgaaagataacactccttcaggaaaaagtgatgatgattttgctgacttccactccagtaaattttcttccataaactcggacaaatccctgggagagaaagcagtggctttcagacacaccaaagaagactctgcatcagtgaagtccttagatctcccttccattggtggcagcagtgttggcaaggaggactctgaagatgcactctctgttcagtttgacatgaaattggctgatgtgggaggagatcttaagcatgtcatgtctgatagctctttggatttaccaacagttagtggccagcatcctcctgctgcagatatagaggacttaaaatatgctgcttttggaagctacagtagcaattttgcagtgagcacacttacaagctatgactggtcagacagggatgatgcaactcagggcagaaaactctctccatttgtcctctcagcaggaagtggatccccctcagccacctcaattcttcaaaagaaagagacttcatttggcagttctgaaaacatcaccatgacatctctctccaaagtaacgacctttgtaagtgaagatgctcttccagagaccaccttcccagctcttgccagttttaaagacacgattcctcagaccagtgagcaaaaggaatatgaaaacagagactataaagatttcacaaaacaggacctgcctacggctgaacggagccaggaggccacgtgtcccagcccagcgtccagtggtgcctctcaagaaaccccgaacgaatgttcggatgactttggagagtttcaaagtgaaaagcccaaaatcagcaaatttgacttcttagtagccacttcacaaagcaaaatgaaatccagtgaagaaatgatcaaaagtgagctggcaacctttgacctttctgttcaaggatcacacaagaggagtttgagccttggtgataaagaaataagccgttcttctccttctccagctttggagcagcctttcagagaccgttccaatactctgaatgagaagcccgccctgcccgtcatccgagacaagtacaaagacctgacgggagaggtggaggaaaatgagagatatgcatatgaatggcagagatgcctggggagtgccctgaatgtcattaagaaggcaaatgataccttaaatggaatcagtagtagttctgtttgcacagaagtaattcagtcagctcaaggcatggaatatttattaggtgttgttgaagtgtacagggtaaccaagcgtgtggagctggggataaaagccactgcagtgtgcagtgagaaactccagcagttgctgaaggacatcgataaagtatggaataacctaatcggcttcatgtcactcgccacactcacaccagatgaaaactcgctggatttttcctcctgtatgttacggcctgggattaaaaatgctcaggagcttgcctgtggagtgtgcctcttgaatgtggactcgaggagccggaaagaagagaagcctgcagaagaacatcctaaaaaagcattcaactcagaaacagacagtttcaagctggcctatggagggcaccagtatcacgccagctgtgccaacttctggatcaactgtgtcgaaccaaagcctcctggcctcgtcctgcctgacctgctctgaacaactcctctgtgaagcattgacttttttttttctgtgacaccccacggggtgacagggaccaataaatagaatgcgagcactgcacagttcgcttccctgaatcgatatgaagaacaccgcaagggacggggcccccgtcatccccacggccagtctgcaggacttcaggtaaaattgtcccacccaaactgcacgtggcaccagaagcttgctcacttatctctacttaagattttctgaaatacggaccacggctttcttgatctaaggaagaacttgctgctgcagtattgaaactgtgaagaactgacatttgaagaaaaatagattaccgttgcgggactagaatgggcgactgcttggagccagtgcttgtttttatctaggacacttactgtcctgtgaagtagaatacatttatctgcatttagtttgttaatgtctgaaatgaataaaaagaggaaattgcgattaaactgatgttctgctttttatggagaagattctgcccatctcccctggacagtagcaggcaggtgagggcagattttacccacttggttgtcacaactgaaccagttctctactccttcccttcacttctgtccactctcaagactttttcccaaaacatgcctgggcactctgcagccgtgaagaatgctcattttgacagaggcccaaatcctgtgtattaggataatatccttccccccgggagccttcgctgcaaacctgttctgccgcatgcaaagactgtgaccatggagttttctcagacaagatttggaaaggcagtggaatgaaatctctttgcagtggcctctctccaaatttccaaagatgactgcatagggaccaacactgcctgactttgcagtatctgtgagaaaaacctgaaaattaattcagggtgaaaatgtggagctctcggcctagtgtaaagtatcaagatgtatatttatgggatagatacatgacttagaagaagtagaagaaaattgtccagaaacagtactgaattttagatagaaaaggctcatgcttcctggagtagggaattgtctttgccatttaatgtgaatgcataaaattaggggaaaaacccaagtggctaagagctgtgttattcctgggaagaactaccaatctagggcacacgtctctctgaattgttgattatgcgctttatgaagagatttttcaatctcgtgtgctttactttgtgtggtttagaccctctgacctagacttttatttttaaactgaaaaagttggtcttgtctatataattgctgcttttacataatttattttcccctctcaggacaaattctgtcttgctccatcttacagcttttccatgttctccaagaatggtgtggaacattttcattaaacagctgttgctgaggcttctgcttgaccttctgcgtgcccgaatgcacagagaggcaccgaggagagaaaggcttttctcactcgctcccgatgataccgtctctggccattcctgactgaggcagctcactctgaatgggcacctttggagcttttgcccaccacaaggctagtggggtgtttctaacaacacaagtgggacagcttttggcaggcttttcctgaggcctcggcgcttccatcctggacagcaccacttccacatggagctggaatgcaagcaggctgctaattggccttaaaaattctttgtttttttttgagatggagtttcactcttgttgcccaggagaattgcttgaaccagagaggcggaggttgcagtgagccgagatcgcgccactgcactccagcctgggcaacaagagcgaaactctgtctcaaaaataaaaaattccctttaacaccttcaaggtcaaatgcctgcctttgtgaacagttaataaactttgacattttcagacatttgccattcagaagggagcattgtagcctgctgtagaccattccagcaaatgtcagaatgcagggcaagatgtgtgtcgactatgttttttatgtttaagttacttacttatttcttcaggtaagtgtgtaccaaataacaatactgaaaagccctccccttgccaggccgaggaaataaagcttaagtgaaacagctcttgggggaaaaatgccactttacaaatacttttctaacaaaatagcattataatgaagtttttacttaattccattatttatatgttgacgtgaatgtaagtggttaaaaagtattcatgtgggacatctcattactttgtagctgtggctttattaaccagtgaatgctgtggcccttagcgaaatgcgttgtcttctgcgtgatgtggaattcgcgcctgtattttaaaagatggtgtggtttctccctttacaaatacttttctaacaaaatagcattataatgaagtttttacttaattccattatttatatgttgaccgtggaatgtagtggtttaacacagtattcatgtgggacatctcattactttgtagctgtggcttattaaccagtgaatggtgtggtccttaaagaaatgcgtgtccttctgcgtgatgtgggaattcggcctgtatnttaaagatggtgtggttcctcccttgttgatttaataaacacggtccttaaacaaagacccacccacatcaccccacaacaaaaagggcgcgcaattcccccggcacactcaccatttgaaaggccaaaactaaaaacgcgggtcatgcgcacaccgctcaaacctgggtgcccacacagatattctccggcggtctaacacaccgcctcttaaa

SEQ ID NO: 428260 - DNA, 4465 bp, Homo sapiens
gataaggtggcggcggcgaaggcagcggcaggtcgggagcaagatggcgctgcggccaggagctggttctggtggcggcggggccgcgggagctggcgcggggtccgccgggggaggcggcttcatgtttcctgttgcaggtgggataagaccccctcaagcaggcctgatgccgatgcagcaacaaggatttcctatggtctctgtcatgcagcctaatatgcaaggcattatgggaatgaattacagctctcagatgtcccaaggacctattgctatgcaggcaggaataccaatgggaccaatgccagcagcgggaatgccttacctaggacaagcacccttcctgggcatgcgtcctccaggcccacagtacactccagacatgcagaagcagtttgccgaagagcagcagaaacgatttgaacagcagcaaaaactcttagaagaagaaagaaaaagacgccagtttgaagagcagaagcaaaagctcagacttttgagcagtgtgaaacccaagacaggagagaagagtagagatgatgctttggaagccataaaaggaaatttagatgggttttccagagatgcaaaaatgcaccctactccagcatcgcaccccaagaaaccaggcccttccttggaggagaagttcctagtatcttgtgatataagtacatctgggcaggaacaaattaaattaaatacttctgaagttggccacaaagccctaggcccaggttccagtaagaagtatcccagtttaatggccagtaacggggttgctgtagatggatgtgtaagtggtaccaccactgcagaggcagaaaatacttcagatcaaaacctgtcaattgaagagagtggtgtgggagtatttccctcacaggatcctgctcagcccagaatgcctccttggatttacaatgagagtttggttccagatgcctataagaaaatcttagaaaccacaatgactccaactggaatagatactgccaaactgtatcccattctgatgtcatctgggcttcccagggaaactcttggacagatatgggccttagctaatcgaactacacctggcaaacttacaaaagaagaactttataccgttctagccatgatagcggtaacacagaggggcgttcctgcaatgagtcctgatgctttaaaccagttcccagcagctcctattccaactttaagtggcttttctatgactctgcctacaccggtgagtcagccaactgtgataccttcaggtcctgcgggctccatgcccctcagccttggacagccagtcatgggcattaaccttgttggaccagtgggtggagctgcagcccaggcttctagtggtttcataccaacctaccctgcaaatcaggtagtaaagccagaagaagatgacttccaggattttcaagatgcttctaagtcaggatcccttgatgactcattcagtgatttccaagagttgcctgcttcttcaaaaacaagtaactcccagcatggaaacagtgccccttctttgttgatgccacttcctggaactaaagcattgccttcaatggacaaatatgctgtgtttaaaggaattgcagctgacaagtcctctgaaaatactgttccacctggagatcctggtgataaatatagtgctttcagagaacttgaacagacagcagagaataaacctttaggagaaagctttgcagaattcagatctgcaggaactgatgatggtttcaccgattttaaaacagccgatagtgtatcaccactagagccaccaacaaaagacaaaacttttccaccatccttcccctcaggaactatacaacagaaacaacaaacacaagtgaaaaaccctctgaacttagcagacctagatatgttttcctcagttaattgcagcagcgagaaaccattgtctttttcagctgtgtttagcacatcaaaatcagtttctacaccacagtcaacaggttctgctgctactatgacagcattggcagcaacaaaaacttctagtttggctgatgattttggagaattcagcctttttggggaatattctggtctagcacctgttggggagcaggatgactttgcagattttatggctttcagtaatagctctatttcatctgagcaaaagccggatgacaaatatgatgcccttaaagaggaagccagtcctgttcctctaaccagcaacgtgggcagcacagtgaagggtggacaaaactcgactgctgcgtctaccaagtacgatgtcttcagacaactttctctggaagggtctggactaggtgttgaagacctgaaagataacactccttcaggaaaaagtgatgatgattttgctgacttccactccagtaaattttcttccataaactcggacaaatccctgggagagaaagcagtggctttcagacacaccaaagaagactctgcatcagtgaagtccttagatctcccttccattggtggcagcagtgttggcaaggaggactctgaagatgcactctctgttcagtttgacatgaaattggctgatgtgggaggagatcttaagcatgtcatgtctgatagctctttggatttaccaacagttagtggccagcatcctcctgctgcagatatagaggacttaaaatatgctgcttttggaagctacagtagcaattttgcagtgagcacacttacaagctatgactggtcagacagggatgatgcaactcagggcagaaaactctctccatttgtcctctcagcaggaagtggatccccctcagccacctcaattcttcaaaagaaagagacttcatttggcagttctgaaaacatcaccatgacatctctctccaaagtaacgacctttgtaagtgaagatgctcttccagagaccaccttcccagctcttgccagttttaaagacacgattcctcagaccagtgagcaaaaggaatatgaaaacagagactataaagatttcacaaaacaggacctgcctacggctgaacggagccaggaggccacgtgtcccagcccagcgtccagtggtgcctctcaagaaaccccgaacgaatgttcggatgactttggagagtttcaaagtgaaaagcccaaaatcagcaaatttgacttcttagtagccacttcacaaagcaaaatgaaatccagtgaagaaatgatcaaaagtgagctggcaacctttgacctttctgttcaaggatcacacaagaggagtttgagccttggtgataaagaaataagccgttcttctccttctccagctttggagcagcctttcagagaccgttccaatactctgaatgagaagcccgccctgcccgtcatccgagacaagtacaaagacctgacgggagaggtggaggaaaatgagagatatgcatatgaatggcagagatgcctggggagtgccctgaatgtcattaagaaggcaaatgataccttaaatggaatcagtagtagttctgtttgcacagaagtaattcagtcagctcaaggcatggaatatttattaggtgttgttgaagtgtacagggtaaccaagcgtgtggagctggggataaaagccactgcagtgtgcagtgagaaactccagcagttgctgaaggacatcgataaagtatggaataacctaatcggcttcatgtcactcgccacactcacaccagatgaaaactcgctggatttttcctcctgtatgttacggcctgggattaaaaatgctcaggagcttgcctgtggagtgtgcctcttgaatgtggactcgaggagccggaaagaagagaagcctgcagaagaacatcctaaaaaagcattcaactcagaaacagacagtttcaagctggcctatggagggcaccagtatcacgccagctgtgccaacttctggatcaactgtgtcgaaccaaagcctcctggcctcgtcctgcctgacctgctctgaacaactcctctgtgaagcattgacttttttttttctgtgacaccccacggggtgacagggaccaataaatagaatgcgagcactgcacagttcgcttccctgaatcgatatgaagaacaccgcaagggacggggcccccgtcatccccacggccagtctgcaggacttcaggtaaaattgtcccacccaaactgcacgtggcaccagaagcttgctcacttatctctacttaagattttctgaaatacggaccacggctttcttgatctaaggaagaacttgctgctgcagtattgaaactgtgaagaactgacatttgaagaaaaatagattaccgttgcgggactagaatgggcgactgcttggagccagtgcttgtttttatctaggacacttactgtcctgtgaagtagaatacatttatctgcatttagtttgttaatgtctgaaatgaataaaaagaggaaattgcgatta

SEQ ID NO: 428261 - DNA, 4275 bp, Homo sapiens
gtagtttttgtagagacaggtttccgccatgttgcccaggctggtctcgaactcctgagctcaagcgacccacccaccttggcctcccgaagtgctgggatcacaggcgtgagccactgcacctagctacttgttgtttttactctctgtctcccttcactagaatgaacctccaagaaggcaaggattttggtctgttttgttcactggtgtgtccccaacacctaatctagtgtcttgcacgtagttggcactcaaaaatatttgctggatgagtggagagtgaagggatgtagtctctgccttactcctgccacctcacttggggtcttcttttcctgctcaaacaggcacagttctgcataagcagatgtccaccaggaaatggggcacctgtcttttctcctagtatccttgtatctatggaagattctcttagaagccccctcacttggcttagggtgggcagtaatttctgcccctctcttgggaaaggaagaagaaaagccgtagtgctgacacagggctgctgaggccccgctctgaagatcccctggaattcctccagtgttcacttagagagatcggggtcatgtctttggtgactgttacattgcaggggttagggatgtgtctggtggctgtccttagaatgtggaggtacttagcacctctcatccttgcttcaagagttcaaccacaatttagagaccataggaaaagaactgttctgcatcctgttatgtgtttaaagataagtgaagtcaaagtgtttgtaagaccttcagattcagaggggtgagatgtttcttcattactttgtgatgctattaacatttagattcttttaaatttttactatccccattttcagctagtttattgggatttcccagattcaaacagatggactcataaataaacctcccaaaaaacaaaagctaataacttgcatagtgcctgccattctccaagcactgttgtaagccttttaccatattaccctatttaatcctctcaaccatccttggaggagctactgttaccatcccaacttcacagatgaggaaactgaggtacagagagattatgtgacttgcctaaggtcatgtagccagtaagaggcatagctggggtttgaacccaagcagtgcagcttctatgctcttaccagtaagctatacagcagcattgagaagtggattggtcccaaagaatagtaagtacacctctgtccagatacacccattgtttctcacagatatcagcaagcaataatgctcccctgtctgggtcctctgtgtctccactgccaacactctctctctgctctctcatcccgtcaggtgttgttgaagtgtacagggtaaccaagcgtgtggagctggggataaaagccactgcagtgtgcagtgagaaactccagcagttgctgaaggacatcgataaagtatggaataacctaatcggcttcatgtcactcgccacactcacaccagatgaaaactcgctggatttttcctcctgtatgttacggcctgggattaaaaatgctcaggagcttgcctgtggagtgtgcctcttgaatgtggactcgaggagccgggcattcaactcagaaacagacagtttcaagctggcctatggagggcaccagtatcacgccagctgtgccaacttctggatcaactgtgtcgaaccaaagcctcctggcctcgtcctgcctgacctgctctgaacaactcctctgtgaagcattgacttttttttttctgtgacaccccacggggtgacagggaccaataaatagaatgcgagcactgcacagttcgcttccctgaatcgatatgaagaacaccgcaagggacggggcccccgtcatccccacggccagtctgcaggacttcaggtaaaattgtcccacccaaactgcacgtggcaccagaagcttgctcacttatctctacttaagattttctgaaatacggaccacggctttcttgatctaaggaagaacttgctgctgcagtattgaaactgtgaagaactgacatttgaagaaaaatagattaccgttgcgggactagaatgggcgactgcttggagccagtgcttgtttttatctaggacacttactgtcctgtgaagtagaatacatttatctgcatttagtttgttaatgtctgaaatgaataaaaagaggaaattgcgattaaactgatgttctgctttttatggagaagattctgcccatctcccctggacagtagcaggcaggtgagggcagattttacccacttggttgtcacaactgaaccagttctctactccttcccttcacttctgtccactctcaagactttttcccaaaacatgcctgggcactctgcagccgtgaagaatgctcattttgacagaggcccaaatcctgtgtattaggataatatccttccccccgggagccttcgctgcaaacctgttctgccgcatgcaaagactgtgaccatggagttttctcagacaagatttggaaaggcagtggaatgaaatctctttgcagtggcctctctccaaatttccaaagatgactgcatagggaccaacactgcctgactttgcagtatctgtgagaaaaacctgaaaattaattcagggtgaaaatgtggagctctcggcctagtgtaaagtatcaagatgtatatttatgggatagatacatgacttagaagaagtagaagaaaattgtccagaaacagtactgaattttagatagaaaaggctcatgcttcctggagtagggaattgtctttgccatttaatgtgaatgcataaaattaggggaaaaacccaagtggctaagagctgtgttattcctgggaagaactaccaatctagggcacacgtctctctgaattgttgattatgcgctttatgaagagatttttcaatctcgtgtgctttactttgtgtggtttagaccctctgacctagacttttatttttaaactgaaaaagttggtcttgtctatataattgctgcttttacataatttattttcccctctcaggacaaattctgtcttgctccatcttacagcttttccatgttctccaagaatggtgtggaacattttcattaaacagctgttgctgaggcttctgcttgaccttctgcgtgcccgaatgcacagagaggcaccgaggagagaaaggcttttctcactcgctcccgatgataccgtctctggccattcctgactgaggcagctcactctgaatgggcacctttggagcttttgcccaccacaaggctagtggggtgtttctaacaacacaagtgggacagcttttggcaggcttttcctgaggcctcggcgcttccatcctggacagcaccacttccacatggagctggaatgcaagcaggctgctaattggccttaaaaattctttgtttttttttgagatggagtttcactcttgttgcccaggagaattgcttgaaccagagaggcggaggttgcagtgagccgagatcgcgccactgcactccagcctgggcaacaagagcgaaactctgtctcaaaaataaaaaattccctttaacaccttcaaggtcaaatgcctgcctttgtgaacagttaataaactttgacattttcagacatttgccattcagaagggagcattgtagcctgctgtagaccattccagcaaatgtcagaatgcagggcaagatgtgtgtcgactatgttttttatgtttaagttacttacttatttcttcaggtaagtgtgtaccaaataacaatactgaaaagccctccccttgccaggccgaggaaataaagcttaagtgaaacagctcttgggggaaaaatgccactttacaaatacttttctaacaaaatagcattataatgaagtttttacttaattccattatttatatgttgacgtgaatgtaagtggttaaaaagtattcatgtgggacatctcattactttgtagctgtggctttattaaccagtgaatgctgtggcccttagcgaaatgcgttgtcttctgcgtgatgtggaattcgcgcctgtattttaaaagatggtgtggtttctcccttgtttgtattttaataaacaactgctctaattgatgtgtttagacattataaagctttacctttaaaatattttcagggtctgttctgaaatcaccccttgttaaacttctctaaccaaaatacaagtgtagaagaatgtcaggctactaagccttt

SEQ ID NO: 428262 - DNA, 6170 bp, Homo sapiens
atagcttaagtagcagctgatgttaatgacagaggctgcgcaggtattctacgttcaggatcactaaaggctactgaggccgggatgctcttactgtatgggagagaggtcgcgggtggacgctgattgcagggctccgacgaggtgaagactgttacaagtaatctattagccggtgggatactacctgtcagagaggtcggatgccgatgctgtaacaatgattttcctactgtaatcctgctgctgatgacagtctacatacttcaagtctagttcattgtgagatatggttaaatgtctctcataatgtccaagaagctattgctatgcagagcaggaataccaatgggaccaatgccagcagcgggaatgccttacctaggacaagcacccttcctgggcatgcgtcctccaggcccacagtacactccagacatgcagaagcagtttgccgaagagcagcagaaacgatttgaacagcagcaaaaactcttagaagaagaaagaaaaagacgccagtttgaagagcagaagcaaaagctcagacttttgagcagtgtgaaacccaagacaggagagaagagtagagatgatgctttggaagccataaaaggaaatttagatgggttttccagagatgcaaaaatgcaccctactccagcatcgcaccccaagaaaccaggtgtgggagtatttccctcacaggatcctgctcagcccagaatgcctccttggatttacaatgagagtttggttccagatgcctataagaaaatcttagaaaccacaatgactccaactggaatagatactgccaaactgtatcccattctgatgtcatctgggcttcccagggaaactcttggacagatatgggccttagctaatcgaactacacctggcaaacttacaaaagaagaactttataccgttctagccatgatagcggtaacacagaggggcgttcctgcaatgagtcctgatgctttaaaccagttcccagcagctcctattccaactttaagtggcttttctatgactctgcctacaccggtgagtcagccaactgtgataccttcaggtcctgcgggctccatgcccctcagccttggacagccagtcatgggcattaaccttgttggaccagtgggtggagctgcagcccaggcttctagtggtttcataccaacctaccctgcaaatcaggtagtaaagccagaagaagatgacttccaggattttcaagatgcttctaagtcaggatcccttgatgactcattcagtgatttccaagagttgcctgcttcttcaaaaacaagtaactcccagcatggaaacagtgccccttctttgttgatgccacttcctggaactaaagcattgccttcaatggacaaatatgctgtgtttaaaggaattgcagctgacaagtcctctgaaaatactgttccacctggagatcctggtgataaatatagtgctttcagagaacttgaacagacagcagagaataaacctttaggagaaagctttgcagaattcagatctgcaggaactgatgatggtttcaccgattttaaaacagccgatagtgtatcaccactagagccaccaacaaaagacaaaacttttccaccatccttcccctcaggaactatacaacagaaacaacaaacacaagtgaaaaaccctctgaacttagcagacctagatatgttttcctcagttaattgcagcagcgagaaaccattgtctttttcagctgtgtttagcacatcaaaatcagtttctacaccacagtcaacaggttctgctgctactatgacagcattggcagcaacaaaaacttctagtttggctgatgattttggagaattcagcctttttggggaatattctggtctagcacctgttggggagcaggatgactttgcagattttatggctttcagtaatagctctatttcatctgagcaaaagccggatgacaaatatgatgcccttaaagaggaagccagtcctgttcctctaaccagcaacgtgggcagcacagtgaagggtggacaaaactcgactgctgcgtctaccaagtacgatgtcttcagacaactttctctggaagggtctggactaggtgttgaagacctgaaagataacactccttcaggaaaaagtgatgatgattttgctgacttccactccagtaaattttcttccataaactcggacaaatccctgggagagaaagcagtggctttcagacacaccaaagaagactctgcatcagtgaagtccttagatctcccttccattggtggcagcagtgttggcaaggaggactctgaagatgcactctctgttcagtttgacatgaaattggctgatgtgggaggagatcttaagcatgtcatgtctgatagctctttggatttaccaacagttagtggccagcatcctcctgctgcaggaagtggatccccctcagccacctcaattcttcaaaagaaagagacttcatttggcagttctgaaaacatcaccatgacatctctctccaaagtaacgacctttgtaagtgaagatgctcttccagagaccaccttcccagctcttgccagttttaaagacacgattcctcagaccagtgagcaaaaggaatatgaaaacagagactataaagatttcacaaaacaggacctgcctacggctgaacggagccaggaggccacgtgtcccagcccagcgtccagtggtgcctctcaagaaaccccgaacgaatgttcggatgactttggagagtttcaaagtgaaaagcccaaaatcagcaaatttgacttcttagtagccacttcacaaagcaaaatgaaatccagtgaagaaatgatcaaaagtgagctggcaacctttgacctttctgttcaaggatcacacaagaggagtttgagccttggtgataaagaaataagccgttcttctccttctccagctttggagcagcctttcagagaccgttccaatactctgaatgagaagcccgccctgcccgtcatccgagacaagtacaaagacctgacgggagaggtggaggaaaatgagagatatgcatatgaatggcagagatgcctggggagtgccctgaatgtcattaagaaggcaaatgataccttaaatggaatcagtagtagttctgtttgcacagaagtaattcagtcagctcaaggcatggaatatttattaggtgttgttgaagtgtacagggtaaccaagcgtgtggagctggggataaaagccactgcagtgtgcagtgagaaactccagcagttgctgaaggacatcgataaagtatggaataacctaatcggcttcatgtcactcgccacactcacaccagatgaaaactcgctggatttttcctcctgtatgttacggcctgggattaaaaatgctcaggagcttgcctgtggagtgtgcctcttgaatgtggactcgaggagccgggcattcaactcagaaacagacagtttcaagctggcctatggagggcaccagtatcacgccagctgtgccaacttctggatcaactgtgtcgaaccaaagcctcctggcctcgtcctgcctgacctgctctgaacaactcctctgtgaagcattgacttttttttttctgtgacaccccacggggtgacagggaccaataaatagaatgcgagcactgcacagttcgcttccctgaatcgatatgaagaacaccgcaagggacggggcccccgtcatccccacggccagtctgcaggacttcaggtaaaattgtcccacccaaactgcacgtggcaccagaagcttgctcacttatctctacttaagattttctgaaatacggaccacggctttcttgatctaaggaagaacttgctgctgcagtattgaaactgtgaagaactgacatttgaagaaaaatagattaccgttgcgggactagaatgggcgactgcttggagccagtgcttgtttttatctaggacacttactgtcctgtgaagtagaatacatttatctgcatttagtttgttaatgtctgaaatgaataaaaagaggaaattgcgattaaactgatgttctgctttttatggagaagattctgcccatctcccctggacagtagcaggcaggtgagggcagattttacccacttggttgtcacaactgaaccagttctctactccttcccttcacttctgtccactctcaagactttttcccaaaacatgcctgggcactctgcagccgtgaagaatgctcattttgacagaggcccaaatcctgtgtattaggataatatccttccccccgggagccttcgctgcaaacctgttctgccgcatgcaaagactgtgaccatggagttttctcagacaagatttggaaaggcagtggaatgaaatctctttgcagtggcctctctccaaatttccaaagatgactgcatagggaccaacactgcctgactttgcagtatctgtgagaaaaacctgaaaattaattcagggtgaaaatgtggagctctcggcctagtgtaaagtatcaagatgtatatttatgggatagatacatgacttagaagaagtagaagaaaattgtccagaaacagtactgaattttagatagaaaaggctcatgcttcctggagtagggaattgtctttgccatttaatgtgaatgcataaaattaggggaaaaacccaagtggctaagagctgtgttattcctgggaagaactaccaatctagggcacacgtctctctgaattgttgattatgcgctttatgaagagatttttcaatctcgtgtgctttactttgtgtggtttagaccctctgacctagacttttatttttaaactgaaaaagttggtcttgtctatataattgctgcttttacataatttattttcccctctcaggacaaattctgtcttgctccatcttacagcttttccatgttctccaagaatggtgtggaacattttcattaaacagctgttgctgaggcttctgcttgaccttctgcgtgcccgaatgcacagagaggcaccgaggagagaaaggcttttctcactcgctcccgatgataccgtctctggccattcctgactgaggcagctcactctgaatgggcacctttggagcttttgcccaccacaaggctagtggggtgtttctaacaacacaagtgggacagcttttggcaggcttttcctgaggcctcggcgcttccatcctggacagcaccacttccacatggagctggaatgcaagcaggctgctaattggccttaaaaattctttgtttttttttgagatggagtttcactcttgttgcccaggagaattgcttgaaccagagaggcggaggttgcagtgagccgagatcgcgccactgcactccagcctgggcaacaagagcgaaactctgtctcaaaaataaaaaattccctttaacaccttcaaggtcaaatgcctgcctttgtgaacagttaataaactttgacattttcagacatttgccattcagaagggagcattgtagcctgctgtagaccattccagcaaatgtcagaatgcagggcaagatgtgtgtcgactatgttttttatgtttaagttacttacttatttcttcaggtaagtgtgtaccaaataacaatactgaaaagccctccccttgccaggccgaggaaataaagcttaagtgaaacagctcttgggggaaaaatgccactttacaaatacttttctaacaaaatagcattataatgaagtttttacttaattccattatttatatgttgacgtgaatgtaagtggttaaaaagtattcatgtgggacatctcattactttgtagctgtggctttattaaccagtgaatgctgtggcccttagcgaaatgcgttgtcttctgcgtgatgtggaattcgcgcctgtattttaaaagatggtgtggtttctcccttgtttgtattttaataaacaactgctctaattgatgtgtttagacattataaagctttacctttaaaatattttcagggtctgttctgaaatcaccccttgttaaacttctctaaccaaaatacaagtgtagaagaatgtcaggctactaagccttt

SEQ ID NO: 428263 - DNA, 4214 bp, Homo sapiens
gtaggctagtagaggctgggtgttgaatcggcgaggaaatatgatgcccttaaagaggaagccagtcctgttcctctaaccagcaacgtgggcagcacagtgaagggtggacaaaactcgactgctgcgtctaccaagtacgatgtcttcagacaactttctctggaagggtctggactaggtgttgaagacctgaaagataacactccttcaggaaaaagtgatgatgattttgctgacttccactccagtaaattttcttccataaactcggacaaatccctgggagagaaagcagtggctttcagacacaccaaagaagactctgcatcagtgaagtccttagatctcccttccattggtggcagcagtgttggcaaggaggactctgaagatgcactctctgttcagtttgacatgaaattggctgatgtgggaggagatcttaagcatgtcatgtctgatagctctttggatttaccaacagttagtggccagcatcctcctgctgcaggaagtggatccccctcagccacctcaattcttcaaaagaaagagacttcatttggcagttctgaaaacatcaccatgacatctctctccaaagtaacgacctttgtaagtgaagatgctcttccagagaccaccttcccagctcttgccagttttaaagacacgattcctcagaccagtgagcaaaaggaatatgaaaacagagactataaagatttcacaaaacaggacctgcctacggctgaacggagccaggaggccacgtgtcccagcccagcgtccagtggtgcctctcaagaaaccccgaacgaatgttcggatgactttggagagtttcaaagtgaaaagcccaaaatcagcaaatttgacttcttagtagccacttcacaaagcaaaatgaaatccagtgaagaaatgatcaaaagtgagctggcaacctttgacctttctgttcaaggatcacacaagaggagtttgagccttggtgataaagaaataagccgttcttctccttctccagctttggagcagcctttcagagaccgttccaatactctgaatgagaagcccgccctgcccgtcatccgagacaagtacaaagacctgacgggagaggtggaggaaaatgagagatatgcatatgaatggcagagatgcctggggagtgccctgaatgtcattaagaaggcaaatgataccttaaatggaatcagtagtagttctgtttgcacagaagtaattcagtcagctcaaggcatggaatatttattaggtgttgttgaagtgtacagggtaaccaagcgtgtggagctggggataaaagccactgcagtgtgcagtgagaaactccagcagttgctgaaggacatcgataaagtatggaataacctaatcggcttcatgtcactcgccacactcacaccagatgaaaactcgctggatttttcctcctgtatgttacggcctgggattaaaaatgctcaggagcttgcctgtggagtgtgcctcttgaatgtggactcgaggagccgggcattcaactcagaaacagacagtttcaagctggcctatggagggcaccagtatcacgccagctgtgccaacttctggatcaactgtgtcgaaccaaagcctcctggcctcgtcctgcctgacctgctctgaacaactcctctgtgaagcattgacttttttttttctgtgacaccccacggggtgacagggaccaataaatagaatgcgagcactgcacagttcgcttccctgaatcgatatgaagaacaccgcaagggacggggcccccgtcatccccacggccagtctgcaggacttcaggtaaaattgtcccacccaaactgcacgtggcaccagaagcttgctcacttatctctacttaagattttctgaaatacggaccacggctttcttgatctaaggaagaacttgctgctgcagtattgaaactgtgaagaactgacatttgaagaaaaatagattaccgttgcgggactagaatgggcgactgcttggagccagtgcttgtttttatctaggacacttactgtcctgtgaagtagaatacatttatctgcatttagtttgttaatgtctgaaatgaataaaaagaggaaattgcgattaaactgatgttctgctttttatggagaagattctgcccatctcccctggacagtagcaggcaggtgagggcagattttacccacttggttgtcacaactgaaccagttctctactccttcccttcacttctgtccactctcaagactttttcccaaaacatgcctgggcactctgcagccgtgaagaatgctcattttgacagaggcccaaatcctgtgtattaggataatatccttccccccgggagccttcgctgcaaacctgttctgccgcatgcaaagactgtgaccatggagttttctcagacaagatttggaaaggcagtggaatgaaatctctttgcagtggcctctctccaaatttccaaagatgactgcatagggaccaacactgcctgactttgcagtatctgtgagaaaaacctgaaaattaattcagggtgaaaatgtggagctctcggcctagtgtaaagtatcaagatgtatatttatgggatagatacatgacttagaagaagtagaagaaaattgtccagaaacagtactgaattttagatagaaaaggctcatgcttcctggagtagggaattgtctttgccatttaatgtgaatgcataaaattaggggaaaaacccaagtggctaagagctgtgttattcctgggaagaactaccaatctagggcacacgtctctctgaattgttgattatgcgctttatgaagagatttttcaatctcgtgtgctttactttgtgtggtttagaccctctgacctagacttttatttttaaactgaaaaagttggtcttgtctatataattgctgcttttacataatttattttcccctctcaggacaaattctgtcttgctccatcttacagcttttccatgttctccaagaatggtgtggaacattttcattaaacagctgttgctgaggcttctgcttgaccttctgcgtgcccgaatgcacagagaggcaccgaggagagaaaggcttttctcactcgctcccgatgataccgtctctggccattcctgactgaggcagctcactctgaatgggcacctttggagcttttgcccaccacaaggctagtggggtgtttctaacaacacaagtgggacagcttttggcaggcttttcctgaggcctcggcgcttccatcctggacagcaccacttccacatggagctggaatgcaagcaggctgctaattggccttaaaaattctttgtttttttttgagatggagtttcactcttgttgcccaggagaattgcttgaaccagagaggcggaggttgcagtgagccgagatcgcgccactgcactccagcctgggcaacaagagcgaaactctgtctcaaaaataaaaaattccctttaacaccttcaaggtcaaatgcctgcctttgtgaacagttaataaactttgacattttcagacatttgccattcagaagggagcattgtagcctgctgtagaccattccagcaaatgtcagaatgcagggcaagatgtgtgtcgactatgttttttatgtttaagttacttacttatttcttcaggtaagtgtgtaccaaataacaatactgaaaagccctccccttgccaggccgaggaaataaagcttaagtgaaacagctcttgggggaaaaatgccactttacaaatacttttctaacaaaatagcattataatgaagtttttacttaattccattatttatatgttgacgtgaatgtaagtggttaaaaagtattcatgtgggacatctcattactttgtagctgtggctttattaaccagtgaatgctgtggcccttagcgaaatgcgttgtcttctgcgtgatgtggaattcgcgcctgtattttaaaagatggtgtggtttctcccttgtttgtattttaataaacaactgctctaattgatgtgtttagacattataaagctttacctttaaaatattttcagggtctgttctgaaatcaccccttgttaaacttctctaaccaaaatacaagtgtagaagaatgtcaggctactaagccttt

SEQ ID NO: 428264 - DNA, 1524 bp, Homo sapiens
tatgatctctagaggtatccctagtaaatctcggcgtatcgcaagtctgctcatctgttgccatttaatgtgaatgcataaaattaggggaaaaacccaagtggctaagagctgtgttattcctgggaagaactaccaatctagggcacacgtctctctgaattgttgattatgcgctttatgaagagatttttcaatctcgtgtgctttactttgtgtggtttagaccctctgacctagacttttatttttaaactgaaaaagttggtcttgtctatataattgctgcttttacataatttattttcccctctcaggacaaattctgtcttgctccatcttacagcttttccatgttctccaagaatggtgtggaacattttcattaaacagctgttgctgaggcttctgcttgaccttctgcgtgcccgaatgcacagagaggcaccgaggagagaaaggcttttctcactcgctcccgatgataccgtctctggccattcctgactgaggcagctcactctgaatgggcacctttggagcttttgcccaccacaaggctagtggggtgtttctaacaacacaagtgggacagcttttggcaggcttttcctgaggcctcggcgcttccatcctggacagcaccacttccacatggagctggaatgcaagcaggctgctaattggccttaaaaattctttgtttttttttgagatggagtttcactcttgttgcccaggagaattgcttgaaccagagaggcggaggttgcagtgagccgagatcgcgccactgcactccagcctgggcaacaagagcgaaactctgtctcaaaaataaaaaattccctttaacaccttcaaggtcaaatgcctgcctttgtgaacagttaataaactttgacattttcagacatttgccattcagaagggagcattgtagcctgctgtagaccattccagcaaatgtcagaatgcagggcaagatgtgtgtcgactatgttttttatgtttaagttacttacttatttcttcaggtaagtgtgtaccaaataacaatactgaaaagccctccccttgccaggccgaggaaataaagcttaagtgaaacagctcttgggggaaaaatgccactttacaaatacttttctaacaaaatagcattataatgaagtttttacttaattccattatttatatgttgacgtgaatgtaagtggttaaaaagtattcatgtgggacatctcattactttgtagctgtggctttattaaccagtgaatgctgtggcccttagcgaaatgcgttgtcttctgcgtgatgtggaattcgcgcctgtattttaaaagatggtgtggtttctcccttgtttgtattttaataaacaactgctctaattgatgtgtttagacattataaagctttacctttaaaatattttcagggtctgttctgaaatcaccccttgttaaacttctctaaccaaaatacaagtgtagaagaatgtcaggctactaagccttt

SEQ ID NO: 428265 - DNA, 1710 bp, Homo sapiens
  misc_feature (56)..(56): n is a, c, g, or t
atgctttatttttcctgtggctactagttagcaatccataggggttgtgaattttnaattatttgaatattttgtgtacatatacatatttgaagggttttgggggggtcttatttgtttaaaggtgtcttctgtttgcctatttcaagtgtacttcagctttgcaaagattatagggctgtatgttacagaaataggaaatgctggccctgtactggggaccactacaaaaattccctttagccgggcgtggtggctcacgcctgtaagcccagctaattttgtatttttggtagaggcagggtttctccatgttggccaggcttgaactccggacctcgggcgatccgcccgcctcagcctcccaaagtaccgggattacaggcgtgagccactgcgcctggcctaaatttcataacagaaccatgacagcagaatctacctttgcaataagaatgtttcccaggagttagagaccagccctgggcatgatggtaaagaccccagctaattatacaaaaaataattagccgggtaggtggagtgcatctgtggacattcgtggtcccagctactaggtaagctgaggcgggagatcacaagtccaggagtttgaggctgcacgtgacagcgtaggtgatgacagagcgagacactgtctcttaaaaaaaaaaaaaaaaaagtttcccagtttgaatttgtattgctgaagcatttttttgaaatgctatatagatgcctgtcatgtcacagtggcccagtatcaacattttaaaaagctcacttggtagctgggctggtttctattcctgagaaattccagaatgcctcagataaaattccttagtataatccccattttccttaccaaggatggtaggcttagtcactccttgggaggtgccacaggaaaattcagcagatgtcaacagaaaaaaagcctttgctatgaaaagtattcactacctttcatatctcttgaatacttgaaatgtttaattagatgccaccaatagggatccaaggagtgtgggacacggttgcgctgcttttctttataaacgtttattaaaatggctcaacgctgcattcagcttcacctcagctcttcttgtcagccaggagccccgtgtccttggaaactgtagccaaggttacttatttccatactgtgcattgtgtcagcccgcttcaccccactgcttgaatggccattaataagcacttttctttttttggtgggatgttttgcctttaaaatttttatggcttagtgtgtaatttaatttttgtctggacatgcttgagatagaagaggtactggatatatgaggatattttccatgctttatttttcctgtggctactagttagcattccataggggttgtgaatttttaattatttgaatattttgtgtacatatacatatttgaagggttttgggggggtcttatttgtttaaaggtgtcttctgtttgcctatttcaagtgtacttcagctttgcaaagattatagggctgtatgttacagaaataggaaatgctggccctgtactggggaccactacaaaaattccctttagccgtgagccactgcgcctggcctaaatttcataacagaaccatgacagcagaatctacctttgcaataagaatgtttcccaggagttagagaccagccctgggcatgatggtaaagaccccagc

SEQ ID NO: 428266 - DNA, 1573 bp, Homo sapiens
  misc_feature (56)..(56): n is a, c, g, or t
atgctttatttttcctgtggctactagttagcaatccataggggttgtgaattttnaattatttgaatattttgtgtacatatacatatttgaagggttttgggggggtcttatttgtttaaaggtgtcttctgtttgcctatttcaagtgtacttcagctttgcaaagattatagggctgtatgttacagaaataggaaatgctggccctgtactggggaccactacaaaaattccctttagccgggcgtgagccactgcgcctggcctaaatttcataacagaaccatgacagcagaatctacctttgcaataagaatgtttcccaggagttagagaccagccctgggcatgatggtaaagaccccagctaattatacaaaaaataattagccgggtaggtggagtgcatctgtggacattcgtggtcccagctactaggtaagctgaggcgggagatcacaagtccaggagtttgaggctgcacgtgacagcgtaggtgatgacagagcgagacactgtctcttaaaaaaaaaaaaaaaaaagtttcccagtttgaatttgtattgctgaagcatttttttgaaatgctatatagatgcctgtcatgtcacagtggcccagtatcaacattttaaaaagctcacttggtagctgggctggtttctattcctgagaaattccagaatgcctcagataaaattccttagtataatccccattttccttaccaaggatggtaggcttagtcactccttgggaggtgccacaggaaaattcagcagatgtcaacagaaaaaaagcctttgctatgaaaagtattcactacctttcatatctcttgaatacttgaaatgtttaattagatgccaccaatagggatccaaggagtgtgggacacggttgcgctgcttttctttataaacgtttattaaaatggctcaacgctgcattcagcttcacctcagctcttcttgtcagccaggagccccgtgtccttggaaactgtagccaaggttacttatttccatactgtgcattgtgtcagcccgcttcaccccactgcttgaatggccattaataagcacttttctttttttggtgggatgttttgcctttaaaatttttatggcttagtgtgtaatttaatttttgtctggacatgcttgagatagaagaggtactggatatatgaggatattttccatgctttatttttcctgtggctactagttagcattccataggggttgtgaatttttaattatttgaatattttgtgtacatatacatatttgaagggttttgggggggtcttatttgtttaaaggtgtcttctgtttgcctatttcaagtgtacttcagctttgcaaagattatagggctgtatgttacagaaataggaaatgctggccctgtactggggaccactacaaaaattccctttagccgtgagccactgcgcctggcctaaatttcataacagaaccatgacagcagaatctacctttgcaataagaatgtttcccaggagttagagaccagccctgggcatgatggtaaagaccccagc

SEQ ID NO: 428267 - DNA, 1617 bp, Homo sapiens
  misc_feature (56)..(56): n is a, c, g, or t
atgctttatttttcctgtggctactagttagcaatccataggggttgtgaattttnaattatttgaatattttgtgtacatatacatatttgaagggttttgggggggtcttatttgtttaaaggtgtcttctgtttgcctatttcaagtgtacttcagctttgcaaagattatagggctgtatgttacagaaataggaaatgctggccctgtactggggaccactacaaaaattccctttagccgggcgtggtggctcacgcctgtaatcccaaagtaccgggattacaggcgtgagccactgcgcctggcctaaatttcataacagaaccatgacagcagaatctacctttgcaataagaatgtttcccaggagttagagaccagccctgggcatgatggtaaagaccccagctaattatacaaaaaataattagccgggtaggtggagtgcatctgtggacattcgtggtcccagctactaggtaagctgaggcgggagatcacaagtccaggagtttgaggctgcacgtgacagcgtaggtgatgacagagcgagacactgtctcttaaaaaaaaaaaaaaaaaagtttcccagtttgaatttgtattgctgaagcatttttttgaaatgctatatagatgcctgtcatgtcacagtggcccagtatcaacattttaaaaagctcacttggtagctgggctggtttctattcctgagaaattccagaatgcctcagataaaattccttagtataatccccattttccttaccaaggatggtaggcttagtcactccttgggaggtgccacaggaaaattcagcagatgtcaacagaaaaaaagcctttgctatgaaaagtattcactacctttcatatctcttgaatacttgaaatgtttaattagatgccaccaatagggatccaaggagtgtgggacacggttgcgctgcttttctttataaacgtttattaaaatggctcaacgctgcattcagcttcacctcagctcttcttgtcagccaggagccccgtgtccttggaaactgtagccaaggttacttatttccatactgtgcattgtgtcagcccgcttcaccccactgcttgaatggccattaataagcacttttctttttttggtgggatgttttgcctttaaaatttttatggcttagtgtgtaatttaatttttgtctggacatgcttgagatagaagaggtactggatatatgaggatattttccatgctttatttttcctgtggctactagttagcattccataggggttgtgaatttttaattatttgaatattttgtgtacatatacatatttgaagggttttgggggggtcttatttgtttaaaggtgtcttctgtttgcctatttcaagtgtacttcagctttgcaaagattatagggctgtatgttacagaaataggaaatgctggccctgtactggggaccactacaaaaattccctttagccgtgagccactgcgcctggcctaaatttcataacagaaccatgacagcagaatctacctttgcaataagaatgtttcccaggagttagagaccagccctgggcatgatggtaaagaccccagc

SEQ ID NO: 428268 - DNA, 3051 bp, Homo sapiens
gataaggtggcggcggcgaaggcagcggcaggtcgggagcaagatggcgctgcggccaggagctggttctggtggcggcggggccgcgggagctggcgcggggtccgccgggggaggcggcttcatgtttcctgttgcaggtgggataagaccccctcaagcaggcctgatgccgatgcagcaacaaggatttcctatggtctctgtcatgcagcctaatatgcaaggcattatgggaatgaattacagctctcagatgtcccaaggacctattgctatgcaggcaggaataccaatgggaccaatgccagcagcgggaatgccttacctaggacaagcacccttcctgggcatgcgtcctccaggcccacagtacactccagacatgcagaagcagtttgccgaagagcagcagaaacgatttgaacagcagcaaaaactcttagaagaagaaagaaaaagacgccagtttgaagagcagaagcaaaagctcagacttttgagcagtgtgaaacccaagacaggagagaagagtagagatgatgctttggaagccataaaaggaaatttagatgggttttccagagatgcaaaaatgcaccctactccagcatcgcaccccaagaaaccaggcccttccttggaggagaagttcctagtatcttgtgatataagtacatctgggcaggaacaaattaaattaaatacttctgaagttggccacaaagccctaggcccaggttccagtaagaagtatcccagtttaatggccagtaacggggttgctgtagatggatgtgtaagtggtaccaccactgcagaggcagaaaatacttcagatcaaaacctgtcaattgaagagagtggtgtgggagtatttccctcacaggatcctgctcagcccagaatgcctccttggatttacaatgagagtttggttccagatgcctataagaaaatcttagaaaccacaatgactccaactggaatagatactgccaaactgtatcccattctgatgtcatctgggcttcccagggaaactcttggacagatatgggccttagctaatcgaactacacctggcaaacttacaaaagaagaactttataccgttctagccatgatagcggtaacacagaggggcgttcctgcaatgagtcctgatgctttaaaccagttcccagcagctcctattccaactttaagtggcttttctatgactctgcctacaccggtgagtcagccaactgtgataccttcaggtcctgcgggctccatgcccctcagccttggacagccagtcatgggcattaaccttgttggaccagtgggtggagctgcagcccaggcttctagtggtttcataccaacctaccctgcaaatcaggtagtaaagccagaagaagatgacttccaggattttcaagatgcttctaagtcaggatcccttgatgactcattcagtgatttccaagagttgcctgcttcttcaaaaacaagtaactcccagcatggaaacagtgccccttctttgttgatgccacttcctggaactaaagcattgccttcaatggacaaatatgctgtgtttaaaggaattgcagctgacaagtcctctgaaaatactgttccacctggagatcctggtgataaatatagtgctttcagagaacttgaacagacagcagagaataaacctttaggagaaagctttgcagaattcagatctgcaggaactgatgatggtttcaccgattttaaaacagccgatagtgtatcaccactagagccaccaacaaaagacaaaacttttccaccatccttcccctcaggaactatacaacagaaacaacaaacacaagtgaaaaaccctctgaacttagcagacctagatatgttttcctcagttaattgcagcagcgagaaaccattgtctttttcagctgtgtttagcacatcaaaatcagtttctacaccacagtcaacaggttctgctgctactatgacagcattggcagcaacaaaaacttctagtttggctgatgattttggagaattcagcctttttggggaatattctggtctagcacctgttggggagcaggatgactttgcagattttatggctttcagtaatagctctatttcatctgagcaaaagccggatgacaaatatgatgcccttaaagaggaagccagtcctgttcctctaaccagcaacgtgggcagcacagtgaagggtggacaaaactcgactgctgcgtctaccaagtacgatgtcttcagacaactttctctggaagggtctggactaggtgttgaagacctgaaagataacactccttcaggaaaaagtgatgatgattttgctgacttccactccagtaaattttcttccataaactcggacaaatccctgggagagaaagcagtggctttcagacacaccaaagaagactctgcatcagtgaagtccttagatctcccttccattggtggcagcagtgttggcaaggaggactctgaagatgcactctctgttcagtttgacatgaaattggctgatgtgggaggagatcttaagcatgtcatgtctgatagctctttggatttaccaacagttagtggccagcatcctcctgctgcagatatagaggacttaaaatatgctgcttttggaagctacagtagcaattttgcagtgagcacacttacaagctatgactggtcagacagggatgatgcaactcagggcagaaaactctctccatttgtcctctcagcaggaagtggatccccctcagccacctcaattcttcaaaagaaagagacttcatttggcagttctgaaaacatcaccatgacatctctctccaaagtaacgacctttgtaagtgaagatgctcttccagagaccaccttcccagctcttgccagttttaaagacacgattcctcagaccagtgagctcgctgcgagtggtgagctccctgtagtgagctccctgcgagtagtgagctccctgcgagtagtgagctccctgcgagt

SEQ ID NO: 428269 - DNA, 2466 bp, Homo sapiens
gataaggtggcggcggcgaaggcagcggcaggtcgggagcaagatggcgctgcggccaggagctggttctggtggcggcggggccgcgggagctggcgcggggtccgccgggggaggcggcttcatgtttcctgttgcaggtgggataagaccccctcaagcaggcctgatgccgatgcagcaacaaggatttcctatggtctctgtcatgcagcctaatatgcaaggcattatgggaatgaattacagctctcagatgtcccaaggacctattgctatgcaggcaggaataccaatgggaccaatgccagcagcgggaatgccttacctaggacaagcacccttcctgggcatgcgtcctccaggcccacagtacactccagacatgcagaagcagtttgccgaagagcagcagaaacgatttgaacagcagcaaaaactcttagaagaagaaagaaaaagacgccagtttgaagagcagaagcaaaagctcagacttttgagcagtgtgaaacccaagacaggagagaagagtagagatgatgctttggaagccataaaaggaaatttagatgggttttccagagatgcaaaaatgcaccctactccagcatcgcaccccaagaaaccaggcccttccttggaggagaagttcctagtatcttgtgatataagtacatctgggcaggaacaaattaaattaaatacttctgaagttggccacaaagccctaggcccaggttccagtaagaagtatcccagtttaatggccagtaacggggttgctgtagatggatgtgtaagtggtaccaccactgcagaggcagaaaatacttcagatcaaaacctgtcaattgaagagagtggtgtgggagtatttccctcacaggatcctgctcagcccagaatgcctccttggatttacaatgagagtttggttccagatgcctataagaaaatcttagaaaccacaatgactccaactggaatagatactgccaaactgtatcccattctgatgtcatctgggcttcccagggaaactcttggacagatatgggccttagctaatcgaactacacctggcaaacttacaaaagaagaactttataccgttctagccatgatagcggtaacacagaggggcgttcctgcaatgagtcctgatgctttaaaccagttcccagcagctcctattccaactttaagtggcttttctatgactctgcctacaccggtgagtcagccaactgtgataccttcaggtcctgcgggctccatgcccctcagccttggacagccagtcatgggcattaaccttgttggaccagtgggtggagctgcagcccaggcttctagtggtttcataccaacctaccctgcaaatcaggtagtaaagccagaagaagatgacttccaggattttcaagatgcttctaagtcaggatcccttgatgactcattcagtgatttccaagagttgcctgcttcttcaaaaacaagtaactcccagcatggaaacagtgccccttctttgttgatgccacttcctggaactaaagcattgccttcaatggacaaatatgctgtgtttaaaggaattgcagctgacaagtcctctgaaaatactgttccacctggagatcctggtgataaatatagtgctttcagagaacttgaacagacagcagagaataaacctttaggagaaagctttgcagaattcagatctgcaggaactgatgatggtttcaccgattttaaaacagccgatagtgtatcaccactagagccaccaacaaaagacaaaacttttccaccatccttcccctcaggaactatacaacagaaacaacaaacacaagtgaaaaaccctctgaacttagcagacctagatatgttttcctcagttaattgcagcagcgagaaaccattgtctttttcagctgtgtttagcacatcaaaatcagtttctacaccacagtcaacaggttctgctgctactatgacagcattggcagcaacaaaaacttctagtttggctgatgattttggagaattcagcctttttggggaatattctggtctagcacctgttggggagcaggatgactttgcagattttatggctttcagtaatagctctatttcatctgagcaaaagccggatgacaaatatgatgcccttaaagaggaagccagtcctgttcctctaaccagcaacgtgggcagcacagtgaagggtggatttagtggggataaaaaattcaaacaacagggatactagtgagttatcaaagcaaccgaaccttgcgaaatgaggtcagtaaagccagaagcaagatgagttgccaggattttccaagatgggtgtaagtcaggatcccttgatgactcaattcagtgataccaagagatgcctgattcatcgatacaacgaagtaactcgcatgcatggaaccggct

SEQ ID NO: 428270 - DNA, 498 bp, Homo sapiens
ggagtgtgcctcttgaatgtggactcgaggagccgggtaagtcacgcagcctccttgcagacagcaaagggcttccctaacatgactctggacaacctcatctggcccactttactgcagagtttgtgaccagaggtggggattttctcaagtcctaaaagctgatggtaggagcagacacattccctcgagagggcagcgggggagctgtggagggaatggacgcggctctcatgcctgcagcaccctgtgcatagtggggaggtcaggggaaaagggtgaacctgtaaagatgtgtttggaggcaagaggccctgttctgggaatgttgttgacctgtggtttcaacgttatttcagaaagaagagaagcctgcagaagaacatcctaaaaaagtatgaaccagttacaccttatcttagcgtctccattttaattttgagtgtggagggcaaattggatgattctatccattgccatcctgaactgttccaatca

SEQ ID NO: 428271 - DNA, 800 bp, Homo sapiens
ggggggtcttatttgtttaaaggtgtcttctgtttgcctatttcaagtgtacttcagctttgcaaagattatagggctgtatgttacagaaataggaaatgctggccctgtactggggaccactacaaaaattccctttagccgggcgtggtggctcacgcctgtaatccccagcactttgggaggccgagccgggtggatcacccgaggtcaggagttcaagaccagcctggccaacatggcgagaccctgtctctactaaaaatacaaaaattagctgggcatggtggcaggtgcctgtaatccgagctactcgggaggctgaggcaggagaattgcttgaaccagagaggcggaggttgcagtgagccgagatcgcgccactgcactccagcctgggcaacaagagcgaaactctgtctcaaaaataaaaaattccctttaacaccttcaaggtcaaatgcctgcctttgtgaacagttaataaactttgacattttcagacatttgccattcagaagggagcattgtagcctgctgtagaccattccagcaaatgtcagaatgcagggcaagatgtgtgtcgactatgttttttatgtttaagttacttacttatttcttcaggtaagtgtgtaccaaataacaatactgaaaagccctccccttgccaggccgaggaaataaagcttaagtgaaacagctcttgggggaaaaatgccactttacaaatacttttctaacaaaatagcattataatgaagtttttacttaattccattatttatatgttgacgtga

SEQ ID NO: 428272 - DNA, 343 bp, Homo sapiens
cactcatggcactgcacgggctcccctggcgcccacctgagactgagttctcagaggtcagagggcgtgttgtactggtgccggccttcctagcacctggaaccgtggcaggttcccagtggatgtgtgggaggttaattcttgtagtggtggtgttagagtactgtacttgccgctaggcctgctgggggtgagtgatgagggagtgaagtgaacagcgtgtggacttgtggacttcttacccatttgtcttgtcgtcctcacagccagatgaaaactcgctggatttttcctcctgtatgttacggcctgggattaaaaatgctcaggagcttgcctgtgg

SEQ ID NO: 428273 - DNA, 314 bp, Homo sapiens
aatgctaaattgcatactatttaaattgtatgaatctttaagtggtggtcttctgtgctaaatatgtaaaatgcctgtataccacatgttaatagtgtttggttaaaccaatctgcctcacttcctggagctgtgatttcaagattcctaaccttaactgagcttctgtcctttctatcatagatcctggtgataaatatagtgctttcagagaacttgaacagacagcagagaataaacctttaggtaagtttttgagtcctcaaaaggataaattatttccatttttaataaaaaaggggttttcgatggtt

SEQ ID NO: 428274 - DNA, 601 bp, Homo sapiens
gcttctgtcctttctatcatagatcctggtgataaatatagtgctttcagagaacttgaacagacagcagagaataaacctttaggtaagtttttgagtcctcaaaaggataaattatttccatttttaataaaaaaggggttttcgatggttctttcagtggcattccctttattttagtgtgtgtgtgtctgtgtgtttaggagaaaaaaactgaatggacaaaacaatatggtatagtagtgatgtttataatagatactcaaactataagtattctaattcaaaaaaccttaataatagcaaccgtgtttaggctgggtgcagtggctcacgcctgtaatcccagcagtttggaaggccaaggagggtggatcacctgaggtcaggagtttgagaccagcctggccaacgtggcaaaaccctgtctttactaaaaatatgaaaattagccgggtgtgatggtgcgcacctgtagtcccgggtactcgggaggctgaggcaagagaatcgcttgaacccaggcagaggttgcagtgagccgagattgtgccactgcactccagtctgggtgacagagcaagactccatctcaaaaaaa
